United States Patent Application Publication US 2011/0182862 A1 - sequence listing, part 7

SEQ ID NO: 8991 - protein, 397 aa, Muscodor strobelii
  misc_feature: SGI Peptide ID NO. 562792
  misc_feature (48)..(214): Pfam Id: PF00270 Pfam Desc: DEAD/DEAH box helicase
  misc_feature (282)..(358): Pfam Id: PF00271 Pfam Desc: Helicase conserved C-terminal domain
  misc_feature (4)..(397): NCBI GI: 145603147 Blast Desc: MGG_04400 [Magnaporthe grisea 70-15] gi|152032534|sp|A4QVP2.1|IF4A_MAGGR RecName: Full=ATP-dependent RNA helicase eIF4A; AltName: Full=Eukaryotic initiation factor 1
  misc_feature (1)..(397): NCBI GI: 164424264 Blast Desc: eIF4A [Neurospora crassa OR74A] gi|161789047|sp|Q7RV88.2|IF4A_NEUCR RecName: Full=ATP-dependent RNA helicase eIF4A; AltName: Full=Eukaryotic initiation factor 1
  misc_feature (2)..(397): NCBI GI: 156057455 Blast Desc: eukaryotic initiation factor 4A [Sclerotinia sclerotiorum 1980] gi|160395529|sp|A7EGL7.1|IF4A_SCLS1 RecName: Full=ATP-dependent RNA helicase eIF4A; AltName: Full=Eukaryotic 1
  misc_feature (1)..(397): NCBI GI: 116180670 Blast Desc: cell cycle control protein-related [Chaetomium globosum CBS 148.51] gi|118593420|sp|Q2HFP1.1|IF4A_CHAGB RecName: Full=ATP-dependent RNA helicase eIF4A; AltName: Full=Eukaryotic 1
  misc_feature (2)..(397): NCBI GI: 154324134 Blast Desc: eukaryotic initiation factor 4A [Botryotinia fuckeliana B05.10] gi|160395528|sp|A6RJ45.1|IF4A_BOTFB RecName: Full=ATP-dependent RNA helicase eIF4A; AltName: Full=Eukaryotic 1
  misc_feature (4)..(397): NCBI GI: 171687533 Blast Desc: protein product [Podospora anserina] gi|170943728|emb|CAP69380.1| protein product [Podospora anserina]
  misc_feature (4)..(397): NCBI GI: 169603339 Blast Desc: SNOG_04678 [Phaeosphaeria nodorum SN15] gi|118593422|sp|Q0UU86.1|IF4A_PHANO RecName: Full=ATP-dependent RNA helicase eIF4A; AltName: Full=Eukaryotic initiation factor 1
  misc_feature (4)..(397): NCBI GI: 189203493 Blast Desc: ATP-dependent RNA helicase eIF4A [Pyrenophora tritici-repentis Pt-1C-BFP] gi|187985181|gb|EDU50669.1| ATP-dependent RNA helicase eIF4A [Pyrenophora tritici-repentis
  misc_feature (1)..(397): NCBI GI: 261356210 Blast Desc: ATP-dependent RNA helicase eIF4A [Verticillium albo-atrum VaMs.102]
  misc_feature (2)..(397): NCBI GI: 258564346 Blast Desc: eukaryotic initiation factor 4A-6 [Uncinocarpus reesii 1704] gi|237908425|gb|EEP82826.1| eukaryotic initiation factor 4A-6 [Uncinocarpus reesii 1704]
  misc_feature: Useful for introducing or modulating the production of volatile compounds
MATDKGLEDIEQSQIESNYDETVDSFDEMNLRSELLRGVYAYGFERPSAIQQRAIMPVIKGHDVIAQAQSGTGKTATFSISVLQKIDPNVKQCQALILAPTRELAQQIQKVVVAIGDFMSIECHACIGGTSVREDMKALQDGPQVVVGTPGRVHDMIQRRFLKTDGMKMFVLDEADEMLSRGFTEQIYDIFQLLPQSTQVVLLSATMPQDVLEVTTKFMRDPVRILVKKDELTLEGIKQFYIAVEKEEWKLDTLSDLYETVTITQAVIFCNTRRKVDWLTDKLTARDFTVSAMHGDMDQAQRDLIMKEFRSGSSRVLIATDLLARGIDVQQVSLVINYDLPANRENYIHRIGRGGRFGRKGVAINFVTAEDVRMMREIEQFYSTQIEEMPMNVADLI

SEQ ID NO: 8992 - DNA, 1840 bp, Muscodor strobelii
  misc_feature: SGI EST ID NO. CUFF.21498.0
  misc_feature: Variant of the nucleotide sequence at SEQ ID NO 8990
ttgggctcctccctctcttttgatcctcccaaatcatctctgatccaaacacaaacacaactgcaaaacaacgttttcctggaccgccctactctcatttccttgagagttccggttcattcacttcgtatttcgtttcttcgccgatttcttgccgcagagcagaagtccgcgcctcttcgcactcaaccccaccacgatccgcgctccccccttcttgaatttcaagctgtgcttgggattcgagaagccgcccagatcacttaatccatcatggctactgataaggggctcgaggacatcgagcagtcccaaatcgagtccaactatgacgagaccgtcgattctttcgatgagatgaacctgcgctcggagctgctccgaggtgtctacgcctatggtttcgagcgtccctctgctattcagcagcgcgctatcatgcccgtcatcaagggtcacgatgtaattgcgcaggctcagtctggtactggcaagaccgccaccttctccatctctgttcttcagaagatcgaccccaacgtcaagcagtgccaggccctcattctcgcccccacccgcgagcttgcccagcagattcagaaggtcgtcgtcgccatcggtgacttcatgagcattgagtgccatgcctgcatcggtggcaccagcgtccgtgaggatatgaaggctcttcaggacggccctcaggtcgtcgtcggcactcctggccgtgttcacgacatgatccagcgacgcttcctcaagactgacggcatgaagatgttcgtcttggacgaggccgatgagatgctttcgcgtggtttcactgagcaaatctatgacatcttccagctgctcccgcagtccacccaggttgtcctcctgtcggctaccatgccccaggatgttttggaggttaccaccaagttcatgcgcgaccccgtccgcattctcgtcaagaaggacgagcttaccctcgagggtatcaagcaattctacattgctgtcgagaaggaggagtggaagctcgacaccctgtccgatttgtacgagactgtcaccatcactcaggccgtcatcttctgcaacacccgcagaaaggttgattggctcactgacaagctcactgcccgtgacttcactgtctccgccatgcacggcgatatggaccaggctcagcgtgatctcatcatgaaggagttccgctctggctcctcccgtgttctcatcgccaccgatcttctcgctcgtggtatcgatgtgcagcaggtctccctcgttatcaactacgaccttcccgctaaccgcgagaactacatccaccgcatcggtcgtggtggtcgttttggccgaaaaggtgttgccatcaactttgtcactgctgaggatgtccgcatgatgcgtgagattgagcagttctacagcacccaaattgaagagatgccgatgaacgtggccgacctcatctaagcacacctctcaccctacacgcgaacctatttacgatcctcctacattttgtgccccaacattagtggcccggttattccaggtttagatagacagagaggcccgtggtggcttccaccaagacgcggtggccagctggcacaggccgcctcgcggaatttctgatggtgaacgaaaagtaattgatgcatctgggcatttgcggctaggttattggcacccaattcacggtggtgctcattgcgcggcggcaggagtcgtcggtgttttctcgtctgctaatttcatgcgtacatttgtacctacttacgccgtaagatgcttttctctctcaataaaattcctcgatttaataatgaattttctgctgcat

SEQ ID NO: 8993 - DNA, 1272 bp, Muscodor strobelii
  misc_feature: SGI cDNA ID NO. 562793
  misc_feature: Encodes the peptide sequence at SEQ ID NO 8994
atgcaagaggaccttcatcaagagcgagaagagctcaatacccgaattttggatctgaaaaacgacgttcagcagcatgttgatcgcaaccatgctgacatcatggaacaactactcacggtcgagagggattcagaggacctagcacgtcgtaccagcagtgtcgaggccgctgtctctgacatagggaaatccttacagggcctcgaaaccaaattcgacaaaagtactggccaaatccaaaacagactcgctctgattgacacttccttagacgacatgaagaatggtttcgaacggatattggatcaagaacgtgaaaaccgatttgcaaccctcaaagacaattcagagttgaaggctagcatcacagacttagcaaatgtcattcaaaagaaggaaacgagccagactttagagctgcagaggcatatggatgctgtccatttggatatcgtatcaacaagatgtcggcaagaagcactcgtcaatgcagatcagaagcagagacttgaggcatacgaagccgtgatgggcacagtcatggaagtatcccgacgacactgtgaccataaagatgtcacagaaggcaaagaagggctggaggatgccaggatcttcattcgaacgtattctcttctcagcagctattacaatattttacatgcaaaagggggcgagacagaccaccacatggtcatcacttatttcttacgaatcttgaaccagcatgcaagttgctatctccaaaggaggctgctcgaattatttccagagaatgtcaagatagctaacttgtcctatggctcgaactcgccacgaatcttcatcaaatacgagggtttggattggtaccaagtcaagcatgctgtccacaacctgggcggcttgaagcgacttcagatggcagtcaacgagcgatggatgggtccagcgcagacgatgaaaaagcgcaagcgagcagtcactgacagcagcattgatgtgctaagtcgaaatgatgcagcagctgtcaaggacgaatcgccgtcgacaatgagaactgttggtgagttcatcaatgcagctggctcgacaaaacgtacccatcaacaccggccccatcagcgtcttccggctgctcctcgaccgtcaggtatcgctcagagtgattcgtcacagatggcagattcaaacgaccgaagacgaagtttgaggggcggaggacgcgttgattacaagcctcctcgccggctggctgaatgggtgagatcggatgacagtcgacattag

SEQ ID NO: 8994 - protein, 423 aa, Muscodor strobelii
  misc_feature: SGI Peptide ID NO. 562793
MQEDLHQEREELNTRILDLKNDVQQHVDRNHADIMEQLLTVERDSEDLARRTSSVEAAVSDIGKSLQGLETKFDKSTGQIQNRLALIDTSLDDMKNGFERILDQERENRFATLKDNSELKASITDLANVIQKKETSQTLELQRHMDAVHLDIVSTRCRQEALVNADQKQRLEAYEAVMGTVMEVSRRHCDHKDVTEGKEGLEDARIFIRTYSLLSSYYNILHAKGGETDHHMVITYFLRILNQHASCYLQRRLLELFPENVKIANLSYGSNSPRIFIKYEGLDWYQVKHAVHNLGGLKRLQMAVNERWMGPAQTMKKRKRAVTDSSIDVLSRNDAAAVKDESPSTMRTVGEFINAAGSTKRTHQHRPHQRLPAAPRPSGIAQSDSSQMADSNDRRRSLRGGGRVDYKPPRRLAEWVRSDDSRH

SEQ ID NO: 8995 - DNA, 796 bp, Muscodor strobelii
  misc_feature: SGI EST ID NO. CUFF.21473.0
  misc_feature: Variant of the nucleotide sequence at SEQ ID NO 8993
ggaagtatcccgacgacactgtgaccataaagatgtcacagaaggcaaagaagggctggaggatgccaggatcttcattcgaacgtattctcttctcagcagctattacaatattttacatgcaaaagggggcgagacagaccaccacatggtcatcacttatttcttacgaatcttgaaccagcatgcaagttgctatctccaaaggaggctgctcgaattatttccagagaatgtcaagatagctaacttgtcctatggctcgaactcgccacgaatcttcatcaaatacgagggtttggattggtaccaagtcaagcatgctgtccacaacctgggcggcttgaagcgacttcagatggcagtcaacgagcgatggatgggtccagcgcagacgatgaaaaagcgcaagcgagcagtcactgacagcagcattgatgtgctaagtcgaaatgatgcagcagctgtcaaggacgaatcgccgtcgacaatgagaactgttggtgagttcatcaatgcagctggctcgacaaaacgtacccatcaacaccggccccatcagcgtcttccggctgctcctcgaccgtcaggtatcgctcagagtgattcgtcacagatggcagattcaaacgaccgaagacgaagtttgaggggcggaggacgcgttgattacaagcctcctcgccggctggctgaatgggtgagatcggatgacagtcgacattagtctggtatgaaacttggatggctagggcaaataaagaggcatctgtcagccctatgtcacagatagagc

SEQ ID NO: 8996 - DNA, 561 bp, Muscodor strobelii
  misc_feature: SGI cDNA ID NO. 562794
  misc_feature: Encodes the peptide sequence at SEQ ID NO 8997
atggcggaaaacgtacaacccgctaccggtgctggcgcaggtggcggcgatcagcctgggctcgcgcactacgagaaacagcgacagtatctaaaggagctactacagagccggaaatccatcgaacggcagcttgtcgcacaggaagctaccatcttgcagaaggagaccgaatacctcgagagcacgccctacggcaacatcattgcgggctttgatggctacatcaaaggtggctcaaacgccgcccgcaaacgcactggcctaatcgaccagaaccgcgtcttttcgcgatcttccatctcccataaccctcagcatcccgaacacagcgaagcccagtccgcgacctcgacgcctgccgcccccacgcccgtttcgacctccttcgtcaaggacaacaaggacggcggctcgaaccagccgacgcccacctccgccacagagaagaagcccccccaacaagaagaagaagcagaagaaagaagccgatgtcgaagacagcgaaaccgactcacgcgaggtcaagaagatccgtaccaattttggcgcagcccgtaa

SEQ ID NO: 8997 - protein, 186 aa, Muscodor strobelii
  misc_feature: SGI Peptide ID NO. 562794
  misc_feature (26)..(104): Pfam Id: PF09340 Pfam Desc: Histone acetyltransferase subunit NuA4
  misc_feature (21)..(151): NCBI GI: 39974619 Blast Desc: MGG_00544 [Magnaporthe grisea 70-15] gi|145018555|gb|EDK02834.1| MGG_00544 [Magnaporthe grisea 70-15]
  misc_feature (20)..(148): NCBI GI: 85112016 Blast Desc: NCU03289 [Neurospora crassa OR74A] gi|74618041|sp|Q7SDW6.1|EAF6_NEUCR RecName: Full=Chromatin modification-related protein eaf-6 gi|28925987|gb|EAA34979.1|
  misc_feature (1)..(148): NCBI GI: 116182418 Blast Desc: CHGG_01837 [Chaetomium globosum CBS 148.51] gi|88186134|gb|EAQ93602.1| CHGG_01837 [Chaetomium globosum CBS 148.51]
  misc_feature (21)..(172): NCBI GI: 46108424 Blast Desc: FG01094.1 [Gibberella zeae PH-1]
  misc_feature (21)..(151): NCBI GI: 256735133 Blast Desc: [Nectria haematococca mpVI 77-13-4]
  misc_feature (20)..(131): NCBI GI: 171695410 Blast Desc: protein product [Podospora anserina] gi|170947947|emb|CAP60111.1| protein product [Podospora anserina]
  misc_feature (20)..(148): NCBI GI: 154324138 Blast Desc: [Botryotinia fuckeliana B05.10] gi|150842697|gb|EDN17890.1| [Botryotinia fuckeliana B05.10]
  misc_feature (20)..(151): NCBI GI: 156057451 Blast Desc: [Sclerotinia sclerotiorum 1980] gi|154702242|gb|EDO01981.1| [Sclerotinia sclerotiorum 1980]
  misc_feature (1)..(136): NCBI GI: 261204970 Blast Desc: conserved [Ajellomyces dermatitidis SLH14081] gi|239592281|gb|EEQ74862.1| conserved [Ajellomyces dermatitidis SLH14081]
  misc_feature (1)..(136): NCBI GI: 239611565 Blast Desc: conserved [Ajellomyces dermatitidis ER-3]
MAENVQPATGAGAGGGDQPGLAHYEKQRQYLKELLQSRKSIERQLVAQEATILQKETEYLESTPYGNIIAGFDGYIKGGSNAARKRTGLIDQNRVFSRSSISHNPQHPEHSEAQSATSTPAAPTPVSTSFVKDNKDGGSNQPTPTSATEKKPPQQEEEAEERSRCRRQRNRLTRGQEDPYQFWRSP

SEQ ID NO: 8998 - DNA, 1361 bp, Muscodor strobelii
  misc_feature: SGI EST ID NO. CUFF.21510.1
  misc_feature: Variant of the nucleotide sequence at SEQ ID NO 8996
cgacaactctcccaagattctctccacataccttcacgttcagccacttccgccggcgaaacttgctcggttcgtagcttacaagcgctcggcgccctttggttgtcatggcggaaaacgtacaacccgctaccggtgctggcgcaggtggcggcgatcagcctgggctcgcgcactacgagaaacagcgacagtatctaaaggagctactacagagccggaaatccatcgaacggcagcttgtcgcacaggaagctaccatcttgcagaaggagaccgaatacctcgagagcacgccctacggcaacatcattgcgggctttgatggctacatcaaaggtggctcaaacgccgcccgcaaacgcactggcctaatcgaccagaaccgcgtcttttcgcgatcttccatctcccataaccctcagcatcccgaacacagcgaagcccagtccgcgacctcgacgcctgccgcccccacgcccgtttcgacctccttcgtcaaggacaacaaggacggcggctcgaaccagccgacgcccacctccgccacagagaagaagcccccccaacaagaagaagaagcagaagaaagaagccgatgtcgaagacagcgaaaccgactcacgcgaggtcaagaagatccgtaccaattttggcgcagcccgtaaataaggtcagactgtgcaacggtcacttctctgtcgtagcccgcaacaaagggctattctatgcatttttaggagcgaggggtacggcgttgatgacttcaaagtggtgtgctttaaagtccttactggcaaggcagattggactcgtgccgaaaaggtaacatgtgccatgttaagtgcaggcgggtgctactatcacgataaacaaacgaggatacagaatttgtattatgttctccgtcgtcttatttgagttaaacaagtgtagaatgcccatcatactacagggacgatgcaatgatgagggtatctcagatgacagctttaaagtaaagcccgaaccacccagatcttcattgtgtatttctcgagaatcgtgcttggtatagcgagatcaacagaacgtcttgatccatgtaacaataactttgaaacgccatggtgactattattcggggatgaagttggcaagatcgcgaaaacgtgccacaaacaacggtgtcgtcgtatccaaacaccattatcattttagatcgatcagtatctactacgatttcgtgcttaccactcgatgaagagtgtctctagcgatagcattaagaacaacatcgcttacaaaatcgccacaagtagctactctatctacatatagttaactcgaagctaccgacctagcaattcgggatgtaaatg

SEQ ID NO: 8999 - DNA, 2142 bp, Muscodor strobelii
  misc_feature: SGI cDNA ID NO. 562795
  misc_feature: Elevated expression when VOC is produced
  misc_feature: Encodes the peptide sequence at SEQ ID NO 9000
atgacaattcgagcaacgaagttcactcccgaggtgcttctctctgcccctcgtcgtagtgcagctgtgcctaacatgagtgggaaacttgctctatacacagtatcacaatactcattcgagtctcattccaagagctacgctatcaaggttcttgatatttcaacaggccaatcaacgcagttattcgacaaccctgcatacacggagccgacatggatctcagaaaaggaattcatcttcgtgagcagcgagaccaaagacaaaaatgcagtctcacagttggtagtagccgatgtaaaggatatttccacacgtcatgtggtattgagctttaaatgcgccgtgtccaacttgaagttgaaggatatcggcgatggaactgttgctttagctttgacggcgccttctactgctgatggtcaaatggtcgactctacgaaggagaaggagcccagatcctcggcccgcgtgtactcgaagcttttcgtcagacattgggatgcgtatgtagacaaggcgaaaagtgctgtgttcttcggtgcgttaaagaaagacgataagtctggacattacaaagtccaaggctccggctctctgaccaatgccctggccggcaccaaacttgaatgccctgttccgaattttggcggcgctggggattttgacatcggcaaaaaggggctggtcttcttgtccaaggatcctgagctcattgatgcgctgtggacgaagacggatgtttactatgtgccgctgaagacgtttgctgaggagaaagctccgttcccgcagattgttaagactggagagctgatggggtactctggagctccgactttttcacatgatgggaagaaacttgcgtttacgagaatgaagcacaagcagtatgagtcagataagcagcgattgctgcttattcctgatatcgaggacttgagtgccgtgcaggagttttgtatgttgtcccacaaaacagacgacggtgaaggcagatgggattcgaggccggactcgatcgtttggagcaatgacgacacagagctgtatgtaactgcagaattgcacggtagaaaccgactattcaagcttccatcaactccacacgaagccaaggacctaccagagcccatcacagaacacggtacagtgggaagtgtctcaaatctatccgacaaagacgacgccctcttcatcacgacaacatcgctagtggataattcatcgtactctatcgtagatcccaagtcaaaagacaacagtctgatatcatccatctcgaaagaagggaaaagctttgggctgtcaaagaatcaattcgacgagttctggtacaaaggtgacggtgactacaaatgccatgctctggtcatgaagccatcgaatttcgacccggcgaagaaatatcccttagcattcctcatccacggaggcccccaaggcgcttggggtgattcatggagcacccgctggaacccagctatcttctccgaacaaggctatgttgccgtaatgccaaatccaacgggatcgactgggtatggtcaggcctatactgatgccattgccaagaattggggtggacgtccttataatgacctcgaactatgctttgaacatattgcgaataatttatcgtacgtcgacacggataatgctgttgccctcggtgcttcgtacggaggatacatgatcaactgggtccaaggccaccccctaggccgtaaattcaaagctctagtctgccacgacggcatattcagcaccttagccgcctttgcaactgaagaacttttcttcacactacacgacaacggcggaacgccatgggaacatagagagctctatgaaaaatgggatccctctgcgttcgtagccaactggtctacgccccaactcgtcatccacagcgagttagactaccgtctaccgatcgcggagggcctcgctgcgttcaatgcgctacagactaaaggtgttccttcaaagttcttgatgttcccagatgagaaccactgggtactgaaacctgagaactctctcgtctggcataaagaagtgctaggttggattaatgggtacacgggtcttgatacgacagatcttgaatctggggtcgaggacctgagcatcagataa

SEQ ID NO: 9000 - protein, 713 aa, Muscodor strobelii
  misc_feature: SGI Peptide ID NO. 562795
  misc_feature (488)..(699): Pfam Id: PF00326 Pfam Desc: Prolyl oligopeptidase family
  misc_feature (264)..(305): Pfam Id: PF07676 Pfam Desc: WD40-like Beta Propeller Repeat
  misc_feature (1)..(712): NCBI GI: 46108426 Blast Desc: FG01095.1 [Gibberella zeae PH-1]
  misc_feature (1)..(712): NCBI GI: 256735132 Blast Desc: [Nectria haematococca mpVI 77-13-4]
  misc_feature (1)..(699): NCBI GI: 171695412 Blast Desc: protein product [Podospora anserina] gi|170947948|emb|CAP60112.1| protein product [Podospora anserina]
  misc_feature (1)..(700): NCBI GI: 37181258 Blast Desc: dipeptidyl peptidase [Beauveria bassiana]
  misc_feature (1)..(712): NCBI GI: 156056819 Blast Desc: SS1G_04140 [Sclerotinia sclerotiorum 1980] gi|154701926|gb|EDO01665.1| SS1G_04140 [Sclerotinia sclerotiorum 1980]
  misc_feature (1)..(699): NCBI GI: 164427158 Blast Desc: NCU03290 [Neurospora crassa OR74A] gi|157071631|gb|EAA34980.2| NCU03290 [Neurospora crassa OR74A]
  misc_feature (1)..(712): NCBI GI: 116182416 Blast Desc: CHGG_01836 [Chaetomium globosum CBS 148.51] gi|88186133|gb|EAQ93601.1| CHGG_01836 [Chaetomium globosum CBS 148.51]
  misc_feature (1)..(698): NCBI GI: 261356331 Blast Desc: dipeptidyl-peptidase V [Verticillium albo-atrum VaMs.102]
  misc_feature (148)..(712): NCBI GI: 154301061 Blast Desc: BC1G_10503 [Botryotinia fuckeliana B05.10] gi|150856251|gb|EDN31443.1| BC1G_10503 [Botryotinia fuckeliana B05.10]
  misc_feature (109)..(712): NCBI GI: 145611254 Blast Desc: MGG_00543 [Magnaporthe grisea 70-15] gi|145018556|gb|EDK02835.1| MGG_00543 [Magnaporthe grisea 70-15]
  misc_feature (342)..(690): SWISSPROT Homolog: EC 3.4.19.1 Acylaminoacyl-peptidase
  misc_feature: Useful for introducing or modulating the production of volatile compounds
MTIRATKFTPEVLLSAPRRSAAVPNMSGKLALYTVSQYSFESHSKSYAIKVLDISTGQSTQLFDNPAYTEPTWISEKEFIFVSSETKDKNAVSQLVVADVKDISTRHVVLSFKCAVSNLKLKDIGDGTVALALTAPSTADGQMVDSTKEKEPRSSARVYSKLFVRHWDAYVDKAKSAVFFGALKKDDKSGHYKVQGSGSLTNALAGTKLECPVPNFGGAGDFDIGKKGLVFLSKDPELIDALWTKTDVYYVPLKTFAEEKAPFPQIVKTGELMGYSGAPTFSHDGKKLAFTRMKHKQYESDKQRLLLIPDIEDLSAVQEFCMLSHKTDDGEGRWDSRPDSIVWSNDDTELYVTAELHGRNRLFKLPSTPHEAKDLPEPITEHGTVGSVSNLSDKDDALFITTTSLVDNSSYSIVDPKSKDNSLISSISKEGKSFGLSKNQFDEFWYKGDGDYKCHALVMKPSNFDPAKKYPLAFLIHGGPQGAWGDSWSTRWNPAIFSEQGYVAVMPNPTGSTGYGQAYTDAIAKNWGGRPYNDLELCFEHIANNLSYVDTDNAVALGASYGGYMINWVQGHPLGRKFKALVCHDGIFSTLAAFATEELFFTLHDNGGTPWEHRELYEKWDPSAFVANWSTPQLVIHSELDYRLPIAEGLAAFNALQTKGVPSKFLMFPDENHWVLKPENSLVWHKEVLGWINGYTGLDTTDLESGVEDLSIR

SEQ ID NO: 9001 - DNA, 3384 bp, Muscodor strobelii
  misc_feature: SGI EST ID NO. CUFF.21567.0
  misc_feature: Variant of the nucleotide sequence at SEQ ID NO 8999
cgacggtgaaggcagatgggattcgaggccggactcgatcgtttggagcaatgacgacacagagctgtatgtaactgcagaattgcacggtagaaaccgactattcaagcttccatcaactccacacgaagccaaggacctaccagagcccatcacagaacacggtacagtgggaagtgtctcaaatctatccgacaaagacgacgccctcttcatcacgacaacatcgctagtggataattcatcgtactctatcgtagatcccaagtcaaaagacaacagtctgatatcatccatctcgaaagaagggaaaagctttgggctgtcaaagaatcaattcgacgagttctggtacaaaggtgacggtgactacaaatgccatgctctggtcatgaagccatcgaatttcgacccggcgaagaaatatcccttagcattcctcatccacggaggcccccaaggcgcttggggtgattcatggagcacccgctggaacccagctatcttctccgaacaaggctatgttgccgtaatgccaaatccaacgggatcgactgggtatggtcaggcctatactgatgccattgccaagaattggggtggacgtccttataatgacctcgaactatgctttgaacatattgcgaataatttatcgtacgtcgacacggataatgctgttgccctcggtgcttcgtacggaggatacatgatcaactgggtccaaggccaccccctaggccgtaaattcaaagctctagtctgccacgacggcatattcagcaccttagccgcctttgcaactgaagaacttttcttcacactacacgacaacggcggaacgccatgggaacatagagagctctatgaaaaatgggatccctctgcgttcgtagccaactggtctacgccccaactcgtcatccacagcgagttagactaccgtctaccgatcgcggagggcctcgctgcgttcaatgcgctacagactaaaggtgttccttcaaagttcttgatgttcccagatgagaaccactgggtactgaaacctgagaactctctcgtctggcataaagaagtgctaggttggattaatgggtacacgggtcttgatacgacagatcttgaatctggggtcgaggacctgagcatcagataagagttgtcataatcaaaaggacagattgctattgaaattgtattgaggagttcactgtaccaagttcaattcgattcatgaatgtagcattttgcgtgtgcacccaagactacacgacatcgaagagtagtagagctatcatgatgactctttattactgcgatagataatgttgatgataagctactagtggagcaaactaacctcgatccaataccatgcaaagagctttggccgatggccaacaggagagggggatattgaatctacatgcaagccagatgattagcgtctcctgtcagctgcgtcgctatttgaagattttctcatcttgataagtcggtctttgagggccctctctttctcctttaattcttcagcctgatgatctgtatgctttgtcttggtctgaggggatgaacgagtcagctcggctgtggcccggggcggaacagtcagaaacgggtgctctactatctaagaagaacgaacctcctcggccgccgaggccgcatggcgctttgttgaggatcggggtctggcttcatcttccgaaacatcagctggtctgtcacgacgtcggggggagtctggatgttgtctctgtttcttaggggagcttcgcctgccagaagacctgttgtcgtctctgtctctgcctctgcctgggctcctacgtcgagaatacctgctgtccgggggcgaatttgatcgactcatactgcgagtaaatgatcgtctcaggcgtccacttcgattcggagaggggctccggctgatcaattctcgcactggtcgtctgcgaggactgcggggtggcgagcgggatgacgacagtgagcgcggacgtgaccgggatggcgagcgactcagtcggcgtctatccctacgagttggggatctggaacggcttggcgaaccggagtatctacgtcttttgggtgcgggtgagcgggatctactgctgccctgcgagtcggaacgactgtcagccgaggagctgtgccttctgcctcgatagttccgacctctaccactcgagcgctctcttttcaagggctgtggtggagagcgatccctgcctcgatgtcggggtgggcttggtgatctcacgtgcccccgccgatttcggtcacctatcttgctcgctgaacgtgagggtgatcgagacgacgagcttcgcgatcctgctgactcggaacgggttgggctgcggccgcgtcggtattcctgtcggcctccacgacggccgcccggtacatatcggtctctgttgtttgcctgatacgagtcccgctctcgtctgcgaggcggcgaagcacttcgatcagcgccgcggccaaagcctcttctgcggtcatcgaaggctctgtcacctcggttgctgcctccacgccagttgtcgcctcggccaccgcgtccaccgcggaaaccacggtcacgtcgttcccgctctcggatttcagccagctcgcgatcacgtcgctcctgctcctctcgacgggtccgtgcttcttcggcagctttgtccgcatcgatctatacgtcgttagcctctggtcgtggtgttgtgggggaagaagggaaggaggagcgtaccttctcttgaatgagttccaatttcttcgcttcgagtagctccttaggcacaccctggggactggattgggcactcagacagagctgccagagctctttgcagaacggggcggtgtctttgtcgaggaaaccggtgagctgaatctgcagagctttaatatcgggctacagtggccaaggcaaacgcgttagatcacggcggcagcagtaggtgggcagtggtgggattgggtgcagatgtactcacataacgaggaccatcaattagattgaagcacagctcgataacgacatcgtcttcagaccctagtatttccgagatgctgctagcaatccatctgggagaacctggtggttagcaatggggatgatgagccaagggagggatggaccggatggttgaaagcctgaatcgcgtacttcttcatgacctgcaggttgaccttctgcatgtcgaccttttggttgaactccggagggaacttggtagctcgcaagagcttcgcatcgaccgttgtcgccatgctcgcagcgtggtttgccgaagccagagggactgaaatgcagtgtggtgatcgtgtgtcacgtttgggggagtaagtatgcttgacggtgcataattgaag

SEQ ID NO: 9002 - DNA, 570 bp, Muscodor strobelii
  misc_feature: SGI cDNA ID NO. 562797
  misc_feature: Encodes the peptide sequence at SEQ ID NO 9003
atggcgaacacagcaatcatcgtgctcgacctccaagtcagcatagtagacatgatcaaagaccagatcaacgaagaattcctcaccaaaaccgcctcaacactagcagcagcccgcaaagccaacgtcccaataatccaaatcacgacgagcttccggccaggtttcgaagacgccatgcctcattacaagaacaacacgcagctcaaagagtccaaacaattcacggacggcagtcccacggtacagcttcaccccatcatcggggcagatgcggcgaacgacatccacgtcaagaagacaagagtctcggcactgtttggtacgcccgtggacagtattttgagaaacaacggaatcacgaatattgccctcgcgggcattgcgacgagtggtgctgtgctgtcgacgacgagggcggcttcggatatggattataaaattaccgtgctgagtgatctgtgtgcggatcgggatcaagatgttcatgatattttgattgggaaagtacttccgaagcaggcggaggttatgaaggcagaggagtggttggcaaagattcaacagtag

SEQ ID NO: 9003 - protein, 189 aa, Muscodor strobelii
  misc_feature: SGI Peptide ID NO. 562797
  misc_feature (1)..(185): Pfam Id: PF00857 Pfam Desc: Isochorismatase family
  misc_feature (1)..(157): Pfam Id: PF00857 Pfam Desc: Isochorismatase family
  misc_feature (2)..(187): NCBI GI: 238493585 Blast Desc: isochorismatase family protein [Aspergillus flavus NRRL3357] gi|220696523|gb|EED52865.1| isochorismatase family protein [Aspergillus flavus NRRL3357]
  misc_feature (1)..(187): NCBI GI: 71001178 Blast Desc: isochorismatase family protein [Aspergillus fumigatus Af293] gi|66852908|gb|EAL93232.1| isochorismatase family protein [Aspergillus fumigatus Af293] gi|159129352|gb|EDP54466.1| family
  misc_feature (1)..(187): NCBI GI: 256723666 Blast Desc: NECHADRAFT_102890 [Nectria haematococca mpVI 77-13-4]
  misc_feature (4)..(187): NCBI GI: 255941308 Blast Desc: Pc16g11180 [Penicillium chrysogenum Wisconsin 54-1255] gi|211586046|emb|CAP93788.1| Pc16g11180 [Penicillium chrysogenum Wisconsin 54-1255]
  misc_feature (1)..(188): NCBI GI: 121698944 Blast Desc: isochorismatase family protein [Aspergillus clavatus NRRL 1] gi|119395997|gb|EAW06429.1| isochorismatase family protein [Aspergillus clavatus NRRL 1]
  misc_feature (1)..(176): NCBI GI: 119480805 Blast Desc: isochorismatase family protein [Neosartorya fischeri NRRL 181] gi|119408585|gb|EAW18534.1| isochorismatase family protein [Neosartorya fischeri NRRL 181]
  misc_feature (1)..(183): NCBI GI: 256780306 Blast Desc: isochorismatase hydrolase [Streptomyces hygroscopicus ATCC 53653]
  misc_feature (5)..(187): NCBI GI: 145256382 Blast Desc: An19g00410 [Aspergillus niger CBS 513.88] gi|134084776|emb|CAK47364.1| protein product [Aspergillus niger]
  misc_feature (5)..(187): NCBI GI: 91780326 Blast Desc: isochorismatase hydrolase family protein [Burkholderia xenovorans LB400] gi|91692986|gb|ABE36183.1| isochorismatase hydrolase family protein [Burkholderia xenovorans LB400]
  misc_feature (3)..(184): NCBI GI: 227365678 Blast Desc: isochorismatase hydrolase [Chryseobacterium gleum ATCC 35910] gi|227110779|gb|EEI45735.1| isochorismatase hydrolase [Chryseobacterium gleum ATCC 35910]
MANTAIIVLDLQVSIVDMIKDQINEEFLTKTASTLAAARKANVPIIQITTSFRPGFEDAMPHYKNNTQLKESKQFTDGSPTVQLHPIIGADAANDIHVKKTRVSALFGTPVDSILRNNGITNIALAGIATSGAVLSTTRAASDMDYKITVLSDLCADRDQDVHDILIGKVLPKQAEVMKAEEWLAKIQQ

SEQ ID NO: 9004 - DNA, 819 bp, Muscodor strobelii
  misc_feature: SGI EST ID NO. CUFF.21485.0
  misc_feature: Variant of the nucleotide sequence at SEQ ID NO 9002
agaaggtatacctagttacataaataaccaatctttccctctgttttattcacttcagcgtttctacactcgaactttgtcgcagctaacaagcactacctacgaaacaacaacatctcatcaccacgacactcaaaatggcgaacacagcaatcatcgtgctcgacctccaagtcagcatagtagacatgatcaaagaccagatcaacgaagaattcctcaccaaaaccgcctcaacactagcagcagcccgcaaagccaacgtcccaataatccaaatcacgacgagcttccggccaggtttcgaagacgccatgcctcattacaagaacaacacgcagctcaaagagtccaaacaattcacggacggcagtcccacggtacagcttcaccccatcatcggggcagatgcggcgaacgacatccacgtcaagaagacaagagtctcggcactgtttggtacgcccgtggacagtattttgagaaacaacggaatcacgaatattgccctcgcgggcattgcgacgagtggtgctgtgctgtcgacgacgagggcggcttcggatatggattataaaattaccgtgctgagtgatctgtgtgcggatcgggatcaagatgttcatgatattttgattgggaaagtacttccgaagcaggcggaggttatgaaggcagaggagtggttggcaaagattcaacagtagtcaatggcattgtggtcgatggattgatagttatggttgtgagtagggtctactgatgcgtaatggcacgagagctctacctatcgagacgaatacaagattttaagccggt

SEQ ID NO: 9005 - DNA, 591 bp, Muscodor strobelii
  misc_feature: SGI cDNA ID NO. 562798
  misc_feature: Reduced expression when VOC is produced
  misc_feature: Encodes the peptide sequence at SEQ ID NO 9006
atggaggctcttcagctagcccagatgttagctgatctcaacgatctccaggccgcacaagatcaaaaatctgccaaagctctcgtctcggccaacaagaccctcgatgtcaaggacccgtcgcaggctctgcctcaggcgcatcatcagagaagtgccacagaaggccgcatcacctcatccgccggccctaccagtcgcttgacagacaagtttggccgtcgcatcttctcgcctccgctgtcgagaaccaactctaccaccccggcatccataccgggcaccccgcgtggcgagaatgtagtgatattccgccaaatcccgcgcttgtacacacctactgacctatcgcaacagggcccagagggcgacgttgagaaggcatcaacgctactttctctctacgagattcgcgccaagctaaaggagcaagacagcagcagcttgatgaaggcgcgagagaagatcaatgctcttgccgcgaagcagcagcagcaacagaaggcagccgctgagcagcagaagtcagcttcaggccatccgcgagagcagagcgagccgcctaggataaattaccccggcaggaactag

SEQ ID NO: 9006 - protein, 196 aa, Muscodor strobelii
  misc_feature: SGI Peptide ID NO. 562798
  misc_feature (1)..(188): NCBI GI: 85112006 Blast Desc: NCU03284 [Neurospora crassa OR74A] gi|28925982|gb|EAA34974.1| conserved [Neurospora crassa OR74A]
  misc_feature (1)..(156): NCBI GI: 39945060 Blast Desc: MGG_04512 [Magnaporthe grisea 70-15] gi|145021515|gb|EDK05644.1| MGG_04512 [Magnaporthe grisea 70-15]
  misc_feature (1)..(182): NCBI GI: 116182422 Blast Desc: CHGG_01839 [Chaetomium globosum CBS 148.51] gi|88186136|gb|EAQ93604.1| CHGG_01839 [Chaetomium globosum CBS 148.51]
  misc_feature (1)..(193): NCBI GI: 171695406 Blast Desc: protein product [Podospora anserina] gi|170947945|emb|CAP60109.1| protein product [Podospora anserina]
  misc_feature (1)..(193): NCBI GI: 261356024 Blast Desc: conserved [Verticillium albo-atrum VaMs.102]
  misc_feature (1)..(182): NCBI GI: 256732611 Blast Desc: NECHADRAFT_100036 [Nectria haematococca mpVI 77-13-4]
  misc_feature (1)..(182): NCBI GI: 46125391 Blast Desc: FG07073.1 [Gibberella zeae PH-1]
  misc_feature: Useful for introducing or modulating the production of volatile compounds
MEALQLAQMLADLNDLQAAQDQKSAKALVSANKTLDVKDPSQALPQAHHQRSATEGRITSSAGPTSRLTDKFGRRIFSPPLSRTNSTTPASIPGTPRGENVVIFRQIPRLYTPTDLSQQGPEGDVEKASTLLSLYEIRAKLKEQDSSSLMKAREKINALAAKQQQQQKAAAEQQKSASGHPREQSEPPRINYPGRN

SEQ ID NO: 9007 - DNA, 1651 bp, Muscodor strobelii
  misc_feature: SGI EST ID NO. CUFF.21535.0
  misc_feature: Variant of the nucleotide sequence at SEQ ID NO 9005
taagtacctaatgaatgttagagagtaggcatattcgctgtcaactggcacaccctcaaacacacgcgaccttagtccccttccccacgaaaaagtctcaaaaaggtttggtcctaaggcaaagagaaatggtaggtggatacaagcggaatcggctgggcgggttggaatcagatttggaaagtgtggtgggctaggggcggccgtgggagaaatctggaattcatccatctccccagacgtgcaaacattgaaacccccacttccactgcatcaccacacctgtcacactacctcctaccctgcagcacctcattactatcaaccttcaaggccaggcggcgtccttcaatcattactccttgccgtcctcaggtgcaatctctcgtcacacttatgaaccctatccattacaacacgacctaggcctcgttccaggtctcaccttctgcctcgctgtcttcaaacccgtgtacttggcacattcctctgcatggtctgccgacatggaggctcttcagctagcccagatgttagctgatctcaacgatctccaggccgcacaagatcaaaaatctgccaaagctctcgtctcggccaacaagaccctcgatgtcaaggacccgtcgcaggctctgcctcaggcgcatcatcagagaagtgccacagaaggccgcatcacctcatccgccggccctaccagtcgcttgacagacaagtttggccgtcgcatcttctcgcctccgctgtcgagaaccaactctaccaccccggcatccataccgggcaccccgcgtggcgagaatgtagtgatattccgccaaatcccgcgcttgtacacacctactgacctatcgcaacagggcccagagggcgacgttgagaaggcatcaacgctactttctctctacgagattcgcgccaagctaaaggagcaagacagcagcagcttgatgaaggcgcgagagaagatcaatgctcttgccgcgaagcagcagcagcaacagaaggcagccgctgagcagcagaagtcagcttcaggccatccgcgagagcagagcgagccgcctaggataaattaccccggcaggaactagaacggactgaggggttacttttgacgaatggcgtagtctgcacggcgttacagagaattgttgtctttcgacatgaaaaatggattgggttatgagggatcatgatagcgccttgtgactttggcaatcggaaaatggttatgcgaagggacaagcccaaagtccctacgatacctatggttactactttgcgatggcgtccgggacatttgcgttgtcttcgcccttagaggcactaaggtaatgatggctaatactaaaacgggaaccaatatatgatactacagaccattggtttggtttcctccatgcacgtttcgacgagcagtagatgagcatcttcaagaatgggtcttgagctccggaccggtagataatgtgaccggactgagatgctatcccaagtgtaggaatgccccgtttcgcagtgctttctcaccattatcaatatgatgggtatcgcatttcaatcctcgagatctagctctacctttactaggagatcctggcccttctccattgcaatgctctcgctactatttctaggaaacaag

SEQ ID NO: 9008 - DNA, 534 bp, Muscodor strobelii
  misc_feature: SGI cDNA ID NO. 562799
  misc_feature: Reduced expression when VOC is produced
  misc_feature: Encodes the peptide sequence at SEQ ID NO 9009
atggaggctcttcagctagcccagatgttagctgatctcaacgatctccaggccgcacaagatcaaaaatctgccaaagctctcgtctcggccaacaagaccctcgatgtcaaggacccgtcgcaggctctgcctcaggcgcatcatcagagaagtgccacagaaggccgcatcacctcatccgccggccctaccagtcgcttgacagacaagtttggccgtcgcatcttctcgcctccgctgtcgagaaccaactctaccaccccggcatccataccgggcaccccgcgtggcgagaatggcccagagggcgacgttgagaaggcatcaacgctactttctctctacgagattcgcgccaagctaaaggagcaagacagcagcagcttgatgaaggcgcgagagaagatcaatgctcttgccgcgaagcagcagcagcaacagaaggcagccgctgagcagcagaagtcagcttcaggccatccgcgagagcagagcgagccgcctaggataaattaccccggcaggaactag

SEQ ID NO: 9009 - protein, 177 aa, Muscodor strobelii
  misc_feature: SGI Peptide ID NO. 562799
  misc_feature (1)..(169): NCBI GI: 85112006 Blast Desc: NCU03284 [Neurospora crassa OR74A] gi|28925982|gb|EAA34974.1| conserved [Neurospora crassa OR74A]
  misc_feature (1)..(137): NCBI GI: 39945060 Blast Desc: MGG_04512 [Magnaporthe grisea 70-15] gi|145021515|gb|EDK05644.1| MGG_04512 [Magnaporthe grisea 70-15]
  misc_feature (1)..(163): NCBI GI: 116182422 Blast Desc: CHGG_01839 [Chaetomium globosum CBS 148.51] gi|88186136|gb|EAQ93604.1| CHGG_01839 [Chaetomium globosum CBS 148.51]
  misc_feature (1)..(174): NCBI GI: 261356024 Blast Desc: conserved [Verticillium albo-atrum VaMs.102]
  misc_feature (1)..(174): NCBI GI: 171695406 Blast Desc: protein product [Podospora anserina] gi|170947945|emb|CAP60109.1| protein product [Podospora anserina]
  misc_feature (1)..(163): NCBI GI: 256732611 Blast Desc: NECHADRAFT_100036 [Nectria haematococca mpVI 77-13-4]
  misc_feature (1)..(163): NCBI GI: 46125391 Blast Desc: FG07073.1 [Gibberella zeae PH-1]
  misc_feature: Useful for introducing or modulating the production of volatile compounds
MEALQLAQMLADLNDLQAAQDQKSAKALVSANKTLDVKDPSQALPQAHHQRSATEGRITSSAGPTSRLTDKFGRRIFSPPLSRTNSTTPASIPGTPRGENGPEGDVEKASTLLSLYEIRAKLKEQDSSSLMKAREKINALAAKQQQQQKAAAEQQKSASGHPREQSEPPRINYPGRN

SEQ ID NO: 9010 - DNA, 1651 bp, Muscodor strobelii; identical to SEQ ID NO: 9007
  misc_feature: SGI EST ID NO. CUFF.21535.0
  misc_feature: Variant of the nucleotide sequence at SEQ ID NO 9008

SEQ ID NO: 9011 - DNA, 735 bp, Muscodor strobelii
  misc_feature: SGI cDNA ID NO. 562800
  misc_feature: Reduced expression when VOC is produced
  misc_feature: Encodes the peptide sequence at SEQ ID NO 9012
atgaacgtcttccgtcgcagcatatcgatggcttcggcaactaccaaaagcctcacgcaggcccgtaaggtcgtgtgtattggccgcaactatgcggaccatatcaccgagcttaacagtgccaggcctaagcagcctttctatttcttgaagcctcctggatctatgctcttaccaggagcaggccccgttatacggcccaagggtgttgacctccactatgaggtcgaacttgccctgatcatgggaaagccattaaaggatcttaacgctgaagatgagaaggctgcatttgatgctattgacagttatgctcttagcatcgacatgacggctaggaatgttcaaaatgaggctaaaaagaagggcttgccgtggtctatcgcaaagggtttcgatactttcttgccaatcagcaacgtcattccgaaatcagccatccccaacccacacgccattgagctgtatctgagtgtgaacaatgagatgaggcaaaacgactcgacggagctcatgcttttccagatccccaggatgttaagcgacatctccaaggtgatggcgcttgagaaaggtgacatcgtcttgaccggaaccccgaagggtgttggacctgtcgtacctggagatgtcatgcgtgccggtatcaaagttgatggcaaggaaatcgaggaggccaagatggaagttgatgttgctgaatcaacgggtgcatacgaattcgctgagacgtaa

SEQ ID NO: 9012 - protein, 244 aa, Muscodor strobelii
  misc_feature: SGI Peptide ID NO. 562800
  misc_feature (38)..(208): Pfam Id: PF01557 Pfam Desc: Fumarylacetoacetate (FAA) hydrolase family
  misc_feature (17)..(244): NCBI GI: 85112004 Blast Desc: NCU03283 [Neurospora crassa OR74A] gi|28925981|gb|EAA34973.1| NCU03283 [Neurospora crassa OR74A]
  misc_feature (17)..(244): NCBI GI: 116182424 Blast Desc: CHGG_01840 [Chaetomium globosum CBS 148.51] gi|88186137|gb|EAQ93605.1| CHGG_01840 [Chaetomium globosum CBS 148.51]
  misc_feature (17)..(244): NCBI GI: 39974607 Blast Desc: MGG_00550 [Magnaporthe grisea 70-15] gi|145018549|gb|EDK02828.1| MGG_00550 [Magnaporthe grisea 70-15]
  misc_feature (1)..(244): NCBI GI: 171695404 Blast Desc: protein product [Podospora anserina] gi|170947944|emb|CAP60108.1| protein product [Podospora anserina]
  misc_feature (3)..(244): NCBI GI: 154324150 Blast Desc: BC1G_00474 [Botryotinia fuckeliana B05.10] gi|150842703|gb|EDN17896.1| BC1G_00474 [Botryotinia fuckeliana B05.10]
  misc_feature (3)..(244): NCBI GI: 156057441 Blast Desc: 2-keto-4-pentenoate hydratase [Sclerotinia sclerotiorum 1980] gi|154702237|gb|EDO01976.1| 2-keto-4-pentenoate hydratase [Sclerotinia sclerotiorum 1980]
  misc_feature (20)..(244): NCBI GI: 189203097 Blast Desc: fumarylacetoacetate hydrolase domain-containing protein 1 [Pyrenophora tritici-repentis Pt-1C-BFP] gi|187984983|gb|EDU50471.1| fumarylacetoacetate hydrolase protein
  misc_feature (20)..(244): NCBI GI: 169602431 Blast Desc: SNOG_04217 [Phaeosphaeria nodorum SN15] gi|111066857|gb|EAT87977.1| SNOG_04217 [Phaeosphaeria nodorum SN15]
  misc_feature (3)..(244): NCBI GI: 261356023 Blast Desc: fumarylacetoacetate hydrolase domain-containing protein [Verticillium albo-atrum VaMs.102]
  misc_feature (9)..(244): NCBI GI: 256732606 Blast Desc: [Nectria haematococca mpVI 77-13-4]
  misc_feature (23)..(199): SWISSPROT Homolog: EC 4.3.2.3 Ureidoglycolate lyase
  misc_feature: Useful for introducing or modulating the production of volatile compounds
MNVFRRSISMASATTKSLTQARKVVCIGRNYADHITELNSARPKQPFYFLKPPGSMLLPGAGPVIRPKGVDLHYEVELALIMGKPLKDLNAEDEKAAFDAIDSYALSIDMTARNVQNEAKKKGLPWSIAKGFDTFLPISNVIPKSAIPNPHAIELYLSVNNEMRQNDSTELMLFQIPRMLSDISKVMALEKGDIVLTGTPKGVGPVVPGDVMRAGIKVDGKEIEEAKMEVDVAESTGAYEFAET

SEQ ID NO: 9013 - DNA, 1120 bp, Muscodor strobelii
  misc_feature: SGI EST ID NO. CUFF.21549.1
  misc_feature: Variant of the nucleotide sequence at SEQ ID NO 9011
cgccgatccgaagcagaaaataaagccgcatggtccattacccccaattcggtcatctgcgccttggtagtacgctgcatgaactacgcaatcgtatcaaagtactgccgcaggataactatacccaactattgcagtgtttatattagttgaatccttcgctattgtcccatctcgctctcgtcatcatgaacgtcttccgtcgcagcatatcgatggcttcggcaactaccaaaagcctcacgcaggcccgtaaggtcgtgtgtattggccgcaactatgcggaccatatcaccgagcttaacagtgccaggcctaagcagcctttctatttcttgaagcctcctggatctatgctcttaccaggagcaggccccgttatacggcccaagggtgttgacctccactatgaggtcgaacttgccctgatcatgggaaagccattaaaggatcttaacgctgaagatgagaaggctgcatttgatgctattgacagtgagcgaattccgtctttggtattttgttgtgaagcctaatgtagggaactaggttatgctcttagcatcgacatgacggctaggaatgttcaaaatgaggctaaaaagaagggcttgccgtggtctatcgcaaagggtttcgatactttcttgccaatcagcaacgtcattccgaaatcagccatccccaacccacacgccattgagctgtatctgagtgtgaacaatgagatgaggcaaaacgactcgacggagctcatgcttttccagatccccaggatgttaagcgacatctccaaggtgatggcgcttgagaaaggtgacatcgtcttgaccggaaccccgaagggtgttggacctgtcgtacctggagatgtcatgcgtgccggtatcaaagttgatggcaaggaaatcgaggaggccaagatggaagttgatgttgctgaatcaacgggtgcatacgaattcgctgagacgtaagatcaggcttttagaaacgacttaactaatgtaatttctagccaacatagaatgtactctgttttacaaacaatgcatgcatttcgtaaatggattatatagtttaggctgtgataaaaccatatgtgcattcaagatcaaat

SEQ ID NO: 9014 - DNA, 1464 bp, Muscodor strobelii
  misc_feature: SGI cDNA ID NO. 562801
  misc_feature: Encodes the peptide sequence at SEQ ID NO 9015
atgactgcacatctccatcatcctcgattgccattacaccctccacgactttcaaaactcgagttcaacaacatcgagaagtattacgagacctacaaattcgacaatagcgcttccgacaagcactatcagcttctcaagctcaagtgcaatatcatcatcatcaatcattaccgatcctatcagcacgagtacactatcaactcccataaccatacctctcaatccagcagcaccctcctacccacgtctacatcagtacctccaccgtcgccgccaccagggccgtttagaggatataaaaactcagcctatttcacaaattggggcatttccacggaaggctacacaccgcaaaaactagcaacaagagacctgacacatatcctatacgctttcgcagatatttctgcagatggtacggtttcgtcatcagacccgaaagcagatgtacaaaaacaatatccgcatgatagcccatgggagttcgggacgaatgcatatggtgcggtgaagcaactcttcatccacaagaaaaagaaacgaaatctgaagctattgctatcaatcggaggatggaattactcgccaaaatttgcagcggcgacgtcaaccgatgccacacgtcagacttttgcgaaatctgccgtcaaactcgttacggattggggctttgatgggattgacatcgattgggagtatccgagtaatgacagcgagaaagataactttgtgaagctggtcgcggcatgtcgagcagagtttgatcggtactcgctgcaaaatcgactactctaccgattcctcattaccgttgccagctctgcgagtccgggtaatcaccaatacataaatttcgcggagatgaaccgctacgtcgatatttggcacttgatggcatacgactactccggaagctgggacgtgacgagcggacaccaagctaatgtctttgccgacaagaagaacacagccgctacaaagattagtacagacgacgcagtgcaatactacaagtcgcaaggaataagctcgcagaaaatcgtcatgggcctacctctatacggtcgatcgttcgaaggcacatcaggactaggacaaaactacacgaacgtcggcagtggaggcccgcaacctggtgtttggtattacaagcagcttccgaagcacggtgcaaaagagcaatacgacgacgtcgcgaaagcaacatatagttacgatccaaagctccacgaacttatctcctacgataacgtgcgcagcacgactttcaaagcccactatatctctgaccggcggcttggcggcgcattcttctgggaggccagtggcgatcgctcggatagcaagagtctgattcatactatgtcgcatactcttggttggctcgattctacgccgaataatcttcggtatcctacgagtcagtataaaaatattcgggccggcatgccaggttcttga

SEQ ID NO: 9015 - protein, 487 aa, Muscodor strobelii
  misc_feature: SGI Peptide ID NO. 562801
  misc_feature (100)..(445): Pfam Id: PF00704 Pfam Desc: Glycosyl hydrolases family 18
  misc_feature (74)..(486): NCBI GI: 145613938 Blast Desc: MGG_01247 [Magnaporthe grisea 70-15] gi|145020945|gb|EDK05074.1| MGG_01247 [Magnaporthe grisea 70-15]
  misc_feature (100)..(487): NCBI GI: 164427228 Blast Desc: chitinase 1 precursor [Neurospora crassa OR74A] gi|157071660|gb|EAA36073.2| chitinase 1 precursor [Neurospora crassa OR74A]
  misc_feature (99)..(486): NCBI GI: 154298445 Blast Desc: BC1G_11407 [Botryotinia fuckeliana B05.10] gi|150858003|gb|EDN33195.1| BC1G_11407 [Botryotinia fuckeliana B05.10]
  misc_feature (99)..(486): NCBI GI: 22255889 Blast Desc: chitinase A [Botryotinia fuckeliana]
  misc_feature (101)..(485): NCBI GI: 256734414 Blast Desc: NECHADRAFT_31166 [Nectria haematococca mpVI 77-13-4]
  misc_feature (99)..(484): NCBI GI: 13516885 Blast Desc: endochitinase-P [Hypocrea pseudokoningii]
  misc_feature (76)..(484): NCBI GI: 171688044 Blast Desc: protein product [Podospora anserina] gi|170943984|emb|CAP70094.1| protein product [Podospora anserina]
  misc_feature (99)..(484): NCBI GI: 270160616 Blast Desc: chitinase [Trichoderma longibrachiatum]
  misc_feature (99)..(483): NCBI GI: 13516873 Blast Desc: endochitinase-G2 [Hypocrea virens]
  misc_feature (99)..(484): NCBI GI: 2738109 Blast Desc: endochitinase [Trichoderma hamatum]
  misc_feature (99)..(484): SWISSPROT Homolog: EC 3.2.1.14 Chitinase
MTAHLHHPRLPLHPPRLSKLEFNNIEKYYETYKFDNSASDKHYQLLKLKCNIIIINHYRSYQHEYTINSHNHTSQSSSTLLPTSTSVPPPSPPPGPFRGYKNSAYFTNWGISTEGYTPQKLATRDLTHILYAFADISADGTVSSSDPKADVQKQYPHDSPWEFGTNAYGAVKQLFIHKKKKRNLKLLLSIGGWNYSPKFAAATSTDATRQTFAKSAVKLVTDWGFDGIDIDWEYPSNDSEKDNFVKLVAACRAEFDRYSLQNRLLYRFLITVASSASPGNHQYINFAEMNRYVDIWHLMAYDYSGSWDVTSGHQANVFADKKNTAATKISTDDAVQYYKSQGISSQKIVMGLPLYGRSFEGTSGLGQNYTNVGSGGPQPGVWYYKQLPKHGAKEQYDDVAKATYSYDPKLHELISYDNVRSTTFKAHYISDRRLGGAFFWEASGDRSDSKSLIHTMSHTLGWLDSTPNNLRYPTSQYKNIRAGMPGS

SEQ ID NO: 9016 - DNA, 416 bp, Muscodor strobelii
  misc_feature: SGI EST ID NO. CUFF.21502.0
  misc_feature: Variant of the nucleotide sequence at SEQ ID NO 9014
ctcagcctatttcacaaattggggcatttccacggaaggctacacaccgcaaaaactagcaacaagagacctgacacatatcctatacgctttcgcagatatttctgcagatggtacggtttcgtcatcagacccgaaagcagatgtacaaaaacaatatccgcatgatagcccatgggagttcgggacgaatgcatatggtgcggtgaagcaactcttcatccacaagaaaaagaaacgaaatctgaagctattgctatcaatcggaggatggaattactcgccaaaatttgcagcggcgacgtcaaccgatgccacacgtcagacttttgcgaaatctgccgtcaaactcgttacggattggggctttgatgggattgacatcgattgggagtatccgagtaatgacagcgaga

SEQ ID NO: 9017 - DNA, 2319 bp, Muscodor strobelii
  misc_feature: SGI cDNA ID NO. 562802
  misc_feature: Reduced expression when VOC is produced
  misc_feature: Encodes the peptide sequence at SEQ ID NO 9018
atgtcgactccgcagggcagtttgcgtcaacgcaataatgtcccgggctcttctaagaagaaggcacgctctgccagcccagagacggaaatcgacaagatcctcaagccgattgtttccaagtcttcttccaacacggaaacaaactaccgcatagcatttgccattatcacggctctcgcctttgtgtcccgcttctggggcattagccatcccaacgaagtcgtcttcgacgaagtgcactttggcaagtttgcatcctactacctcgaaaagacgtatttcttcgacgtccaccccccgttcggaaagctcctcttcgccttcatgggatggcttgtcgggtacgatggtcacttccacttcgagaacattggcgactcctacattgccaacaaggttccatatgttgccttccgagcaatgccagctatcctcggctctctgaccgtctcagtaacctatctcatcatgtgggagtcgggatatagtctgccggcctgcgttgttgccgcggctctggtcctgctcgacaacgcgcatattggtcagacccgactgattctgctcgacgcgactttggtcttcaccatggcttgcagtctcctctgctacatcaagttctacaaactgagacacgatcctttcagccgcaaatggtggaagtggctgatcctgacgggtttcgccttgtcttgtgatatttccacgaaatacgtcggtctcttcgccttcgtcacgattggatcggcagtcgtcattgacctgtgggacctgttggacgtcaagcgccctggaggtgccctcaatctccaacaatttgcccaccactttattgctcgcgcgattggcttgattgttctgcccttcctgttctacctcttctggttccaggtccactttgcgatcttgactcgttccggacccggtgatgatttcatgacgcctgagttccaagaaaccctctcagacaatgtgatgaccgctaacgctatgaccatcgactactacgacaccataactgttcgtcacaaggaaaccaaggcttatcttcacagccacgaaggcaaatatcctcttcgctacgatgacggccgtgtttcgagtcaaggtcaacaagtcacggggtatccctacaatgacaccaacaactactggcaaatcctacccgttgaggatgatcatgtcatgggacatcacgtcaagaaccatgacctcgtcaggcttcgtcacatcgttacggacacgattctgctatcgcatgacgtggcttccccatactttccaacaaatcaagaattcaccactgtttctctggctgatgcttacggaggtcgagcggctgacaccttgttcgaggttcgaatcgagcagggcaaacaaaaccaggaattcaagagcgtgtcgagtcatttcaagttcatacacaatcccagcaaagtagctatgtggactcacaccaagccactgcccgaatggggccacaagcagcaggaaatcaatggtaataagcagatcactcccagctctaacgtctggattgtcgacgaagttccttcggtgcttgcggactcaccacgtcgcgtcaaggatgagcgcaaagtcaagagtttgcctttcttaagaaagtggttcgagctgcagcgctccatgttttggcataacaaccagttgaccagcagccacccatacgccagtcaaccattccagtggccattccttctccgaggtgtcagtttctggacacaaaatgatacacgccaacaaatttacttccttggaaacccgattggctggtggcttgcgagcagtctcattgccgtgtatgccggcattatcggcgctgaccaagtttcattacgccgtggtattgatgccttagaccaccgtacccgttcgcgactttacaactcaaccgggttctttttcctcgcctgggccacacactatttccctttctatgttatgggtcgtcaactcttcttgcaccattatctccctgcgcatctagcatcttgcttaatcgtgggtgctctacttgagtttgttttcaatgcggagccttcggccgaagaaggcaatagtctcgatgtgcgaagtggcaagcagcgcattggacctcagcggcatatcactgcacgcgagcgattcgccggtcagagtatgataccggcttggatcgcttgccttgtgatcatcgcattggttttcgctggatggtatttcttcttgcctctcacctatgggtaccctggcttgaccgttgagcaagtggtccgacgaaagtggcttggctatgatctccacttcgctaaataa

SEQ ID NO: 9018 - protein, 772 aa, Muscodor strobelii
  misc_feature: SGI Peptide ID NO. 562802
  misc_feature (349)..(522): Pfam Id: PF02815 Pfam Desc: MIR domain
  misc_feature (55)..(305): Pfam Id: PF02366 Pfam Desc: Dolichyl-phosphate-mannose-protein mannosyltransferase
  misc_feature (2)..(772): NCBI GI: 171687953 Blast Desc: protein product [Podospora anserina] gi|170943938|emb|CAP69590.1| protein product [Podospora anserina]
  misc_feature (2)..(772): NCBI GI: 256734482 Blast Desc: glycosyltransferase family 39 [Nectria haematococca mpVI 77-13-4]
  misc_feature (2)..(772): NCBI GI: 164423013 Blast Desc: NCU09332 [Neurospora crassa OR74A] gi|157069911|gb|EAA34690.2| NCU09332 [Neurospora crassa OR74A]
  misc_feature (3)..(772): NCBI GI: 116180294 Blast Desc: conserved [Chaetomium globosum CBS 148.51] gi|88185072|gb|EAQ92540.1| conserved [Chaetomium globosum CBS 148.51]
  misc_feature (3)..(772): NCBI GI: 29837409 Blast Desc: mannosyltransferase PMTI [Hypocrea jecorina]
  misc_feature (3)..(772): NCBI GI: 41079313 Blast Desc: protein O-D-mannosyltransferase [Hypocrea jecorina]
  misc_feature (2)..(772): NCBI GI: 145614638 Blast Desc: MGG_04427 [Magnaporthe grisea 70-15] gi|145021553|gb|EDK05682.1| MGG_04427 [Magnaporthe grisea 70-15]
  misc_feature (2)..(772): NCBI GI: 46107450 Blast Desc: FG00608.1 [Gibberella zeae PH-1]
  misc_feature (3)..(772): NCBI GI: 154319193 Blast Desc: BC1G_02548 [Botryotinia fuckeliana B05.10] gi|150856979|gb|EDN32171.1| BC1G_02548 [Botryotinia fuckeliana B05.10]
  misc_feature (3)..(772): NCBI GI: 156063426 Blast Desc: SS1G_01831 [Sclerotinia sclerotiorum 1980] gi|154697165|gb|EDN96903.1| SS1G_01831 [Sclerotinia sclerotiorum 1980]
  misc_feature (1)..(772): SWISSPROT Homolog: EC 2.4.1.109 Dolichyl-phosphate-mannose-protein mannosyltransferase
  misc_feature: Useful for introducing or modulating the production of volatile compounds
MSTPQGSLRQRNNVPGSSKKKARSASPETEIDKILKPIVSKSSSNTETNYRIAFAIITALAFVSRFWGISHPNEVVFDEVHFGKFASYYLEKTYFFDVHPPFGKLLFAFMGWLVGYDGHFHFENIGDSYIANKVPYVAFRAMPAILGSLTVSVTYLIMWESGYSLPACVVAAALVLLDNAHIGQTRLILLDATLVFTMACSLLCYIKFYKLRHDPFSRKWWKWLILTGFALSCDISTKYVGLFAFVTIGSAVVIDLWDLLDVKRPGGALNLQQFAHHFIARAIGLIVLPFLFYLFWFQVHFAILTRSGPGDDFMTPEFQETLSDNVMTANAMTIDYYDTITVRHKETKAYLHSHEGKYPLRYDDGRVSSQGQQVTGYPYNDTNNYWQILPVEDDHVMGHHVKNHDLVRLRHIVTDTILLSHDVASPYFPTNQEFTTVSLADAYGGRAADTLFEVRIEQGKQNQEFKSVSSHFKFIHNPSKVAMWTHTKPLPEWGHKQQEINGNKQITPSSNVWIVDEVPSVLADSPRRVKDERKVKSLPFLRKWFELQRSMFWHNNQLTSSHPYASQPFQWPFLLRGVSFWTQNDTRQQIYFLGNPIGWWLASSLIAVYAGIIGADQVSLRRGIDALDHRTRSRLYNSTGFFFLAWATHYFPFYVMGRQLFLHHYLPAHLASCLIVGALLEFVFNAEPSAEEGNSLDVRSGKQRIGPQRHITARERFAGQSMIPAWIACLVIIALVFAGWYFFLPLTYGYPGLTVEQVVRRKWLGYDLHFAK

SEQ ID NO: 9019 - DNA, 4065 bp, Muscodor strobelii
  misc_feature: SGI EST ID NO. CUFF.21517.0
  misc_feature: Variant of the nucleotide sequence at SEQ ID NO 9017
gaaagatctagctcgtgactcgagaaaaatgcgttgaacggagtgcatcgagaaagacgtgcgtaataagatcggacggtaatcacccatgtgttaaatgcgaccccttccatctggctgaaccgttgtgccgagtgagagccagtggcgtaaatcgggtctagcctttctcattacgatttttgtgtaaacaccttaccttataacaatgttcaatattcctattacaaaatgattctttatatatttattgctaatgctagctatgccgttgaaaaggggaggtggactctaattatgcgtctaagaaaccagtgaaactagtgaatgaagatgggttaagagtggagtggaacgccattgaggatcaaacggacagatagacaagttcgaagatgtttcagcaccaaggcgatgtttctgagcccgtgcgcacattgccctaggggtcgtagtacggaacgcgccgcgcaactggtactcgagagccaaggccagtacaggggattcagctcaacgcgggcggtaaatagcttggagattatattggacgaaaaaccgtagtggcatactccgtgaacacgagcttcctcacttcatcatcctcattcactcgcctcccccttttcccatctgtaaattcactgcattgagtgcactgaacatccactctcttttgccaattttctctattcgtcatcaccattttccgtcacttgagccattcaacttcgagttagcaagggcatagcggtgtcagacatcgatctgtccacttcagccctgccctaactgctgctcctttttcctccggacgcagcctgcttcctcgatgccttattagctcgtaggctgtttcttgctaatacacctctcctgatcgaaccatatttctaccgcttctctctcccgaccgagggcccctcaaccaccatgtcgactccgcagggcagtttgcgtcaacgcaataatgtcccgggctcttctaagaagaaggcacgctctgccagcccagagacggaaatcgacaagatcctcaagccgattgtttccaagtcttcttccaacacggaaacaaactaccgcatagcatttgccattatcacggctctcgcctttgtgtcccgcttctggggcattagccatcccaacgaagtcgtcttcgacgaagtgcactttggcaagtttgcatcctactacctcgaaaagacgtatttcttcgacgtccaccccccgttcggaaagctcctcttcgccttcatgggatggcttgtcgggtacgatggtcacttccacttcgagaacattggcgactcctacattgccaacaaggttccatatgttgccttccgagcaatgccagctatcctcggctctctgaccgtctcagtaacctatctcatcatgtgggagtcgggatatagtctgccggcctgcgttgttgccgcggctctggtcctgctcgacaacgcgcatattggtcagacccgactgattctgctcgacgcgactttggtcttcaccatggcttgcagtctcctctgctacatcaagttctacaaactgagacacgatcctttcagccgcaaatggtggaagtggctgatcctgacgggtttcgccttgtcttgtgatatttccacgaaatacgtcggtctcttcgccttcgtcacgattggatcggcagtcgtcattgacctgtgggacctgttggacgtcaagcgccctggaggtgccctcaatctccaacaatttgcccaccactttattgctcgcgcgattggcttgattgttctgcccttcctgttctacctcttctggttccaggtccactttgcgatcttgactcgttccggacccggtgatgatttcatgacgcctgagttccaagaaaccctctcagacaatgtgatgaccgctaacgctatgaccatcgactactacgacaccataactgttcgtcacaaggaaaccaaggcttatcttcacagccacgaaggcaaatatcctcttcgctacgatgacggccgtgtttcgagtcaaggtcaacaagtcacggggtatccctacaatgacaccaacaactactggcaaatcctacccgttgaggatgatcatgtcatgggacatcacgtcaagaaccatgacctcgtcaggcttcgtcacatcgttacggacacgattctgctatcgcatgacgtggcttccccatactttccaacaaatcaagaattcaccactgtttctctggctgatgcttacggaggtcgagcggctgacaccttgttcgaggttcgaatcgagcagggcaaacaaaaccaggaattcaagagcgtgtcgagtcatttcaagttcatacacaatcccagcaaagtagctatgtggactcacaccaagccactgcccgaatggggccacaagcagcaggaaatcaatggtaataagcagatcactcccagctctaacgtctggattgtcgacgaagttccttcggtgcttgcggactcaccacgtcgcgtcaaggatgagcgcaaagtcaagagtttgcctttcttaagaaagtggttcgagctgcagcgctccatgttttggcataacaaccagttgaccagcagccacccatacgccagtcaaccattccagtggccattccttctccgaggtgtcagtttctggacacaaaatgatacacgccaacaaatttacttccttggaaacccgattggctggtggcttgcgagcagtctcattgccgtgtatgccggcattatcggcgctgaccaagtttcattacgccgtggtattgatgccttagaccaccgtacccgttcgcgactttacaactcaaccgggttctttttcctcgcctgggccacacactatttccctttctatgttatgggtcgtcaactcttcttgcaccattatctccctgcgcatctagcatcttgcttaatcgtgggtgctctacttgagtttgttttcaatgcggagccttcggccgaagaaggcaatagtctcgatgtgcgaagtggcaagcagcgcattggacctcagcggcatatcactgcacgcgagcgattcgccggtcagagtatgataccggcttggatcgcttgccttgtgatcatcgcattggttttcgctggatggtatttcttcttgcctctcacctatgggtaccctggcttgaccgttgagcaagtggtccgacgaaagtggcttggctatgatctccacttcgctaaataaaatagaggtagtgatgaagtgatgccatttctaaatgatagacgtgaggactgaagctccggcattcacacatagtgtacgatttgaagttaaaaaaagggggcaagtttgttgggctgggcgcttgaggtctaaaagtcattccgctatattctataatctagtcgccatagtaaagctgcgttcctggcttttatgtgtcagtcagtctcccacgttttgcctacaatgccatgggacctgatgtagtcgagttgttccctctaccgggccgactgacgcaccaattgaaacccaaggactcattggccggatgctacattggtttgcctagtaaatctaggccattatgcacctcacgaccagtgtatcggtcagcaaagttttggagactaacctgggtatgaggctttaccgaactgaccgatccgccagatcacccgctcttggcgatttacgtgccgctgcgaagacgcggatacctcgagcaaccaaccagggttgaatgcagatattaaggtcctattttaccgacaacgccatgcgcaatgtttttccgagtagtaccactcttcctttacctttggtctatcctggttgtctccaattctactattatgaactccccctgttgtgttttatgctccttgcaatacaaaggtggcaactattaggcctacgcaatctggccgtcgttacgtactcaactaaatgacaactctctgctcaggctaaagacaaagcgtagcattgcgtactccatccgccatggcagccctgctgaatattctttcctggaaatccagaattaga

SEQ ID NO: 9020 - DNA, 378 bp, Muscodor strobelii
  misc_feature: SGI cDNA ID NO. 562803
  misc_feature: Reduced expression when VOC is produced
  misc_feature: Encodes the peptide sequence at SEQ ID NO 9021
atggctgacttgacaaccgtgatcgctaaggacgctgctcccgcccagggaccttattcccatgctgtcaaaacgcccacagccatctactgctcgggctcgattcccatggactccgcaggcaatctcattgagggcactatcaccgagaaaacagctcaagtgttcaagaacttaaaggctgtcctgactgaggccggctccagcctcgacaaggtcgtgaaagtcaacatcttcctcgctgatatggatgacttcgctgagatgaacgtcgaatacggcaagtggcttactcacaagcctgctcgcagctgtgtcgccgtcaagacgctacctaagaacgtcgacgtcgaaatcgagtgtattgctctgccttga

SEQ ID NO: 9021 - protein, 125 aa, Muscodor strobelii
  misc_feature: SGI Peptide ID NO. 562803
  misc_feature (10)..(125): Pfam Id: PF01042 Pfam Desc: Endoribonuclease L-PSP
  misc_feature (2)..(125): NCBI GI: 145614640 Blast Desc: conserved [Magnaporthe grisea 70-15] gi|145021554|gb|EDK05683.1| conserved [Magnaporthe grisea 70-15]
  misc_feature (5)..(125): NCBI GI: 85111414 Blast Desc: protein HMF1 [Neurospora crassa OR74A] gi|28925675|gb|EAA34689.1| protein HMF1 [Neurospora crassa OR74A]
  misc_feature (5)..(125): NCBI GI: 116180292 Blast Desc: conserved [Chaetomium globosum CBS 148.51] gi|88185071|gb|EAQ92539.1| conserved [Chaetomium globosum CBS 148.51]
  misc_feature (5)..(125): NCBI GI: 171687951 Blast Desc: protein product [Podospora anserina] gi|170943937|emb|CAP69589.1| protein product [Podospora anserina]
  misc_feature (1)..(125): NCBI GI: 256735201 Blast Desc: [Nectria haematococca mpVI 77-13-4]
  misc_feature (1)..(124): NCBI GI: 226292784 Blast Desc: L-PSP endoribonuclease family protein (Hmf1) [Paracoccidioides brasiliensis Pb18]
  misc_feature (1)..(124): NCBI GI: 226283020 Blast Desc: L-PSP endoribonuclease family protein (Hmf1) [Paracoccidioides brasiliensis Pb01]
  misc_feature (20)..(125): NCBI GI: 261357451 Blast Desc: mmf1 [Verticillium albo-atrum VaMs.102]
  misc_feature (1)..(124): NCBI GI: 225680576 Blast Desc: PABG_01179 [Paracoccidioides brasiliensis Pb03]
  misc_feature (1)..(125): NCBI GI: 261351861 Blast Desc: HMF1 [Verticillium albo-atrum VaMs.102]
  misc_feature: Useful for introducing or modulating the production of volatile compounds
MADLTTVIAKDAAPAQGPYSHAVKTPTAIYCSGSIPMDSAGNLIEGTITEKTAQVFKNLKAVLTEAGSSLDKVVKVNIFLADMDDFAEMNVEYGKWLTHKPARSCVAVKTLPKNVDVEIECIALP

SEQ ID NO: 9022 - DNA, 803 bp, Muscodor strobelii
  misc_feature: SGI EST ID NO. CUFF.21519.0
  misc_feature: Variant of the nucleotide sequence at SEQ ID NO 9020
cttctctactgcaatttaccttgaaggtgagggtgttacatccgataactattggtgagacccggcgaggagggaagatactgcgggtttcgatatttggacggtctggaatcagccgccgacagcggcgagcgtcaggtattctttatgtcaataaacctactattcattggctcccacatgaacattcacataatgtcaaatgctcgcagacttttgactgcatctccgcgcttccttaaatcaattcgtcgtcctgtgaccttcggcctagtttcacaagccccctatatcatcacattcgcgccaattcgtaaaatggctgacttgacaaccgtgatcgctaaggacgctgctcccgcccagggaccttattcccatgctgtcaaaacgcccacagccatctactgctcgggctcgattcccatggactccgcaggcaatctcattgagggcactatcaccgagaaaacagctcaagtgttcaagaacttaaaggctgtcctgactgaggccggctccagcctcgacaaggtcgtgaaagtcaacatcttcctcgctgatatggatgacttcgctgagatgaacgtcgaatacggcaagtggcttactcacaagcctgctcgcagctgtgtcgccgtcaagacgctacctaagaacgtcgacgtcgaaatcgagtgtattgctctgccttgagtaaataccaactatgatgtacttaatgcatgatactcaaagctgaattgctaaatccatatatcctgttgaaaggtctgtttcgcagcatcacaagtaatacctcg

SEQ ID NO: 9023 - DNA, 819 bp, Muscodor strobelii
  misc_feature: SGI cDNA ID NO. 562804
  misc_feature: Encodes the peptide sequence at SEQ ID NO 9024
atggaatctatcaagcgattcctccatatcaaaagtaagtctcgcaccaagcatcgccgccgtaagtccagccctggcgtagagaggacttttgagaaagaaacttcacaggaggctggtcatgtcatttcagggtttactccgactgagcgcggccgagatgctactattgaatggctcaactcaggtacgttagattccttaaagacattgctgatcgagcgtgacaccgccgcaaaacaggtgaaacggggaccgaagacgagaggcactaaagaggtgcaactcattctgcgtcaaccgtcccgaaagactgttgcgcaattgcatcgagtttgtcatcaagctggtatggctctcaaatatggagcaactggcgtggttgcgtataactttagtaaatcttttggttggaatcagtcagcttcactcacaccatctttacaactcaaagagttccgagagatcatgcaagacgtagggtctaacccagggagggtgtcgccagtgacttttacgccaattcattggctggttctacctatcccttcacaagaacgggctcaagaatcacaacccgaagctcttgaagatgagcctgtcggtctttgtgagggccaggacggagagcagcgttgttggacgccgatttctgaaccgggcgggtggcgtgactgcgaggattcgtcagaaatattttgtatcggcgaagatgaagatgaagatgaagacgagtttgatcaatattatacgagcgaggcaatggcggtaagtgtaacttctatcgcaagccaagatgtctgcatggtgaaggtctga

SEQ ID NO: 9024 - protein, 272 aa, Muscodor strobelii
  misc_feature: SGI Peptide ID NO. 562804
MESIKRFLHIKSKSRTKHRRRKSSPGVERTFEKETSQEAGHVISGFTPTERGRDATIEWLNSGTLDSLKTLLIERDTAAKQVKRGPKTRGTKEVQLILRQPSRKTVAQLHRVCHQAGMALKYGATGVVAYNFSKSFGWNQSASLTPSLQLKEFREIMQDVGSNPGRVSPVTFTPIHWLVLPIPSQERAQESQPEALEDEPVGLCEGQDGEQRCWTPISEPGGWRDCEDSSEIFCIGEDEDEDEDEFDQYYTSEAMAVSVTSIASQDVCMVKV

SEQ ID NO: 9025 - DNA, 529 bp, Muscodor strobelii
  misc_feature: SGI EST ID NO. CUFF.21525.0
  misc_feature: Variant of the nucleotide sequence at SEQ ID NO 9023
gtccaaaagccctttgtttattgaaaacgctagtgtctgccatgaatgaaagagccactaggtcttcgaagagccacgatgtgctgaaataaattgtcttggtcctctctgagttattgaccatgtcacatccgaactctctgagaattgaacctacaatcctttaactgaaaatggaatctatcaagcgattcctccatatcaaaagtaagtctcgcaccaagcatcgccgccgtaagtccagccctggcgtagagaggacttttgagaaagaaacttcacaggaggctggtcatgtcatttcagggtttactccgactgagcgcggccgagatgctactattgaatggctcaactcaggtacgttagattccttaaagacattgctgatcgagcgtgacaccgccgcaaaacaggtgaaacggggaccgaagacgagaggcactaaagaggtgcaactcattctgcgtcaaccgtcccgaaagactgttgcgcaattgcatcgagtttgtcatcaagctggtatggc

SEQ ID NO: 9026 - DNA, 894 bp, Muscodor strobelii
  misc_feature: SGI cDNA ID NO. 562805
  misc_feature: Encodes the peptide sequence at SEQ ID NO 9027
atgttgtgctgtggatcggcagacgattattaccacgccactccctacaagccagaaaacgagcggcgacagcctaagactaagcctcagggacattcgcagcgtcatccgcagcctgaacagtacgatgggttgacgaaagagcagtatgagaaacgcgagagacaggcaagggcgacacacgctgcgcagaagtacggctggccaactgcccgcggtgtccaacagaacagatttacagagcatctgcccccaggaaaccgagactcggtcatagaaccaggccttgcaggtactttcgtaagtatgccggggtccgagtttggggaactgagacctgtgtacgatccagttcgcgcaaggcagcctcaaaacgcaagtatagaggctcctcgtgctcctcgtccggcccctgcccggccacaacgtccccaaatatcacaactcccatcattcccacagtacggggcggcatacgctcgaccagggccggcgatggcctctggacagcggcagcccatatatcaacagcctactagacaaacacccatgtctcagggtcttcctcaaagaaggccgaatgccactcctcgcacgccttcttcagaaaagcggcccgtagtccatccctctcacgcaaaacgcccagttgtccaggaactggatctatctagggtcaagccacaaaaggcgacctttcatatggccactccccagagagaacactaccccaagcccgtccgccgagatagtaatggtgtatccgactgctcctcagcagatgatgatgaccgtatcgacgatctgaggaactacactgtgtcgccactgcagtcggcgatgtctccccaaccattcaatgggcacctttattcgcatatggatgttttttga

SEQ ID NO: 9027 - protein, 297 aa, Muscodor strobelii
  misc_feature: SGI Peptide ID NO. 562805
MLCCGSADDYYHATPYKPENERRQPKTKPQGHSQRHPQPEQYDGLTKEQYEKRERQARATHAAQKYGWPTARGVQQNRFTEHLPPGNRDSVIEPGLAGTFVSMPGSEFGELRPVYDPVRARQPQNASIEAPRAPRPAPARPQRPQISQLPSFPQYGAAYARPGPAMASGQRQPIYQQPTRQTPMSQGLPQRRPNATPRTPSSEKRPVVHPSHAKRPVVQELDLSRVKPQKATFHMATPQREHYPKPVRRDSNGVSDCSSADDDDRIDDLRNYTVSPLQSAMSPQPFNGHLYSHMDVF

SEQ ID NO: 9028 - DNA, 459 bp, Muscodor strobelii
  misc_feature: SGI EST ID NO. CUFF.21528.0
  misc_feature: Variant of the nucleotide sequence at SEQ ID NO 9026
gagtttggggaactgagacctgtgtacgatccagttcgcgcaaggcagcctcaaaacgcaagtatagaggctcctcgtgctcctcgtccggcccctgcccggccacaacgtccccaaatatcacaactcccatcattcccacagtacggggcggcatacgctcgaccagggccggcgatggcctctggacagcggcagcccatatatcaacagcctactagacaaacacccatgtctcagggtcttcctcaaagaaggccgaatgccactcctcgcacgccttcttcagaaaagcggcccgtagtccatccctctcacgcaaaacgcccagttgtccaggaactggatctatctagggtcaagccacaaaaggcgacctttcatatggccactccccagagagaacactaccccaagcccgtccgccgagatagtaatggtgtatccgactgctcctca

SEQ ID NO: 9029 - DNA, 2085 bp, Muscodor strobelii
  misc_feature: SGI cDNA ID NO. 562806
  misc_feature: Elevated expression when VOC is produced
  misc_feature: Encodes the peptide sequence at SEQ ID NO 9030
atggcaacaccagatttttatcctgtgcacctgggtacctggactaattggtctcggggtcctatcttgggtaaaacattgacaatcgaacgaagccaaggcgacattttaattgcttttactgcgttgttcgttgccctggtttctgaccgtggctggcgagttatatctttcgcacttcatcggtattttgcctcaccggcgccgcaaggcaggatccatcatcaaactcaagccattcttcgaaacttcgatacacacactagctttcggcagtttgtggcattgttgtggagtgtcctccggcaaaataggatattatttggcaagcgaaccaaagtcttcagactcctagccttgctcctggtctcagctgtatacactgtcgtcttcactctcgctggtggcttctcctcccagatatcttctgcggctggaaatgaagtcttgattaacagcgcgaactgtggatgggatggaccggaagacaatgaccctcagaactacttcttatattcgactctcgccgctgaagaagttaccaatgcagccaactatgcacagcagtgttattcgaccgacagtcctgggatattggactgcagccgtttgagcaaacaaaacatcgaacctcaagttgacacagcagctgaatgccctttcttcggtgatatatgtcggacggatcgcaacatccgtattgattcgggctttgttaacagtcatgatgatcttgggctcaacacaccagtcagcgagaggatgctagcaagatatgtgctgcactgcgcgccaatgaagacaaaaggctactcgagtattcgcaacacttctatcgggaatatcactgtttaccattacggcaatgtcacgatcgctggtgatacaaaagactacgtggcaacggcaaaatcgcttgaaaatcaatacgcatatgtcacgtccgcagatactgtttctactggttctgattatgacttaacttcattatttgtccatgtcagaaatggaacggtcgatagcgaccaagcaaatttcatgcctcttgaatctatctggcccttagacgcagacttagctctcgtcatgctggcagcgaacggcgtcgtatacactgagacatcaaacgatgaatggtaccagatatctccaacactttcaaatggtcctaccggtggcagtaatcagtcggagagcgaatcgcagtccttctatcctcctctggaggaagcatcacccttaggttgcaccgtacaatggcagttttgcagccaaacctctgaaagctgtggcgaactgggcggtcttttcgatgccatcgatactgccagtcctcaattcgaggatcaagacaaaggtagcactaatggtactcgtgcagcgtattttcagtatttccaggaaactctattcaacgctccatcattggcttcttttctcagcatattgggaggaaccagtttaaaatcacagagctcattatcacaaggtcttcaaggctctctgccatcgaaccaatggcaacttgacgtaacgaattggttcaacatacagatgtctcttaatcagttggcatttctcaaggcggcttatttccaacccacgaatccagaactcctcgaaaatcgcatagctccatcccgagaagcacagaaattgtgtttcaatcagaaaatgagaaactcaaattatagctcgttcaacttatttggtctcctatttacatacatagttggtgctctgatcatagctgcatctttcctactcgagcccacgttttggcttttgtatgagagacttggatttggaacttatgccactctcgaatggaccaccacaacagtctttcaactgcaacgtctagcacatgaaggacgaggatttggtatttggtcaggaggcacagaaaaggttcctactacaggggccgatgacctactggcctgtcttgacttgagcaatcctagtcaccccgtgttaggtcttcaacgagatctggcacgaaccggtacagtgtcaagcacgtcgactggggagaacgaaaagaagcagtcgactagagagacaatagctgatgcagtgtag

SEQ ID NO: 9030 - protein, 694 aa, Muscodor strobelii
  misc_feature: SGI Peptide ID NO. 562806
  misc_feature (7)..(658): NCBI GI: 169615058 Blast Desc: SNOG_10683 [Phaeosphaeria nodorum SN15] gi|111060957|gb|EAT82077.1| SNOG_10683 [Phaeosphaeria nodorum SN15]
  misc_feature (1)..(690): NCBI GI: 189194015 Blast Desc: conserved [Pyrenophora tritici-repentis Pt-1C-BFP] gi|187978910|gb|EDU45536.1| conserved [Pyrenophora tritici-repentis Pt-1C-BFP]
  misc_feature (9)..(679): NCBI GI: 115399382 Blast Desc: [Aspergillus terreus NIH2624] gi|114192163|gb|EAU33863.1| [Aspergillus terreus NIH2624]
  misc_feature (9)..(647): NCBI GI: 119474227 Blast Desc: NFIA_004500 [Neosartorya fischeri NRRL 181] gi|119407142|gb|EAW17092.1| conserved [Neosartorya fischeri NRRL 181]
  misc_feature (9)..(641): NCBI GI: 70986226 Blast Desc: conserved [Aspergillus fumigatus Af293] gi|66846236|gb|EAL86569.1| conserved [Aspergillus fumigatus Af293]
  misc_feature (9)..(641): NCBI GI: 159128250 Blast Desc: conserved [Aspergillus fumigatus A1163]
  misc_feature (9)..(690): NCBI GI: 169772941 Blast Desc: [Aspergillus oryzae RIB40] gi|83768800|dbj|BAE58937.1| protein product [Aspergillus oryzae]
  misc_feature (5)..(643): NCBI GI: 121699395 Blast Desc: ACLA_082720 [Aspergillus clavatus NRRL 1] gi|119396149|gb|EAW06581.1| ACLA_082720 [Aspergillus clavatus NRRL 1]
  misc_feature (7)..(641): NCBI GI: 46116086 Blast Desc: FG03885.1 [Gibberella zeae PH-1]
  misc_feature (4)..(645): NCBI GI: 256723662 Blast Desc: NECHADRAFT_86728 [Nectria haematococca mpVI 77-13-4]
  misc_feature: Useful for introducing or modulating the production of volatile compounds
MATPDFYPVHLGTWTNWSRGPILGKTLTIERSQGDILIAFTALFVALVSDRGWRVISFALHRYFASPAPQGRIHHQTQAILRNFDTHTSFRQFVALLWSVLRQNRILFGKRTKVFRLLALLLVSAVYTVVFTLAGGFSSQISSAAGNEVLINSANCGWDGPEDNDPQNYFLYSTLAAEEVTNAANYAQQCYSTDSPGILDCSRLSKQNIEPQVDTAAECPFFGDICRTDRNIRIDSGFVNSHDDLGLNTPVSERMLARYVLHCAPMKTKGYSSIRNTSIGNITVYHYGNVTIAGDTKDYVATAKSLENQYAYVTSADTVSTGSDYDLTSLFVHVRNGTVDSDQANFMPLESIWPLDADLALVMLAANGVVYTETSNDEWYQISPTLSNGPTGGSNQSESESQSFYPPLEEASPLGCTVQWQFCSQTSESCGELGGLFDAIDTASPQFEDQDKGSTNGTRAAYFQYFQETLFNAPSLASFLSILGGTSLKSQSSLSQGLQGSLPSNQWQLDVTNWFNIQMSLNQLAFLKAAYFQPTNPELLENRIAPSREAQKLCFNQKMRNSNYSSFNLFGLLFTYIVGALIIAASFLLEPTFWLLYERLGFGTYATLEWTTTTVFQLQRLAHEGRGFGIWSGGTEKVPTTGADDLLACLDLSNPSHPVLGLQRDLARTGTVSSTSTGENEKKQSTRETIADAV

SEQ ID NO: 9031 - DNA, 3131 bp, Muscodor strobelii
  misc_feature: SGI EST ID NO. CUFF.21561.1
  misc_feature: Variant of the nucleotide sequence at SEQ ID NO 9029
ctttcttatatgtctgtcggattattaccattgttttctttcatatgaagcagactattggcgccttgcaatcattggaggctcaatccgcgcttcctctagtatatagccatcatggcaacaccagatttttatcctgtgcacctgggtacctggactaattggtctcggggtcctatcttgggtaaaacattgacaatcgaacgaagccaaggcgacattttaattgcttttactgcgttgttcgttgccctggtttctgaccgtggctggcgagttatatctttcgcacttcatcggtattttgcctcaccggcgccgcaaggcaggatccatcatcaaactcaagccattcttcgaaacttcgatacacacactagctttcggcagtttgtggcattgttgtggagtgtcctccggcaaaataggatattatttggcaagcgaaccaaagtcttcagactcctagccttgctcctggtctcagctgtatacactgtcgtcttcactctcgctggtggcttctcctcccagatatcttctgcggctggaaatgaagtcttgattaacagcgcgaactgtggatgggatggaccggaagacaatgaccctcagaactacttcttatattcgactctcgccgctgaagaagttaccaatgcagccaactatgcacagcagtgttattcgaccgacagtcctgggatattggactgcagccgtttgagcaaacaaaacatcgaacctcaagttgacacagcagctgaatgccctttcttcggtgatatatgtcggacggatcgcaacatccgtattgattcgggctttgttaacagtcatgatgatcttgggctcaacacaccagtcagcgagaggatgctagcaagatatgtgctgcactgcgcgccaatgaagacaaaaggctactcgagtattcgcaacacttctatcgggaatatcactgtttaccattacggcaatgtcacgatcgctggtgatacaaaagactacgtggcaacggcaaaatcgcttgaaaatcaatacgcatatgtcacgtccgcagatactgtttctactggttctgattatgacttaacgtgagttcctgtttcctagccgttttcaacacaggatacggagggttgtcgcttctattactgtacataaggtagaaggctgaacaaataacaaacagttcattatttgtccatgtcagaaatggaacggtcgatagcgaccaagcaaatttcatgcctcttgaatctatctggcccttagacgcagacttagctctcgtcatgctggcagcgaacggcgtcgtatacactgagacatcaaacgatgaatggtaccagatatctccaacactttcaaatggtcctaccggtggcagtaatcagtcggagagcgaatcgcagtccttctatcctcctctggaggaagcatcacccttaggttgcaccgtacaatggcagttttgcagccaaacctctgaaagctgtggcgaactgggcggtcttttcgatgccatcgatactgccagtcctcaattcgaggatcaagacaaaggtagcactaatggtactcgtgcagcgtattttcagtatttccaggaaactctattcaacgctccatcattggcttcttttctcagcatattgggaggaaccagtttaaaatcacagagctcattatcacaaggtcttcaaggctctctgccatcgaaccaatggcaacttgacgtaacgaattggttcaacatacagatgtctcttaatcagttggcatttctcaaggcggcttatttccaacccacgaatccagaactcctcgaaaatcgcatagctccatcccgagaagcacagaaattgtgtttcaatcagaaaatgagaaactcaaattatagctcgttcaacttatttggtctcctatttacatacatagttggtgctctgatcatagctgcatctttcctactcgagcccacgttttggcttttgtatgagagacttggatttggaacttatgccactctcgaatggaccaccacaacagtctttcaactgcaacgtctagcacatgaaggacgaggatttggtatttggtcaggaggcacagaaaaggttcctactacaggggccgatgacctactggcctgtcttgacttgagcaatcctagtcaccccgtgttaggtcttcaacgagatctggcacgaaccggtacagtgtcaagcacgtcgactggggagaacgaaaagaagcagtcgactagagagacaatagctgatgcagtgtagtgaagttcaaaaaggtctccgttagtattgcgtagttgataggatacctggggaatgtaaaaagaccagtggccattctgattcggcgtggaagtcgtcgaatacacgcagcaaggcaatagctaggactggtagctaatgatgtcaaatacatgtctaacactattgaggttctggcagagtagcattcggtaactgtgtaaacatttgcaatccgccagttagaataggctacaaaatagaatagttgcagccttgtgagcttaaagtaagccgggacaacaatatcaatacgaatttgtagacaactaatacctagccgcagactattcgtagtgaattacgtagccctgaggggaaaggcttcgtggccaggactgcatctatctcaggcacctgcatttttaaccctgctggtacgcactccgcagaggtgtgtcttggcgcgaatcaaaaggctcccgaattcgaagagccgtgattggacagatacgattggacacgtaccatagggctgaatgcccagccccaaaaggtcaaactatgagatgcatgtctcgcgatgtgcaccagggcaagcagtacaagcgctggcttcctgtcgagcctgttcgcgccctttacaggatgatgtgacgtgcttcttatccaccataacaaggttgcctaagatcttgattcgatacaatcggcggggtgaatgggttcaaatcaaattactggttggatctttcctgttcgacagtcatggccaacggaacgattgaataaaagacttcccagtcggaacagtccaatgaattgagcatgtctgactctacaaattgattcacc

SEQ ID NO: 9032 - DNA, 2253 bp, Muscodor strobelii
  misc_feature: SGI cDNA ID NO. 562807
  misc_feature: Encodes the peptide sequence at SEQ ID NO 9033
atgtccttctccaatcctcgcaggaccggcgcggtgactcgctcggacactgctgctcgcgacggcttgaaacttaagaccaacctgggtctcaagaagggtgctacctttcactctcctatcactccaccaaccagtcccagttcaacaccaactttcagagtcccatcacttcctcgccggtctcagacatgtctggatgatgttgtcgacgcccacgtccgtcgtgcggctatgaacattaacaaatttgaagacagcctgtcgtcatctaatggtgaacaaaagtcttctcgtcgtccttttcatgacgacagtctccccatccctcgaagcttcttggattctactgctatcgaagacaagatggctatcgacagcgtcatgaacacagagcggcgtgtgctgcggcctcgtacccgccgctcatcaaacaaccaagcgtcagatagtgggctgggcacgtcggtcgcctctacagctcaaaagcgcaaagaagccaattccaccaacagtgcttccacaatcacgcggtccatcaacacatcggcaacagaaactcttgcgcgactgagccctcgcgccgtcagtcgtatccatgagcacactcttaggcctttgcttgaggaaccgtcccttaaagctttccgtcccattgtcctcgactgcccccggagaattcaagagaaccagatcgtttgtctcagggatctcgagaagaccctcatctttatggcacctgagagggccaattctgcgaaattgtacttcgacttttgcctgacttcgatccgatgcatccaagctaccgtcgaatatctgagcgaccgagaacagacgcgacctcatgaccgaccatacagcggcggctattttattgacctcgtcgaacagatccgccaacacgcaatccagatgcaagaggcccgtgacaagcaggctgctggggaagagggcaccgacatggacgcccatcccaccgacgagctgaagctcattggaggtcttgcgacaaatggacgtccagcagagttcgtgcgtatcactaagagtggcaaggcaatctcctgcgccacaggtgaaattgtggaagactacgacgaggagatgacgggtcctcttcgcttcaagcgctcgatgagccagcaggctgaggacgaagaagagatcatgcggtcaatggctcgacgtaagaagaacgccactcctgaagagctcgccccgaagaagtgcacccatcccggatgcaacaaggaattcaagcggccttgcgatctgaccaaacacgagaagacgcactcgcgtccttggaaatgtccattccctacctgcaaattccacgagtatggatggccgaccgagaaggagatgggtcgtcacgtcaacgacaaacactcgtccgcacctgccatgtacgaatgtgaattcaaaccatgcccttacaagtccaagcgggagtcgaactgcaaacagcacatggaaaaggctcatggctgggtgtatcaccggaccaaggctcccaagaagggaagcaaagccagcacttctgctaaacctaccccattgctcaacaatctgcctacacctagcagtgatcagagtgattcgatcatgacaccgcctgacaatgccttcttctcaacgctagacgacaaccagagtctcttccccacttacccaagcactgaagagttcaacgctgagttgttcgaaaaccagccgttcgacggagagcttcaacttgatttctctcctatcgacaactctactccgtcaaccgatgccggccagttctatcaagaactcagtcctgagttcactggccaattcgaagatatttatggtgctcacgtacggcttccaaccacgcccacgtactccttgtataataaaactatgcccaatgcattcaacaacaacttcactacttctgacatggcgcctccaatgcttgcccctcagttctcaccctctggtcacggcaattcaatgttgtatacaccaacctcgatggtcgacgttgacgaaggcttcgacgacttccaacctgttggagatggccagaacggtggcgacttcaccttgttcccatctgacaacatgggaaagccatcgaacttcgagccggcgttctttccaggtgtaacacccagcttagcggccgggtacacgcagccctcttcccaagatttcaacaatatcgacttcaacaatatggatatcgattggtccgatctccaaacctttccataa

SEQ ID NO: 9033 - protein, 750 aa, Muscodor strobelii
  misc_feature: SGI Peptide ID NO. 562807
  misc_feature (409)..(433): Pfam Id: PF00096 Pfam Desc: Zinc finger, C2H2 type
  misc_feature (1)..(741): NCBI GI: 256734484 Blast Desc: NECHADRAFT_57385 [Nectria haematococca mpVI 77-13-4]
  misc_feature (4)..(749): NCBI GI: 171687945 Blast Desc: protein product [Podospora anserina] gi|170943934|emb|CAP69586.1| protein product [Podospora anserina]
  misc_feature (1)..(740): NCBI GI: 32699313 Blast Desc: ACE1_TRIRE RecName: Full=Zinc finger transcription factor ace1; AltName: Full=ACEI gi|7021331|gb|AAF35286.1|AF190793_1 Cys2-His2 zinc finger factor
  misc_feature (1)..(738): NCBI GI: 47524784 Blast Desc: zinc finger transcription factor ACE1 [Gibberella zeae]
  misc_feature (4)..(649): NCBI GI: 116180296 Blast Desc: CHGG_00776 [Chaetomium globosum CBS 148.51] gi|88185073|gb|EAQ92541.1| CHGG_00776 [Chaetomium globosum CBS 148.51]
  misc_feature (3)..(731): NCBI GI: 145614634 Blast Desc: MGG_04428 [Magnaporthe grisea 70-15] gi|145021551|gb|EDK05680.1| MGG_04428 [Magnaporthe grisea 70-15]
  misc_feature (3)..(744): NCBI GI: 164423015 Blast Desc: NCU09333 [Neurospora crassa OR74A] gi|157069912|gb|EAA34691.2| conserved [Neurospora crassa OR74A]
  misc_feature (1)..(545): NCBI GI: 261357455 Blast Desc: zinc finger transcription factor ace1 [Verticillium albo-atrum VaMs.102]
  misc_feature (30)..(673): NCBI GI: 154298189 Blast Desc: BC1G_11939 [Botryotinia fuckeliana B05.10] gi|150858125|gb|EDN33317.1| BC1G_11939 [Botryotinia fuckeliana B05.10]
  misc_feature (28)..(696): NCBI GI: 119195951 Blast Desc: zinc finger transcription factor [Coccidioides immitis RS]
MSFSNPRRTGAVTRSDTAARDGLKLKTNLGLKKGATFHSPITPPTSPSSTPTFRVPSLPRRSQTCLDDVVDAHVRRAAMNINKFEDSLSSSNGEQKSSRRPFHDDSLPIPRSFLDSTAIEDKMAIDSVMNTERRVLRPRTRRSSNNQASDSGLGTSVASTAQKRKEANSTNSASTITRSINTSATETLARLSPRAVSRIHEHTLRPLLEEPSLKAFRPIVLDCPRRIQENQIVCLRDLEKTLIFMAPERANSAKLYFDFCLTSIRCIQATVEYLSDREQTRPHDRPYSGGYFIDLVEQIRQHAIQMQEARDKQAAGEEGTDMDAHPTDELKLIGGLATNGRPAEFVRITKSGKAISCATGEIVEDYDEEMTGPLRFKRSMSQQAEDEEEIMRSMARRKKNATPEELAPKKCTHPGCNKEFKRPCDLTKHEKTHSRPWKCPFPTCKFHEYGWPTEKEMGRHVNDKHSSAPAMYECEFKPCPYKSKRESNCKQHMEKAHGWVYHRTKAPKKGSKASTSAKPTPLLNNLPTPSSDQSDSIMTPPDNAFFSTLDDNQSLFPTYPSTEEFNAELFENQPFDGELQLDFSPIDNSTPSTDAGQFYQELSPEFTGQFEDIYGAHVRLPTTPTYSLYNKTMPNAFNNNFTTSDMAPPMLAPQFSPSGHGNSMLYTPTSMVDVDEGFDDFQPVGDGQNGGDFTLFPSDNMGKPSNFEPAFFPGVTPSLAAGYTQPSSQDFNNIDFNNMDIDWSDLQTFP

SEQ ID NO: 9034 - DNA, 3499 bp, Muscodor strobelii
  misc_feature: SGI EST ID NO. CUFF.22778.0
  misc_feature: Variant of the nucleotide sequence at SEQ ID NO 9032
tgttggtcctgatcctggtccagggagacgccaagcctgtccgtccccattttccaacgactgctgcctaaatcccatcttgagacacatttcaacgtccaccgtcctctggtgtttgctctcactgctttgaatttctaccgcttcctcccccatcactgcttacacctcgacctgaggccaccattctgcttattactactggcgggtgctcgttgcaacataactgttgtctttttgccctttcctctgcattcccggcattccagtccgaccatcgccgactgttccggacaattaattatacactgtcccccagagcagccctccaccttgttctcccattttccatcgaatccaacacaaccgtcttaactcttggtcattcctcgaccggtgcacgttgtttgctgtgcttgtcttggatatgtttgtctgtcgagccaacatactccatctgtatttcatctaattccctttatcgagagagagggaaacagtatccgcatcacatagcgccttgtttgtctcatcagctatatacaacccactgccaagtcgagtcacctgtctatcgtgccctgccatacgtgacaagatactcagttggcctccatataagtaaggacacatatttctcgccagtggacaccggctgcaaccttatttcccttctcttgtcgccatatagacatcgactcttacagtccacacctgtgatatctcgatcgagtcctcaggccacaccctcttcggtgtgcatcgaccaaggactcggtgactcacacgcctgccacagtagtgcatatcggtactaacctactgcttccggacagaacaatcaacatatcacacataagagtccttggtcctctgtctgctgtggagcacaccaagccatcatgtccttctccaatcctcgcaggaccggcgcggtgactcgctcggacactgctgctcgcgacggcttgaaacttaagaccaacctgggtctcaagaagggtgctacctttcactctcctatcactccaccaaccagtcccagttcaacaccaactttcagagtcccatcacttcctcgccggtctcagacatgtctggatgatgttgtcgacgcccacgtccgtcgtgcggctatgaacattaacaaatttgaagacagcctgtcgtcatctaatggtgaacaaaagtcttctcgtcgtccttttcatgacgacagtctccccatccctcgaagcttcttggattctactgctatcgaagacaagatggctatcgacagcgtcatgaacacagagcggcgtgtgctgcggcctcgtacccgccgctcatcaaacaaccaagcgtcagatagtgggctgggcacgtcggtcgcctctacagctcaaaagcgcaaagaagccaattccaccaacagtgcttccacaatcacgcggtccatcaacacatcggcaacagaaactcttgcgcgactgagccctcgcgccgtcagtcgtatccatgagcacactcttaggcctttgcttgaggaaccgtcccttaaagctttccgtcccattgtcctcgactgcccccggagaattcaagagaaccagatcgtttgtctcagggatctcgagaagaccctcatctttatggcacctgagagggccaattctgcgaaattgtacttcgacttttgcctgacttcgatccgatgcatccaagctaccgtcgaatatctgagcgaccgagaacagacgcgacctcatgaccgaccatacagcggcggctattttattgacctcgtcgaacagatccgccaacacgcaatccagatgcaagaggcccgtgacaagcaggctgctggggaagagggcaccgacatggacgcccatcccaccgacgagctgaagctcattggaggtcttgcgacaaatggacgtccagcagagttcgtgcgtatcactaagagtggcaaggcaatctcctgcgccacaggtgaaattgtggaagactacgacgaggagatgacgggtcctcttcgcttcaagcgctcgatgagccagcaggctgaggacgaagaagagatcatgcggtcaatggctcgacgtaagaagaacgccactcctgaagagctcgccccgaagaagtgcacccatcccggatgcaacaaggaattcaagcggccttgcgatctgaccaaacacgagaagacgcactcgcgtccttggaaatgtccattccctacctgcaaattccacgagtatggatggccgaccgagaaggagatgggtcgtcacgtcaacgacaaacactcgtccgcacctgccatgtacgaatgtgaattcaaaccatgcccttacaagtccaagcgggagtcgaactgcaaacagcacatggaaaaggctcatggctgggtgtatcaccggaccaaggctcccaagaagggaagcaaagccagcacttctgctaaacctaccccattgctcaacaatctgcctacacctagcagtgatcagagtgattcgatcatgacaccgcctgacaatgccttcttctcaacgctagacgacaaccagagtctcttccccacttacccaagcactgaagagttcaacgctgagttgttcgaaaaccagccgttcgacggagagcttcaacttgatttctctcctatcgacaactctactccgtcaaccgatgccggccagttctatcaagaactcagtcctgagttcactggccaattcgaagatatttatggtgctcacgtacggcttccaaccacgcccacgtactccttgtataataaaactatgcccaatgcattcaacaacaacttcactacttctgacatggcgcctccaatgcttgcccctcagttctcaccctctggtcacggcaattcaatgttgtatacaccaacctcgatggtcgacgttgacgaaggcttcgacgacttccaacctgttggagatggccagaacggtggcgacttcaccttgttcccatctgacaacatgggaaagccatcgaacttcgagccggcgttctttccaggtgtaacacccagcttagcggccgggtacacgcagccctcttcccaagatttcaacaatatcgacttcaacaatatggatatcgattggtccgatctccaaacctttccataaaggcttacatttattagtaccctaataaccagtctacatcgatagacagatgtgttgcctgactgcgttttcctgtaaagagttgattgttacgatgttacgatgatgatgaaacagctaaaacgagacttgttggtgtcgcagcgacagattgctcttcgtctatcaaagacggcaattgagtgaaggatcggatcaatgttctcggtgtttgatttctatatcagaaccgttttgacggtggcgatgttgctagaaccgcctgtaatatctctaagcactacagcaaattggcttgtcaataacagatttacgttactccgagacatactcgacttcaaaaa

SEQ ID NO: 9035 - DNA, 2304 bp, Muscodor strobelii
  misc_feature: SGI cDNA ID NO. 562808
  misc_feature: Reduced expression when VOC is produced
  misc_feature: Encodes the peptide sequence at SEQ ID NO 9036
atgtccttctccaatcctcgcaggaccggcgcggtgactcgctcggacactgctgctcgcgacggcttgaaacttaagaccaacctgggtctcaagaagggtgctacctttcactctcctatcactccaccaaccagtcccagttcaacaccaactttcagagtcccatcacttcctcgccggtctcagacatgtctggatgatgttgtcgacgcccacgtccgtcgtgcggctatgaacattaacaaatttgaagacagcctgtcgtcatctaatggtgaacaaaagtcttctcgtcgtccttttcatgacgacagtctccccatccctcgaagcttcttggattctactgctatcgaagacaagatggctatcgacagcgtcatgaacacagagcggcgtgtgctgcggcctcgtacccgccgctcatcaaacaaccaagcgtcagatagtgggctgggcacgtcggtcgcctctacagctcaaaagcgcaaagaagccaattccaccaacagtgcttccacaatcacgcggtccatcaacacatcggcaacagaaactcttgcgcgactgagccctcgcgccgtcagtcgtatccatgagcacactcttaggcctttgcttgaggaaccgtcccttaaagctttccgtcccattgtcctcgactgcccccggagaattcaagagaaccagatcgtttgtctcagggatctcgagaagaccctcatctttatggcacctgagagggccaattctgcgaaattgtacttcgacttttgcctgacttcgatccgatgcatccaagctaccgtcgaatatctgagcgaccgagaacagacgcgacctcatgaccgaccatacagcggcggctattttattgacctcgtcgaacagatccgccaacacgcaatccagatgcaagaggcccgtgacaagcaggctgctggggaagagggcaccgacatggacgcccatccgtatgtatccacggcttaccactcgttaccatgtactgatgactcaaccagcaccgacgagctgaagctcattggaggtcttgcgacaaatggacgtccagcagagttcgtgcgtatcactaagagtggcaaggcaatctcctgcgccacaggtgaaattgtggaagactacgacgaggagatgacgggtcctcttcgcttcaagcgctcgatgagccagcaggctgaggacgaagaagagatcatgcggtcaatggctcgacgtaagaagaacgccactcctgaagagctcgccccgaagaagtgcacccatcccggatgcaacaaggaattcaagcggccttgcgatctgaccaaacacgagaagacgcactcgcgtccttggaaatgtccattccctacctgcaaattccacgagtatggatggccgaccgagaaggagatgggtcgtcacgtcaacgacaaacactcgtccgcacctgccatgtacgaatgtgaattcaaaccatgcccttacaagtccaagcgggagtcgaactgcaaacagcacatggaaaaggctcatggctgggtgtatcaccggaccaaggctcccaagaagggaagcaaagccagcacttctgctaaacctaccccattgctcaacaatctgcctacacctagcagtgatcagagtgattcgatcatgacaccgcctgacaatgccttcttctcaacgctagacgacaaccagagtctcttccccacttacccaagcactgaagagttcaacgctgagttgttcgaaaaccagccgttcgacggagagcttcaacttgatttctctcctatcgacaactctactccgtcaaccgatgccggccagttctatcaagaactcagtcctgagttcactggccaattcgaagatatttatggtgctcacgtacggcttccaaccacgcccacgtactccttgtataataaaactatgcccaatgcattcaacaacaacttcactacttctgacatggcgcctccaatgcttgcccctcagttctcaccctctggtcacggcaattcaatgttgtatacaccaacctcgatggtcgacgttgacgaaggcttcgacgacttccaacctgttggagatggccagaacggtggcgacttcaccttgttcccatctgacaacatgggaaagccatcgaacttcgagccggcgttctttccaggtgtaacacccagcttagcggccgggtacacgcagccctcttcccaagatttcaacaatatcgacttcaacaatatggatatcgattggtccgatctccaaacctttccataa

SEQ ID NO: 9036 - protein, 767 aa, Muscodor strobelii
  misc_feature: SGI Peptide ID NO. 562808
  misc_feature (426)..(450): Pfam Id: PF00096 Pfam Desc: Zinc finger, C2H2 type
  misc_feature (1)..(758): NCBI GI: 256734484 Blast Desc: NECHADRAFT_57385 [Nectria haematococca mpVI 77-13-4]
  misc_feature (4)..(766): NCBI GI: 171687945 Blast Desc: protein product [Podospora anserina] gi|170943934|emb|CAP69586.1| protein product [Podospora anserina]
  misc_feature (1)..(757): NCBI GI: 32699313 Blast Desc: ACE1_TRIRE RecName: Full=Zinc finger transcription factor ace1; AltName: Full=ACEI gi|7021331|gb|AAF35286.1|AF190793_1 Cys2-His2 zinc finger factor
  misc_feature (1)..(755): NCBI GI: 47524784 Blast Desc: zinc finger transcription factor ACE1 [Gibberella zeae]
  misc_feature (4)..(666): NCBI GI: 116180296 Blast Desc: CHGG_00776 [Chaetomium globosum CBS 148.51] gi|88185073|gb|EAQ92541.1| CHGG_00776 [Chaetomium globosum CBS 148.51]
  misc_feature (3)..(748): NCBI GI: 145614634 Blast Desc: MGG_04428 [Magnaporthe grisea 70-15] gi|145021551|gb|EDK05680.1| MGG_04428 [Magnaporthe grisea 70-15]
  misc_feature (3)..(761): NCBI GI: 164423015 Blast Desc: NCU09333 [Neurospora crassa OR74A] gi|157069912|gb|EAA34691.2| conserved [Neurospora crassa OR74A]
  misc_feature (1)..(562): NCBI GI: 261357455 Blast Desc: zinc finger transcription factor ace1 [Verticillium albo-atrum VaMs.102]
  misc_feature (31)..(690): NCBI GI: 154298189 Blast Desc: BC1G_11939 [Botryotinia fuckeliana B05.10] gi|150858125|gb|EDN33317.1| BC1G_11939 [Botryotinia fuckeliana B05.10]
  misc_feature (28)..(713): NCBI GI: 119195951 Blast Desc: zinc finger transcription factor [Coccidioides immitis RS]
  misc_feature: Useful for introducing or modulating the production of volatile compounds
MSFSNPRRTGAVTRSDTAARDGLKLKTNLGLKKGATFHSPITPPTSPSSTPTFRVPSLPRRSQTCLDDVVDAHVRRAAMNINKFEDSLSSSNGEQKSSRRPFHDDSLPIPRSFLDSTAIEDKMAIDSVMNTERRVLRPRTRRSSNNQASDSGLGTSVASTAQKRKEANSTNSASTITRSINTSATETLARLSPRAVSRIHEHTLRPLLEEPSLKAFRPIVLDCPRRIQENQIVCLRDLEKTLIFMAPERANSAKLYFDFCLTSIRCIQATVEYLSDREQTRPHDRPYSGGYFIDLVEQIRQHAIQMQEARDKQAAGEEGTDMDAHPYVSTAYHSLPCTDDSTSTDELKLIGGLATNGRPAEFVRITKSGKAISCATGEIVEDYDEEMTGPLRFKRSMSQQAEDEEEIMRSMARRKKNATPEELAPKKCTHPGCNKEFKRPCDLTKHEKTHSRPWKCPFPTCKFHEYGWPTEKEMGRHVNDKHSSAPAMYECEFKPCPYKSKRESNCKQHMEKAHGWVYHRTKAPKKGSKASTSAKPTPLLNNLPTPSSDQSDSIMTPPDNAFFSTLDDNQSLFPTYPSTEEFNAELFENQPFDGELQLDFSPIDNSTPSTDAGQFYQELSPEFTGQFEDIYGAHVRLPTTPTYSLYNKTMPNAFNNNFTTSDMAPPMLAPQFSPSGHGNSMLYTPTSMVDVDEGFDDFQPVGDGQNGGDFTLFPSDNMGKPSNFEPAFFPGVTPSLAAGYTQPSSQDFNNIDFNNMDIDWSDLQTFP

SEQ ID NO: 9037 - DNA, 3499 bp, Muscodor strobelii; identical to SEQ ID NO: 9034
  misc_feature: SGI EST ID NO. CUFF.22778.0
  misc_feature: Variant of the nucleotide sequence at SEQ ID NO 9035

SEQ ID NO: 9038 - DNA, 948 bp, Muscodor strobelii
  misc_feature: SGI cDNA ID NO. 562809
  misc_feature: Reduced expression when VOC is produced
  misc_feature: Encodes the peptide sequence at SEQ ID NO 9039
atgatcaatctggatcatgatttcaaacacacgtgtatcttcgtctttgatagcacccgcctccgctctcacctcttcttccgctaccttagcacttcatctcaagttacccctatacttcatccctgggttgccgctgctatgtttggtcgtgagcatgtagcacagcatctacggcactcggagcttcggcagaaggagattgatgaagagctagcgcctttgataggaagcgatacttaccaaagctgtcgtgaatcattcacgaaggacgtagccgatgcacagagacgagggacgatccccgtggccaacgaacactggttcaatgtcctcagaatagaattggtacttggactaattcgtggggaaattgttgagccaagtcggcttggacgaaatccaactcatataccagatgagattttcgattcgctacaacctataatcctgattcgccatccagctttgtctatccatagcatttaccgcgatgcgttgaagataacgaagcagcgaccgggcgacgaggatttcgatttcatctgcatcaataaaccgttacggctcctgttcgattatttcagatccaagggtaggcaaccggttgttgtggatgccgaagacttgctttggcgaacagatgatttgacgaggaatatgtgtacgtcgctgggcatgatcgatgcagggagtttgggcgataagtgggagccggcgagcgaagaagaattggcgagcttgaatccgcttagggttatgttgacaaggaatattctcgagtcgagcggtattgagcggcccagtgaaaggcctcctgaaccgagtgttgagaagatgtctgtggaatggaaagagttgtatggtgattctgtcgccgactacctgaggaatctcgccgaagacaatatgccgcattacgaatatctcagccagttcaaagcatag

SEQ ID NO: 9039 - protein, 315 aa, Muscodor strobelii
  misc_feature: SGI Peptide ID NO. 562809
  misc_feature (18)..(310): NCBI GI: 256722378 Blast Desc: NECHADRAFT_17690 [Nectria haematococca mpVI 77-13-4]
  misc_feature (78)..(310): NCBI GI: 46115060 Blast Desc: FG03372.1 [Gibberella zeae PH-1]
  misc_feature (13)..(310): NCBI GI: 238837899 Blast Desc: conserved [Microsporum canis CBS 113480]
  misc_feature (80)..(310): NCBI GI: 169610617 Blast Desc: SNOG_08414 [Phaeosphaeria nodorum SN15] gi|160702111|gb|EAT84690.2| SNOG_08414 [Phaeosphaeria nodorum SN15]
  misc_feature (63)..(310): NCBI GI: 238842468 Blast Desc: conserved [Microsporum canis CBS 113480]
  misc_feature (127)..(310): NCBI GI: 238845399 Blast Desc: conserved [Microsporum canis CBS 113480]
  misc_feature (20)..(310): NCBI GI: 46118071 Blast Desc: FG04682.1 [Gibberella zeae PH-1]
  misc_feature (59)..(310): NCBI GI: 225680182 Blast Desc: conserved [Paracoccidioides brasiliensis Pb03]
  misc_feature (81)..(312): NCBI GI: 258574857 Blast Desc: [Uncinocarpus reesii 1704] gi|237901876|gb|EEP76277.1| [Uncinocarpus reesii 1704]
  misc_feature (59)..(310): NCBI GI: 226287819 Blast Desc: conserved [Paracoccidioides brasiliensis Pb18]
  misc_feature: Useful for introducing or modulating the production of volatile compounds
MINLDHDFKHTCIFVFDSTRLRSHLFFRYLSTSSQVTPILHPWVAAAMFGREHVAQHLRHSELRQKEIDEELAPLIGSDTYQSCRESFTKDVADAQRRGTIPVANEHWFNVLRIELVLGLIRGEIVEPSRLGRNPTHIPDEIFDSLQPIILIRHPALSIHSIYRDALKITKQRPGDEDFDFICINKPLRLLFDYFRSKGRQPVVVDAEDLLWRTDDLTRNMCTSLGMIDAGSLGDKWEPASEEELASLNPLRVMLTRNILESSGIERPSERPPEPSVEKMSVEWKELYGDSVADYLRNLAEDNMPHYEYLSQFKA

SEQ ID NO: 9040 - DNA, 1614 bp, Muscodor strobelii
  misc_feature: SGI cDNA ID NO. 562810
  misc_feature: Encodes the peptide sequence at SEQ ID NO 9041
atggagactcatgaaatggagggccatgccatgaagagccaaggcacggagatgcagcctatgatgaagacctctaccgccgaaggtaacatgcgttcctcagccgaggggcccgtatctgaaacgacatcgtggaataaaatgccaccagccagtcccggccatagcctttctccaatggatcccgacagccctatgtcatggccgttgtggaagaaatggtatacttcatttgtttccttctcctttgtctttgttattctatacggtacgaccacttactccgccgcgatacccgctatcatcgaaggactcggcgtctctcaacacactgccaatgtcggttttacgcttccattcttcggcgtcttcttcgctcctatatatactccccatataagtgagaagtacggacgtaaacctgtttacttcgtcagctttcctctgttccttcttgccgttgtcgtgataggtcttgccgaaaacgtatccacgcttctagcattccgtttccttgccggattgttcggcggaccttgtgtcgttctgatcgaaggtacctttgccgatgtctggtcggctgagacaaccgtcacatactattcgttcctaactctggcatcttattggggtgcggcattcggaccaatcgtcggcggatatgtccttagcaacaaagggatcccatggctttcctgggtcacactcctcttcggcatggccttcttagcattcggcgcagcaatgccggagacctacggacgagaaattctgcgcaagagacaccgctaccagcgaaccggtgttaaactgccagacgcgccaagcggtgtcacaatctcccagatgtcacgcttgacggtcttctcacccctcaaaatgattgtatgcgagcccatcgtcatcctcagtagtctccatctcggcctgaacttcgccgtcactttccagtggttcatctccgtgcccgccgctcttggtatggcatacaacttcagtgtcaaagcagccgggctcgcattcttctcggctgttgttggagcattactggcacttgtatgttcctgtgtcatcgagggtttggttgtttccggctccaagaagaaaagtgacatgggcccggctatcgaatcacgtctcatcggcggcatcttcggttccctgctgatcgtcgccgcactcttctgggttggttatactgcagacccgaaccatacttacatcacgcccatcataggtacagccttctatgtctggggcagcgctctgatcgtcatctcctatatctcctacctcttcgatgcgtacccgccacagggcactctgtcagcactcacagctgctgcttgcttccgtttagctgcggcggatattgttcccatcttcatcctcgatatgatcatgggcctcggcggtccatgggcatttggaacatttggggtcatcgccgcggtttttgtcctgttccctacgatcctatacatctttggcgcgcgtcttcgtgctcggagcccttataccgctcgcggtggtgctatgaacaccatggcgatggagatggctgcgagaaagaaggagatggaacatggcaatgatcgtatgatgtccgcttga

SEQ ID NO: 9041 - protein, 537 aa, Muscodor strobelii
  misc_feature: SGI Peptide ID NO. 562810
  misc_feature (80)..(460): Pfam Id: PF07690 Pfam Desc: Major Facilitator Superfamily
  misc_feature (80)..(438): Pfam Id: PF07690 Pfam Desc: Major Facilitator Superfamily
  misc_feature (40)..(519): NCBI GI: 256722368 Blast Desc: NECHADRAFT_44395 [Nectria haematococca mpVI 77-13-4]
  misc_feature (59)..(534): NCBI GI: 241958472 Blast Desc: polyamine transporter, ; transporter of Major Facilitator Superfamily (MFS), [Candida dubliniensis CD36] gi|223645300|emb|CAX39956.1| polyamine transporter, ; transporter
  misc_feature (59)..(537): NCBI GI: 68476897 Blast Desc: potential polyamine transporter [Candida albicans SC5314] gi|68477086|ref|XP_717336.1| potential polyamine transporter [Candida albicans SC5314] gi|46439045|gb|EAK98367.1|
  misc_feature (2)..(508): NCBI GI: 154300394 Blast Desc: BC1G_11386 [Botryotinia fuckeliana B05.10] gi|150856709|gb|EDN31901.1| BC1G_11386 [Botryotinia fuckeliana B05.10]
  misc_feature (57)..(506): NCBI GI: 242766458 Blast Desc: bicyclomycin resistance protein, [Talaromyces stipitatus ATCC 10500] gi|218724370|gb|EED23787.1| bicyclomycin resistance protein, [Talaromyces stipitatus ATCC 10500]
  misc_feature (58)..(506): NCBI GI: 255721281 Blast Desc: CTRG_00356 [Candida tropicalis MYA-3404] gi|240136064|gb|EER35617.1| CTRG_00356 [Candida tropicalis MYA-3404]
  misc_feature (31)..(506): NCBI GI: 254574352 Blast Desc: Polyamine transport protein, recognizes spermine, putrescine, and spermidine [Pichia pastoris GS115] gi|238034084|emb|CAY72106.1| Polyamine transport protein, and
  misc_feature (59)..(506): NCBI GI: 258568294 Blast Desc: [Uncinocarpus reesii 1704] gi|237906337|gb|EEP80738.1| [Uncinocarpus reesii 1704]
  misc_feature (59)..(506): NCBI GI: 156838564 Blast Desc: Kpol_413p2 [Vanderwaltozyma polyspora DSM 70294] gi|156113570|gb|EDO15127.1| Kpol_413p2 [Vanderwaltozyma polyspora DSM 70294]
  misc_feature (61)..(504): NCBI GI: 242797769 Blast Desc: conserved [Talaromyces stipitatus ATCC 10500] gi|218716375|gb|EED15796.1| conserved [Talaromyces stipitatus ATCC 10500]
METHEMEGHAMKSQGTEMQPMMKTSTAEGNMRSSAEGPVSETTSWNKMPPASPGHSLSPMDPDSPMSWPLWKKWYTSFVSFSFVFVILYGTTTYSAAIPAIIEGLGVSQHTANVGFTLPFFGVFFAPIYTPHISEKYGRKPVYFVSFPLFLLAVVVIGLAENVSTLLAFRFLAGLFGGPCVVLIEGTFADVWSAETTVTYYSFLTLASYWGAAFGPIVGGYVLSNKGIPWLSWVTLLFGMAFLAFGAAMPETYGREILRKRHRYQRTGVKLPDAPSGVTISQMSRLTVFSPLKMIVCEPIVILSSLHLGLNFAVTFQWFISVPAALGMAYNFSVKAAGLAFFSAVVGALLALVCSCVIEGLVVSGSKKKSDMGPAIESRLIGGIFGSLLIVAALFWVGYTADPNHTYITPIIGTAFYVWGSALIVISYISYLFDAYPPQGTLSALTAAACFRLAAADIVPIFILDMIMGLGGPWAFGTFGVIAAVFVLFPTILYIFGARLRARSPYTARGGAMNTMAMEMAARKKEMEHGNDRMMSA

SEQ ID NO: 9042 - DNA, 420 bp, Muscodor strobelii
  misc_feature: SGI EST ID NO. CUFF.21543.0
  misc_feature: Variant of the nucleotide sequence at SEQ ID NO 9040
cgtcacatactattcgttcctaactctggcatcttattggggtgcggcattcggaccaatcgtcggcggatatgtccttagcaacaaagggatcccatggctttcctgggtcacactcctcttcggcatggccttcttagcattcggcgcagcaatgccggagacctacggacgagaaattctgcgcaagagacaccgctaccagcgaaccggtgttaaactgccagacgcgccaagcggtgtcacaatctcccagatgtcacgcttgacggtcttctcacccctcaaaatgattgtatgcgagcccatcgtcatcctcagtagtctccatctcggcctgaacttcgccgtcactttccagtggttcatctccgtgcccgccgctcttggtatggcatacaacttcagtgtcaaagcagc

SEQ ID NO: 9043 - DNA, 909 bp, Muscodor strobelii
  misc_feature: SGI cDNA ID NO. 562811
  misc_feature: Encodes the peptide sequence at SEQ ID NO 9044
atgacgatgcgcagaccattcaccacgagctcccggtcttcgtcgctgttgctgctgctagccgtcgtcgtctgtttactgctgccgactgcccaggcctcgctcggcgacaggctacctgaattccgagaatgcgttaatgtctgccagcgcgagaattgcgatccgaacaacgatcctacgcccattccactcctccaccgcctcctgttttggacctgcacccaggaatgcgactacacatgccagcacatcatcacggcgaagcgactgaccgacgggcagcacatcacccagttccacgggaaatggcccttcgtccgcgccctcggcatgcaggagcccttctccgtcctcttcagcctcggcaacttcttcgcccaccgaaccggcctgtccaggctccgtgaacgcgtccccgtgagccatcccatgcgccattactacgtgctgttctcatacttcggcatggcgtcgtgggttgccagcaccgtcttccatacccgcgactttgtctggacagagcagctcgactacttcgccgccggcgccagcgtcctctacggcatgtactacagtcccctgtggcgctggaactacacctacaatatgacggccaacatgattgtgggcatggtgcataatctgctctggagctatttctcctggaagatgtggagggagacccgccaaagctgggccatttggcccggtgtgttggttggttgggtcatgctcgtaatgagcctcgagctcctagatttcccgcccttatttggcgcgatagatgctcactgtctgtggcatctggggaccatagggcctacaatcttgtggtataatttcatgatcaaagattcgctagaagccatggccaaggcgtccaaggacaaagacataaaagcatga

SEQ ID NO: 9044 - protein, 302 aa, Muscodor strobelii
  misc_feature: SGI Peptide ID NO. 562811
  misc_feature (61)..(298): Pfam Id: PF04080 Pfam Desc: Per1-like
  misc_feature (61)..(191): Pfam Id: PF04080 Pfam Desc: Per1-like
  misc_feature (198)..(286): Pfam Id: PF04080 Pfam Desc: Per1-like
  misc_feature (18)..(292): NCBI GI: 156062900 Blast Desc: SS1G_01566 [Sclerotinia sclerotiorum 1980] gi|154696902|gb|EDN96640.1| SS1G_01566 [Sclerotinia sclerotiorum 1980]
  misc_feature (32)..(298): NCBI GI: 261357495 Blast Desc: PER1 [Verticillium albo-atrum VaMs.102]
  misc_feature (8)..(298): NCBI GI: 46108512 Blast Desc: FG01138.1 [Gibberella zeae PH-1]
  misc_feature (5)..(281): NCBI GI: 164423354 Blast Desc: NCU08609 [Neurospora crassa OR74A] gi|157070056|gb|EAA35581.2| NCU08609 [Neurospora crassa OR74A]
  misc_feature (22)..(297): NCBI GI: 189204438 Blast Desc: Mn2+ homeostasis protein Per1 [Pyrenophora tritici-repentis Pt-1C-BFP] gi|187985653|gb|EDU51141.1| Mn2+ homeostasis protein Per1 [Pyrenophora tritici-repentis Pt-1C-BFP]
  misc_feature (8)..(292): NCBI GI: 240273680 Blast Desc: Mn2+ homeostasis protein [Ajellomyces capsulatus H143]
  misc_feature (36)..(292): NCBI GI: 154314780 Blast Desc: BC1G_04099 [Botryotinia fuckeliana B05.10] gi|150848721|gb|EDN23914.1| BC1G_04099 [Botryotinia fuckeliana B05.10]
  misc_feature (8)..(292): NCBI GI: 225556566 Blast Desc: PER1 precursor [Ajellomyces capsulatus G186AR]
  misc_feature (8)..(292): NCBI GI: 261194148 Blast Desc: Mn2+ homeostasis protein [Ajellomyces dermatitidis SLH14081] gi|239588493|gb|EEQ71136.1| Mn2+ homeostasis protein [Ajellomyces dermatitidis SLH14081] gi|239606946|gb|EEQ83933.1|
  misc_feature (26)..(291): NCBI GI: 258563616 Blast Desc: conserved [Uncinocarpus reesii 1704] gi|237908060|gb|EEP82461.1| conserved [Uncinocarpus reesii 1704]
MTMRRPFTTSSRSSSLLLLLAVVVCLLLPTAQASLGDRLPEFRECVNVCQRENCDPNNDPTPIPLLHRLLFWTCTQECDYTCQHIITAKRLTDGQHITQFHGKWPFVRALGMQEPFSVLFSLGNFFAHRTGLSRLRERVPVSHPMRHYYVLFSYFGMASWVASTVFHTRDFVWTEQLDYFAAGASVLYGMYYSPLWRWNYTYNMTANMIVGMVHNLLWSYFSWKMWRETRQSWAIWPGVLVGWVMLVMSLELLDFPPLFGAIDAHCLWHLGTIGPTILWYNFMIKDSLEAMAKASKDKDIKA

SEQ ID NO: 9045 - DNA, 2129 bp, Muscodor strobelii
  misc_feature: SGI EST ID NO. CUFF.21609.1
  misc_feature: Variant of the nucleotide sequence at SEQ ID NO 9043
gactggaacaagcgcagctaacaaaaggatttctcgtatttcacgttgtcagcatttcaaaacgctgctccagctgctccagtgtcggccgcgcattggttcagctctgaaacctcttgcaaatcatatggcgccgctgtgctggcattgggacaacatttcttgtctgtcccacctcgagaaaactttacagctgttctgccagtagctttcgggtagctttcgagtagctttcaaggcggcgacaggtagcggcacaagaccaatgccgacgacaagatgacgatgcgcagaccattcaccacgagctcccggtcttcgtcgctgttgctgctgctagccgtcgtcgtctgtttactgctgccgactgcccaggcctcgctcggcgacaggctacctgaattccgagaatgcgttaatgtctgccagcgcgagaattgcgatccgaacaacgatcctacgcccattccactcctccaccgcctcctgttttggacctgcacccaggaatgcgactacacatgccagcacatcatcacggcgaagcgactgaccgacgggcagcacatcacccagttccacgggaaatggcccttcgtccgcgccctcggcatgcaggagcccttctccgtcctcttcagcctcggcaacttcttcgcccaccgaaccggcctgtccaggctccgtgaacgcgtccccgtgagccatcccatgcgccattactacgtgctgttctcatacttcggcatggcgtcgtgggttgccagcaccgtcttccatacccgcgactttgtctggacagagcagctcgactacttcgccgccggcgccagcgtcctctacggcatgtactacagtcccgtccgtgtctttcgcctcgaccgccagaccccacaccgcagatccattctccgcctgtggaccgtccttctgctgtgccttgtatgttggccacgtcgcctatcttaagctgtggcgctggaactacacctacaatatgacggccaacatgattgtgggcatggtgcataatctgctctggagctatttctcctggaagatgtggagggagacccgccaaagctgggccatttggcccggtgtgttggttggttgggtcatgctcgtaatgagcctcgagctcctagatttcccgcccttatttggcgcgatagatgctcactgtctgtggcatctggggaccatagggcctacaatcttgtggtataatttcatgatcaaagattcgctagaagccatggccaaggcgtccaaggacaaagacataaaagcatgataggtagagctaataatcatcaaggaccgctagtgtaataaatctattgatagaatcgtacgagacaacgcgggctagaactgttacccccatatagcgctgtagggagaactgcaacttgtgggcaaatagttcactcacataatcggaggcatcgtcacagaaaagcaagataactttacgagtgttatatagacaagagtatagtattatataaaactaaaactcgagaaccaaaccgttcagaagcctatcatcctgccgatcaacccttcccacgcgtctccgtaatcttgataaagcctaagaatctatatcgagtcagcaagatgtccccacaaagcatcttcataaaaacaaggataagtctctcaaagcatcaaatatcagaaaccagataaatataagcacaacacattccccacctcccacaccgcgccgcaccttcaatccctactccccgactcccaagcggcagcacgtgacgatgcacagcacgaggtcgtcgagtttggggtattggggcgaacattgacgaatggggaagcctaggagctcgcctcatgtcccgaagaacatgagacggagctcgaggacggtctcatacggctcttcctataagattgtagtaggttggacacggatgtgtcggagtcatcattttggtgggcttgagagggcagtatgacgggaatggggagcttacgtttggtgatgagttggatgtagaggttttgctaggagatcgttaggatatggtttggtgtgtcttgagatttacattcaggtctcctggtagagggatgtggaagtgtggtaaagatttatttgg

SEQ ID NO: 9046 - DNA, 1251 bp, Muscodor strobelii
  misc_feature: SGI cDNA ID NO. 562812
  misc_feature: Encodes the peptide sequence at SEQ ID NO 9047
atgccttccctcatgaaagcctgctcagcgctcctagccgccaccggccttgcaatagccactccatgcaagtcaccacacaagcaattgtcaccggtaacgagggacggctcaaaacttcttgtcgatggcgaggagtggaaggcagtcggtccaaatatctactggcttggcctagacgaaaatgtaatcccacccgctggcgagccgttctatgctccaacaaatgccagctatccaacgaaagagcgaatcactgaggaaatggccgttgtgaaggctctgggaggaactatgattcgcggtcacacattaggcataagtgttggcaatccattaagtgtgtggccggaacccggcaaagtgaatgaggaggctttcgattccatcgactgggctgtctaccaagcaggccaatacggcgttcggctcatggtccctctggttgataactatgactactaccacggcggaaaatacactttcttgcgctgggctggcttcaacctcacccagactagagacagcaataaccccgaaatacagcagttttacactaatgctgagatcatcgcgaccttcaaggactatgtcaagactatgttgacgcacagaaataagtacaataaccttacatatgcggaggacccgactatattcgcatacgagtctggaaacgaattgctaggtcccgtttggggcgatcagaattgtcccgtcagctggattaaggatattgcacaatacgtcaagagcctggctccaaagaaattatttcttgatggaacttatggtgtgaacaagacgcacttggatattgacgaggtcgacatcttctcaaatcacttctacccgcccaatgtcactatcctacaatctgacatcgagaaagtcaagagtgctggcaaagtgtattttgccggcgagtatgactgggtaggtaaatccggtggcgattcgctcgagtctttcttcaaagtgctggaggagagttctggtgttggtggggatatgttctggagtctattcgggcataatgcgccggattgcaagacattcgtcagtcataacgatggcttcgcgatgcagtatggcaatcccgacaacactgcctatacggatcaaagaattcaacttatcaggaagcatttcattgccatgagccaaggaagatcaatatcctctaatgagacgttgcctgctgtttcttgtcctgcttcgccaccgcggagaaggcatcagctttattag

SEQ ID NO: 9047 - protein, 416 aa, Muscodor strobelii
  misc_feature: SGI Peptide ID NO. 562812
  misc_feature (19)..(414): NCBI GI: 251794709 Blast Desc: Mannan endo-1,4-beta-mannosidase [Paenibacillus sp. JDR-2] gi|247542335|gb|ACS99353.1| Mannan endo-1,4-beta-mannosidase [Paenibacillus sp. JDR-2]
  misc_feature (33)..(408): NCBI GI: 253576265 Blast Desc: fibronectin type III domain-containing protein [Paenibacillus sp. oral taxon 786 str. D14] gi|251844392|gb|EES72409.1| fibronectin type III protein sp. oral
  misc_feature (5)..(364): NCBI GI: 168027441 Blast Desc: [Physcomitrella patens subsp. patens] gi|162682452|gb|EDQ68870.1| [Physcomitrella patens subsp. patens]
  misc_feature (16)..(346): NCBI GI: 251794715 Blast Desc: S-layer domain protein [Paenibacillus sp. JDR-2] gi|247542341|gb|ACS99359.1| S-layer domain protein [Paenibacillus sp. JDR-2]
  misc_feature (33)..(293): NCBI GI: 30678275 Blast Desc: glycosyl hydrolase family protein 5 / cellulase family protein / (1-4)-beta-mannan endohydrolase, [Arabidopsis thaliana] gi|75263247|sp|Q9FZ29.1|MAN1_ARATH RecName: Full=Mannan 1; 1; 1;
  misc_feature (80)..(347): NCBI GI: 253576250 Blast Desc: S-layer domain-containing protein [Paenibacillus sp. oral taxon 786 str. D14] gi|251844377|gb|EES72394.1| S-layer domain-containing protein [Paenibacillus sp. oral taxon 786 str.
  misc_feature (27)..(265): NCBI GI: 15241093 Blast Desc: (1-4)-beta-mannan endohydrolase, [Arabidopsis thaliana] gi|75264487|sp|Q9LZV3.1|MAN6_ARATH RecName: Full=Mannan endo-1,4-beta-mannosidase 6; AltName: Full=Beta-mannanase 6; 6;
  misc_feature (33)..(362): NCBI GI: 225439721 Blast Desc: [Vitis vinifera]
  misc_feature (89)..(359): NCBI GI: 149394737 Blast Desc: endo-beta-mannanase [Metopus es]
  misc_feature (7)..(265): NCBI GI: 118488294 Blast Desc: [Populus trichocarpa]
  misc_feature (33)..(293): SWISSPROT Homolog: EC 3.2.1.78 Mannan endo-1,4-beta-mannosidase
MPSLMKACSALLAATGLAIATPCKSPHKQLSPVTRDGSKLLVDGEEWKAVGPNIYWLGLDENVIPPAGEPFYAPTNASYPTKERITEEMAVVKALGGTMIRGHTLGISVGNPLSVWPEPGKVNEEAFDSIDWAVYQAGQYGVRLMVPLVDNYDYYHGGKYTFLRWAGFNLTQTRDSNNPEIQQFYTNAEIIATFKDYVKTMLTHRNKYNNLTYAEDPTIFAYESGNELLGPVWGDQNCPVSWIKDIAQYVKSLAPKKLFLDGTYGVNKTHLDIDEVDIFSNHFYPPNVTILQSDIEKVKSAGKVYFAGEYDWVGKSGGDSLESFFKVLEESSGVGGDMFWSLFGHNAPDCKTFVSHNDGFAMQYGNPDNTAYTDQRIQLIRKHFIAMSQGRSISSNETLPAVSCPASPPRRRHQLY

SEQ ID NO: 9048 - DNA, 790 bp, Muscodor strobelii
  misc_feature: SGI EST ID NO. CUFF.21564.0
  misc_feature: Variant of the nucleotide sequence at SEQ ID NO 9046
cgcatacgagtctggaaacgaattgctaggtcccgtttggggcgatcagaattgtcccgtcagctggattaaggatattgcacaatacgtcaagagcctggctccaaagaaattatttcttgatggaacttatggtgtgaacaagacgcacttggatattgacgaggtcgacatcttctcaaatcacttctacccgcccaatgtcactatcctacaatctgacatcgagaaagtcaagagtgctggcaaagtgtattttgccggcgagtatgactgggtaggtaaatccggtggcgattcgctcgagtctttcttcaaagtgctggaggagagttctggtgttggtggggatatgttctggagtctattcgggcataatgcgccggattgcaagacattcgtcagtcataacgatggcttcgcgatgcagtatggcaatcccgacaacactgcctatacggatcaaagaattcaacttatcaggaagcatttcattgccatgagccaaggaagatcaatatcctctaatgagacgttgcctgctgtttcttgtcctgcttcgccaccgcggagaaggcatcagctttattagatcataagaagatcactgttgaaaatcaatcatatgaagaaactgtgtttacccttggccgtgtatgcgagtacgaatacaggataatgacactgccaatatcatcaggcagtggcctagtactctttatctcgactaaagaaagcacgttgtaagccaattttttgttacaacggttgtcaatctgatctctcgaat

SEQ ID NO: 9049 - DNA, 1623 bp, Muscodor strobelii
  misc_feature: SGI cDNA ID NO. 562813
  misc_feature: Encodes the peptide sequence at SEQ ID NO 9050
atggatcgagacgccatcatcgcagcttccaagaagcacgacatcgtagccggcaggatctacaaatatgggaccgccggtttccgcatgaatgccgaccttctcgatggagtcacatttcgggtcggcctgttggcggccctgcgaacccgcaagctcaatggccaagctatcggcgtaatggtcaccgcaagtcacaaccccgccgtcgataacggtgtcaagattgtcgatcccatgggcgatatgcttgaacaggactgggaggctttcgcaaccgacctcgtcaatgccccgagccacgaagagcttgtcgactacttcctgaagctagccgaaacactcaagatcgacctatcttctcccggtcaggttattgccggcagagatacccgaccttcgggtatcacgcttgtgacctctctcgccgactctctcgccgccaccaataccaaatataccgactacaagattctcaccactccgcagctccactatttgactcgttgcgtcaatactgccaacactcccggtgcttacggagaggtcagtgaatctggctactacaataagctagtcgaagccttctaccgcgctctgcgtgggcgcaaggtcaccggaggtttaaccgtggactgtgccaatggcgtcggaggtcccaagttgactgagtttttgaagcgtcttgactctcagaagacagggttgaatgtcagggtagtcaatgatgatgtgctccgaccagaagtcctgaaccttgattgtggtgcggatttcgtcaagaccaaacagcgagccccaccaaaccccaagccagcagctggggaacgatggtgttcactcgatggcgatgctgatcgcctcatttactactgggttgaccctgatactggattcttcatgttggatggcgaccgcattgccacgcttgctgcttcgttcattgccgaccttttcaggacagccggattggatggtcaactccgaattggtgtcatccagactgcctatgcgaacggtgccagtacgaaatacgtggagcaacacctgcagctgcctgttgtctgcacgcccactggtgtcaagcatttgcatcatgcggcatgtgcatttgacatcggtgtctacttcgaggctaatggtcacggtactgtactgttttcgtcagatgccgtgcagactttcaagaccaaggagccccaatctcctgctcagaaggacgccctggatgtccttagcgccttagctgatctaatcaaccagaccgtaggagacgctatctctgacatgctcatggtcgaagtcattcttgctcacaaagcgtggacaatgaaagactgggcactgacttaccaagaccttccaaaccgacttgttcgcgtcgaggttggtaacaaggatctgttccagacgaccgatgcggaacggaagctcagccatcctgctggctgtcagaatgaaattgaccaatgcgtcaagaaatacaccaatgcgcgctcgttcgcgcgtgctagcggtaccgagaatgcttgccgtgtgtacgctgaggccgctacgaggtcagaagcagatgagcttgcgaataaagtttctaccattataaagcagcatggcggagcctga

SEQ ID NO: 9050 - protein, 540 aa, Muscodor strobelii
  misc_feature: SGI Peptide ID NO. 562813
  misc_feature (50)..(81): Pfam Id: PF02878 Pfam Desc: Phosphoglucomutase/phosphomannomutase, alpha/beta/alpha domain I
  misc_feature (1)..(538): NCBI GI: 46108502 Blast Desc: FG01133.1 [Gibberella zeae PH-1]
  misc_feature (6)..(538): NCBI GI: 256735101 Blast Desc: [Nectria haematococca mpVI 77-13-4]
  misc_feature (6)..(539): NCBI GI: 164424232 Blast Desc: NCU07458 [Neurospora crassa OR74A] gi|157070430|gb|EAA34673.2| NCU07458 [Neurospora crassa OR74A]
  misc_feature (6)..(540): NCBI GI: 145614558 Blast Desc: MGG_11383 [Magnaporthe grisea 70-15] gi|145021467|gb|EDK05596.1| MGG_11383 [Magnaporthe grisea 70-15]
  misc_feature (5)..(533): NCBI GI: 116180798 Blast Desc: CHGG_01027 [Chaetomium globosum CBS 148.51] gi|88185324|gb|EAQ92792.1| CHGG_01027 [Chaetomium globosum CBS 148.51]
  misc_feature (6)..(538): NCBI GI: 156062932 Blast Desc: SS1G_01582 [Sclerotinia sclerotiorum 1980] gi|154696918|gb|EDN96656.1| SS1G_01582 [Sclerotinia sclerotiorum 1980]
  misc_feature (4)..(455): NCBI GI: 171687413 Blast Desc: protein product [Podospora anserina] gi|170943668|emb|CAP69320.1| protein product [Podospora anserina]
  misc_feature (1)..(538): NCBI GI: 154284446 Blast Desc: HCAG_00064 [Ajellomyces capsulatus NAm1] gi|150406659|gb|EDN02200.1| HCAG_00064 [Ajellomyces capsulatus NAm1]
  misc_feature (5)..(538): NCBI GI: 212526916 Blast Desc: N-acetylglucosamine-phosphate mutase [Penicillium marneffei ATCC 18224] gi|210073013|gb|EEA27100.1| N-acetylglucosamine-phosphate mutase [Penicillium marneffei ATCC
  misc_feature (1)..(538): NCBI GI: 261194146 Blast Desc: N-acetylglucosamine-phosphate mutase [Ajellomyces dermatitidis SLH14081] gi|239588492|gb|EEQ71135.1| N-acetylglucosamine-phosphate mutase [Ajellomyces dermatitidis
  misc_feature (13)..(535): SWISSPROT Homolog: EC 5.4.2.3 Phosphoacetylglucosamine mutase
MDRDAIIAASKKHDIVAGRIYKYGTAGFRMNADLLDGVTFRVGLLAALRTRKLNGQAIGVMVTASHNPAVDNGVKIVDPMGDMLEQDWEAFATDLVNAPSHEELVDYFLKLAETLKIDLSSPGQVIAGRDTRPSGITLVTSLADSLAATNTKYTDYKILTTPQLHYLTRCVNTANTPGAYGEVSESGYYNKLVEAFYRALRGRKVTGGLTVDCANGVGGPKLTEFLKRLDSQKTGLNVRVVNDDVLRPEVLNLDCGADFVKTKQRAPPNPKPAAGERWCSLDGDADRLIYYWVDPDTGFFMLDGDRIATLAASFIADLFRTAGLDGQLRIGVIQTAYANGASTKYVEQHLQLPVVCTPTGVKHLHHAACAFDIGVYFEANGHGTVLFSSDAVQTFKTKEPQSPAQKDALDVLSALADLINQTVGDAISDMLMVEVILAHKAWTMKDWALTYQDLPNRLVRVEVGNKDLFQTTDAERKLSHPAGCQNEIDQCVKKYTNARSFARASGTENACRVYAEAATRSEADELANKVSTIIKQHGGA

SEQ ID NO: 9051 - DNA, 2675 bp, Muscodor strobelii
  misc_feature: SGI EST ID NO. CUFF.21636.1
  misc_feature: Variant of the nucleotide sequence at SEQ ID NO 9049
caaagaactactctgcttgcctcgccctggaccccctggatctccccactacagcagatagcgacccttgccagcggccacaacccacgtcatgcagcatagattgatggtatttttaatcgtttagctccagcaggggtccatttccgctggcacagcaaataaatcgggcggacaggcgcggggctactagaggcgaagacgtcggtacacaatctattgccatgtggataggtgcctcatctgctcttaacaagtcaacaattctattacttgactttgtttctaaagctcaaagaagtaggcaagagcaaattggaaagttgtcgaaaaaccagatcgtcacagtatttcagatcttcgtagacgaagatcacgcccaagaaggcgtctggcggaaaatgggtcgaggaggagggggcggggtgagtgagcaagtggcggggctgtgactgcgtacaggcgcgacagaatgcaaaatgcagggcacatgaggtgaaggtgtggacaaatgccttcgtattgatatccacgtttcaagttctaggttagtatgtgtaatctggcttaaggccttgcgggcatcttcatccattcaggaacccgaccagagagaatcattgccccgtcggccctgaccgcccatctttttaattctcacgtccggcgcttttgttttcgtctttcctcgcttcttcctattcacctgtccagtctgcacgtcttgtccatcgtgccggtgagccttacccaatccagaaatttataggtacctagcaagatcgccacccgtgctgaaaagccacgctgctcatcatggatcgagacgccatcatcgcagcttccaagaagcacgacatcgtagccggcaggatctacaaatatgggaccgccggtttccgcatgaatgccgaccttctcgatggagtcacatttcgggtcggcctgttggcggccctgcgaacccgcaagctcaatggccaagctatcggcgtaatggtcaccgcaagtcacaaccccgccgtcgataacggtgtcaagattgtcgatcccatgggcgatatgcttgaacaggactgggaggctttcgcaaccgacctcgtcaatgccccgagccacgaagagcttgtcgactacttcctgaagctagccgaaacactcaagatcgacctatcttctcccggtcaggttattgccggcagagatacccgaccttcgggtatcacgcttgtgacctctctcgccgactctctcgccgccaccaataccaaatataccgactacaagattctcaccactccgcagctccactatttgactcgttgcgtcaatactgccaacactcccggtgcttacggagaggtcagtgaatctggctactacaataagctagtcgaagccttctaccgcgctctgcgtgggcgcaaggtcaccggaggtttaaccgtggactgtgccaatggcgtcggaggtcccaagttgactgagtttttgaagcgtcttgactctcagaagacagggttgaatgtcagggtagtcaatgatgatgtgctccgaccagaagtcctgaaccttgattgtggtgcggatttcgtcaagaccaaacagcgagccccaccaaaccccaagccagcagctggggaacgatggtgttcactcgatggcgatgctgatcgcctcatttactactgggttgaccctgatactggattcttcatgttggatggcgaccgcattgccacgcttgctgcttcgttcattgccgaccttttcaggacagccggattggatggtcaactccgaattggtgtcatccagactgcctatgcgaacggtgccagtacgaaatacgtggagcaacacctgcagctgcctgttgtctgcacgcccactggtgtcaagcatttgcatcatgcggcatgtgcatttgacatcggtgtctacttcgaggctaatggtcacggtactgtactgttttcgtcagatgccgtgcagactttcaagaccaaggagccccaatctcctgctcagaaggacgccctggatgtccttagcgccttagctgatctaatcaaccagaccgtaggagacgctatctctgacatgctcatggtcgaagtcattcttgctcacaaagcgtggacaatgaaagactgggcactgacttaccaagaccttccaaaccgacttgttcgcgtcgaggttggtaacaaggatctgttccagacgaccgatgcggaacggaagctcagccatcctgctggctgtcagaatgaaattgaccaatgcgtcaagaaatacaccaatgcgcgctcgttcgcgcgtgctagcggtaccgagaatgcttgccgtgtgtacgctgaggccgctacgaggtcagaagcagatgagcttgcgaataaagtttctaccattataaagcagcatggcggagcctgaaaggcccgcgacggccactggagagcgactgtaggagatttttacgagtcatgaccaccaaaagttgagagaaggattatgatttggccaataagactggcaaaaagctgtttgcagcattgcgaaaaataaatcaaattcatcaataattcaaagagctgtctcttcgtgaaatgattgcgttgcctcgatcgtccacaattgttgtaatttcgtaactttacagagccatgaat

SEQ ID NO: 9052 - DNA, 1758 bp, Muscodor strobelii
  misc_feature: SGI cDNA ID NO. 562814
  misc_feature: Encodes the peptide sequence at SEQ ID NO 9053
atgccttcagaggaagagccctgcgcaaacccgcttcttcttggctgggtgaaggaatgggtcgacctcgcccgagagcgcaactccaaaggtgtgacaacctacaagaatgcctacaatgccttgaacgcctgtccgataacttttaatcacccatctcaattgcagcaactcaaaggctttggtcctaagctatgtgatcgcttgaccgacaaactacaaaagcattgccaagagaatggcttgcctatgcctaagcggccgcgccagtggcgcataccaggcctcaatgatcaagaagaagatgaggatgaacaacagcggagaccggcgaagaaggcaaggaagccaaagccgtatgttccagctcttcggtccggcgcatatgccctaattcttgggcttgcatctcgcggcatggatgcttctatcagcatgacaaaggctcagctcatcgaggttgcacaacctcattgcgattcttctttcacggccccgagtgatccatcgaaattctatacggcgtggagttccatgaggacactgatagacaaggacttggtttatgaacgaggtcggccgctgagaaagtactctttgtccgacgaagggtgggaggtagcccaacggatacagcagacggccagtcttactccagcagaactggctaatatgtctagacaacaacaaacctcagctgaactcatcgcgcagcctcggaatgtgacccgatcaccatctgtcgagatagagcaagccgctccgcagctaacgtcaagttacgcaggcatcgttgctgatggagatacggccccgggggattcagcattgcccaattttagacctattcggctagctccgggaacgttcacagtgcaactcgtcttggatgtacgtgaagttagggcaaagactgatcgggattacatgcaacaggagctcgccaagaaaggtgttccgcccattatgcgagcccttgaactcggtgatgccctctgggttgcaaaatgtcacgaccccaacttcctttcccggacgggtgctgaaggtgacgagatagtgctggattggattgtggagagaaaacggctcgacgacttggttgggagcatcagagatggtcgatttcacgagcaaaaatttcgcctgaagagatctggtgtgaagaatgtgatatacatagtggaagagatgtcgatcgattccatgagcttctacaaaaacgaggaggcagtccaatctgccattgcttctacccaagtagttaatggctactttgtgaagaagacgcagaagatggatgatacgattcgctaccttaccagaatgactatgctgttaaaaaagcagtacgagagcaagtcattgctggtcataccgacaggcgtgctcaccgcaaagaactacctcccgctgctcgagcaccttcgagagaaagacccagctgttgggcattatatcagctatccggcgttcgcatctatggcatccaagtcagacatgatgacattgcgagatgtgtatctaaagatgttgatgtgtaccaagcaggttaccggcgaaaaagcaatcgagatccagaagaggtggaaaacgccatacgagtttgccaaggcatttgataagttggggaataccgaagagggaaagaaacaaaaaaaggatttggtatttggtcagatggggaactcggttggacggaagaagatcgccaaaacattgagccacaagatcgcagaagtttggagcgacgtttga

SEQ ID NO: 9053 - protein, 585 aa, Muscodor strobelii
  misc_feature: SGI Peptide ID NO. 562814
  misc_feature (293)..(399): Pfam Id: PF02732 Pfam Desc: ERCC4 domain
  misc_feature (3)..(585): NCBI GI: 261357496 Blast Desc: crossover junction endonuclease MUS81 [Verticillium albo-atrum VaMs.102]
  misc_feature (9)..(585): NCBI GI: 46108500 Blast Desc: FG01132.1 [Gibberella zeae PH-1] gi|88909228|sp|Q4INS6.1|MUS81_GIBZE RecName: Full=Crossover junction endonuclease MUS81
  misc_feature (5)..(585): NCBI GI: 116180800 Blast Desc: CHGG_01028 [Chaetomium globosum CBS 148.51] gi|88185325|gb|EAQ92793.1| CHGG_01028 [Chaetomium globosum CBS 148.51]
  misc_feature (3)..(585): NCBI GI: 39945206 Blast Desc: MGG_04585 [Magnaporthe grisea 70-15] gi|145021466|gb|EDK05595.1| MGG_04585 [Magnaporthe grisea 70-15]
  misc_feature (6)..(582): NCBI GI: 119491132 Blast Desc: DNA repair protein Mus81, [Neosartorya fischeri NRRL 181] gi|119411348|gb|EAW21291.1| DNA repair protein Mus81, [Neosartorya fischeri NRRL 181]
  misc_feature (6)..(584): NCBI GI: 238489755 Blast Desc: DNA repair protein Mus81, [Aspergillus flavus NRRL3357] gi|220698503|gb|EED54843.1| DNA repair protein Mus81, [Aspergillus flavus NRRL3357]
  misc_feature (6)..(582): NCBI GI: 159127361 Blast Desc: DNA repair protein Mus81, [Aspergillus fumigatus A1163]
  misc_feature (6)..(582): NCBI GI: 70999249 Blast Desc: DNA repair protein Mus81 [Aspergillus fumigatus Af293] gi|74674526|sp|Q4WYE5.1|MUS81_ASPFU RecName: Full=Crossover junction endonuclease mus81 gi|66851983|gb|EAL92308.1| DNA repair
  misc_feature (6)..(584): NCBI GI: 169763800 Blast Desc: [Aspergillus oryzae RIB40] gi|83770828|dbj|BAE60961.1| protein product [Aspergillus oryzae]
  misc_feature (6)..(584): NCBI GI: 255942365 Blast Desc: Pc18g01050 [Penicillium chrysogenum Wisconsin 54-1255] gi|211586684|emb|CAP94329.1| Pc18g01050 [Penicillium chrysogenum Wisconsin 54-1255]
MPSEEEPCANPLLLGWVKEWVDLARERNSKGVTTYKNAYNALNACPITFNHPSQLQQLKGFGPKLCDRLTDKLQKHCQENGLPMPKRPRQWRIPGLNDQEEDEDEQQRRPAKKARKPKPYVPALRSGAYALILGLASRGMDASISMTKAQLIEVAQPHCDSSFTAPSDPSKFYTAWSSMRTLIDKDLVYERGRPLRKYSLSDEGWEVAQRIQQTASLTPAELANMSRQQQTSAELIAQPRNVTRSPSVEIEQAAPQLTSSYAGIVADGDTAPGDSALPNFRPIRLAPGTFTVQLVLDVREVRAKTDRDYMQQELAKKGVPPIMRALELGDALWVAKCHDPNFLSRTGAEGDEIVLDWIVERKRLDDLVGSIRDGRFHEQKFRLKRSGVKNVIYIVEEMSIDSMSFYKNEEAVQSAIASTQVVNGYFVKKTQKMDDTIRYLTRMTMLLKKQYESKSLLVIPTGVLTAKNYLPLLEHLREKDPAVGHYISYPAFASMASKSDMMTLRDVYLKMLMCTKQVTGEKAIEIQKRWKTPYEFAKAFDKLGNTEEGKKQKKDLVFGQMGNSVGRKKIAKTLSHKIAEVWSDV

SEQ ID NO: 9054 - DNA, 2916 bp, Muscodor strobelii
  misc_feature: SGI EST ID NO. CUFF.21628.0
  misc_feature: Variant of the nucleotide sequence at SEQ ID NO 9052
cacgagccaagcaccagcccggggttcggagccgatgtgcttcgtgtgcttctcaccattgcttaatttgcattcaactgctctatcgattcttggacacctgccctgaaatgccttcagaggaagagccctgcgcaaacccgcttcttcttggctgggtgaaggaatgggtcgacctcgcccgagagcgcaactccaaaggtgtgacaacctacaagaatgcctacaatgccttgaacgcctgtccgataacttttaatcacccatctcaattgcagcaactcaaaggctttggtcctaagctatgtgatcgcttgaccgacaaactacaaaagcattgccaagagaatggcttgcctatgcctaagcggccgcgccagtggcgcataccaggcctcaatgatcaagaagaagatgaggatgaacaacagcggagaccggcgaagaaggcaaggaagccaaagccgtatgttccagctcttcggtccggcgcatatgccctaattcttgggcttgcatctcgcggcatggatgcttctatcagcatgacaaaggctcagctcatcgaggttgcacaacctcattgcgattcttctttcacggccccgagtgatccatcgaaattctatacggcgtggagttccatgaggacactgatagacaaggacttggtttatgaacgaggtcggccgctgagaaagtactctttgtccgacgaagggtgggaggtagcccaacggatacagcagacggccagtcttactccagcagaactggctaatatgtctagacaacaacaaacctcagctgaactcatcgcgcagcctcggaatgtgacccgatcaccatctgtcgagatagagcaagccgctccgcagctaacgtcaagttacgcaggcatcgttgctgatggagatacggccccgggggattcagcattgcccaattttagacctattcggctagctccgggaacgttcacagtgcaactcgtcttggatgtacgtgaagttagggcaaagactgatcgggattacatgcaacaggagctcgccaagaaaggtgttccgcccattatgcgagcccttgaactcggtgatgccctctgggttgcaaaatgtcacgaccccaacttcctttcccggacgggtgctgaaggtgacgagatagtgctggattggattgtggagagaaaacggctcgacgacttggttgggagcatcagagatggtcgatttcacgagcaaaaatttcgcctgaagagatctggtgtgaagaatgtgatatacatagtggaagagatgtcgatcgattccatgagcttctacaaaaacgaggaggcagtccaatctgccattgcttctacccaagtagttaatggctactttgtgaagaagacgcagaagatggatgatacgattcgctaccttaccagaatgactatgctgttaaaaaagcagtacgagagcaagtcattgctggtcataccgacaggcgtgctcaccgcaaagaactacctcccgctgctcgagcaccttcgagagaaagacccagctgttgggcattatatcagctatccggcgttcgcatctatggcatccaagtcagacatgatgacattgcgagatgtgtatctaaagatgttgatgtgtaccaagcaggttaccggcgaaaaagcaatcgagatccagaagaggtggaaaacgccatacgagtttgccaaggcatttgataagttggggaataccgaagagggaaagaaacaaaaaaaggatttggtatttggtcagatggggaactcggttggacggaagaagatcgccaaaacattgagccacaagatcgcagaagtttggagcgacgtttgacccataggaatccactatggcatgagactttatgtctcattgtattgtctatatgaacgtattgtcaagtatagcagctcgtcggacaggagaatccactagagtatgcttccttcaacttctcaaccagcgtcaaggtcatgacgaagacccgtgtgctcccatagcttgcgcaatgatgttctgtaccattttctcaatgactggcttgattaatgcatcgcctccgtgagctccaaggtaacccgccatgctcttctccgcgtatttagccaagacatcaacctcgacattgacgctctcgccgactttcttcttggccaaaacgactttctcctgtgtataggcgataagcatgacctcccaccacccttcgtcatcattcacctgcgtgatcgtcaagctcgtgccatcaagtgcgataaaccccttatgcactacatagcgcatcacggctgccctctgagcgtcccgtggctggaatcggaacgtcaccgcgttgccgtcggccgcaatattgatgatctcggcggtggtgtcgacatgcccttgtacaaagtgcccgcccattcgagtatcagcccgcacagcgcgctcaagattcacgcgcgagtcctgcttcagcgcgcctagattcgtgaggcgcagcgtctcgggcgctatgccgactttaaagctcggctgtgcaccagcagtgaccagctccgtcgctgtcaaacagacaccgtttatggcgatgctgtcgccgagaatagcatcggtcagaagtttagactcagccggtagcgaaatggtcaatgaggtgccgcctgtctcgtcattggaattaagctccgagacagctgtagtggggttagctgggagtcatttgagaaagacacatgctttcggtgggctgtcgcttaggacttacttccgatctcttcaactaatccggtaaacatgtttctatatctatggacagagaatataatcgaagtttgacaaattggtgttaccaggttctataaatgagcagactagagttgaccgggttgtgccgaaaaag

SEQ ID NO: 9055 - DNA, 432 bp, Muscodor strobelii
  misc_feature: SGI cDNA ID NO. 562815
  misc_feature: Encodes the peptide sequence at SEQ ID NO 9056
atgggcgggcactttgtacaagggcatgtcgacaccaccgccgagatcatcaatattgcggccgacggcaacgcggtgacgttccgattccagccacgggacgctcagagggcagccgtgatgcgctatgtagtgcataaggggtttatcgcacttgatggcacgagcttgacgatcacgcaggtgaatgatgacgaagggtggtgggaggtcatgcttatcgcctatacacaggagaaagtcgttttggccaagaagaaagtcggcgagagcgtcaatgtcgaggttgatgtcttggctaaatacgcggagaagagcatggcgggttaccttggagctcacggaggcgatgcattaatcaagccagtcattgagaaaatggtacagaacatcattgcgcaagctatgggagcacacgggtcttcgtcatga

SEQ ID NO: 9056 - protein, 143 aa, Muscodor strobelii
  misc_feature: SGI Peptide ID NO. 562815
  misc_feature (7)..(97): Pfam Id: PF00677 Pfam Desc: Lumazine binding domain
  misc_feature (1)..(138): NCBI GI: 256735117 Blast Desc: expressed protein [Nectria haematococca mpVI 77-13-4]
  misc_feature (1)..(138): NCBI GI: 46108498 Blast Desc: FG01131.1 [Gibberella zeae PH-1]
  misc_feature (1)..(134): NCBI GI: 171687409 Blast Desc: protein product [Podospora anserina] gi|170943666|emb|CAP69318.1| protein product [Podospora anserina]
  misc_feature (1)..(136): NCBI GI: 85111377 Blast Desc: riboflavin synthase alpha chain [Neurospora crassa OR74A] gi|28925656|gb|EAA34671.1| riboflavin synthase alpha chain [Neurospora crassa OR74A]
  misc_feature (1)..(113): NCBI GI: 39945208 Blast Desc: MGG_04586 [Magnaporthe grisea 70-15] gi|145021465|gb|EDK05594.1| MGG_04586 [Magnaporthe grisea 70-15]
  misc_feature (1)..(140): NCBI GI: 238838152 Blast Desc: riboflavin synthase alpha chain [Microsporum canis CBS 113480]
  misc_feature (1)..(140): NCBI GI: 169599402 Blast Desc: SNOG_02521 [Phaeosphaeria nodorum SN15] gi|111069613|gb|EAT90733.1| SNOG_02521 [Phaeosphaeria nodorum SN15]
  misc_feature (1)..(140): NCBI GI: 189204950 Blast Desc: riboflavin synthase alpha chain [Pyrenophora tritici-repentis Pt-1C-BFP] gi|187985909|gb|EDU51397.1| riboflavin synthase alpha chain [Pyrenophora tritici-repentis
  misc_feature (1)..(141): NCBI GI: 239606950 Blast Desc: riboflavin synthase subunit alpha [Ajellomyces dermatitidis ER-3]
  misc_feature (1)..(136): NCBI GI: 240273675 Blast Desc: riboflavin synthase [Ajellomyces capsulatus H143]
  misc_feature (1)..(111): SWISSPROT Homolog: EC 2.5.1.9 Riboflavin synthase
MGGHFVQGHVDTTAEIINIAADGNAVTFRFQPRDAQRAAVMRYVVHKGFIALDGTSLTITQVNDDEGWWEVMLIAYTQEKVVLAKKKVGESVNVEVDVLAKYAEKSMAGYLGAHGGDALIKPVIEKMVQNIIAQAMGAHGSSS

SEQ ID NO: 9057 - DNA, 2492 bp, Muscodor strobelii
  misc_feature: SGI EST ID NO. CUFF.21629.1
  misc_feature: Variant of the nucleotide sequence at SEQ ID NO 9055
tttttcggcacaacccggtcaactctagtctgctcatttatagaacctggtaacaccaatttgtcaaacttcgattatattctctgtccatagatatagaaacatgtttaccggattagttgaagagatcggaactgtctcggagcttaattccaatgacgagacaggcggcacctcattgaccatttcgctaccggctgagtctaaacttctgaccgatgctattctcggcgacagcatcgccataaacggtgtctgtttgacagcgacggagctggtcactgctggtgcacagccgagctttaaagtcggcatagcgcccgagacgctgcgcctcacgaatctaggcgcgctgaagcaggactcgcgcgtgaatcttgagcgcgctgtgcgggctgatactcgaatgggcgggcactttgtacaagggcatgtcgacaccaccgccgagatcatcaatattgcggccgacggcaacgcggtgacgttccgattccagccacgggacgctcagagggcagccgtgatgcgctatgtagtgcataaggggtttatcgcacttgatggcacgagcttgacgatcacgcaggtgaatgatgacgaagggtggtgggaggtcatgcttatcgcctatacacaggagaaagtcgttttggccaagaagaaagtcggcgagagcgtcaatgtcgaggttgatgtcttggctaaatacgcggagaagagcatggcgggttaccttggagctcacggaggcgatgcattaatcaagccagtcattgagaaaatggtacagaacatcattgcgcaagctatgggagcacacgggtcttcgtcatgaccttgacgctggttgagaagttgaaggaagcatactctagtggattctcctgtccgacgagctgctatacttgacaatacgttcatatagacaatacaatgagacataaagtctcatgccatagtggattcctatgggtcaaacgtcgctccaaacttctgcgatcttgtggctcaatgttttggcgatcttcttccgtccaaccgagttccccatctgaccaaataccaaatcctttttttgtttctttccctcttcggtattccccaacttatcaaatgccttggcaaactcgtatggcgttttccacctcttctggatctcgattgctttttcgccggtaacctgcttggtacacatcaacatctttagatacacatctcgcaatgtcatcatgtctgacttggatgccatagatgcgaacgccggatagctgatataatgcccaacagctgggtctttctctcgaaggtgctcgagcagcgggaggtagttctttgcggtgagcacgcctgtcggtatgaccagcaatgacttgctctcgtactgcttttttaacagcatagtcattctggtaaggtagcgaatcgtatcatccatcttctgcgtcttcttcacaaagtagccattaactacttgggtagaagcaatggcagattggactgcctcctcgtttttgtagaagctcatggaatcgatcgacatctcttccactatgtatatcacattcttcacaccagatctcttcaggcgaaatttttgctcgtgaaatcgaccatctctgatgctcccaaccaagtcgtcgagccgttttctctccacaatccaatccagcactatctcgtcaccttcagcacccgtccgggaaaggaagttggggtcgtgacattttgcaacccagagggcatcaccgagttcaagggctcgcataatgggcggaacacctttcttggcgagctcctgttgcatgtaatcccgatcagtctttgccctaacttcacgtacatccaagacgagttgcactgtgaacgttcccggagctagccgaataggtctaaaattgggcaatgctgaatcccccggggccgtatctccatcagcaacgatgcctgcgtaacttgacgttagctgcggagcggcttgctctatctcgacagatggtgatcgggtcacattccgaggctgcgcgatgagttcagctgaggtttgttgttgtctagacatattagccagttctgctggagtaagactggccgtctgctgtatccgttgggctacctcccacccttcgtcggacaaagagtactttctcagcggccgacctcgttcataaaccaagtccttgtctatcagtgtcctcatggaactccacgccgtatagaatttcgatggatcactcggggccgtgaaagaagaatcgcaatgaggttgtgcaacctcgatgagctgagcctttgtcatgctgatagaagcatccatgccgcgagatgcaagcccaagaattagggcatatgcgccggaccgaagagctggaacatacggctttggcttccttgccttcttcgccggtctccgctgttgttcatcctcatcttcttcttgatcattgaggcctggtatgcgccactggcgcggccgcttaggcataggcaag

SEQ ID NO: 9058 - DNA, 735 bp, Muscodor strobelii
  misc_feature: SGI cDNA ID NO. 562816
  misc_feature: Encodes the peptide sequence at SEQ ID NO 9059
atgtttaccggattagttgaagagatcggaactgtctcggagcttaattccaatgacgagacaggcggcacctcattgaccatttcgctaccggctgagtctaaacttctgaccgatgctattctcggcgacagcatcgccataaacggtgtctgtttgacagcgacggagctggtcactgctggtgcacagccgagctttaaagtcggcatagcgcccgagacgctgcgcctcacgaatctaggcgcgctgaagcaggactcgcgcgtgaatcttgagcgcgctgtgcgggctgatactcgaatgggcgggcactttgtacaagggcatgtcgacaccaccgccgagatcatcaatattgcggccgacggcaacgcggtgacgttccgattccagccacgggacgctcagagggcagccgtgatgcgctatgtagtgcataaggggtttatcgcacttgatggcacgagcttgacgatcacgcaggtgaatgatgacgaagggtggtgggaggtcatgcttatcgcctatacacaggagaaagtcgttttggccaagaagaaagtcggcgagagcgtcaatgtcgaggttgatgtcttggctaaatacgcggagaagagcatggcgggttaccttggagctcacggaggcgatgcattaatcaagccagtcattgagaaaatggtacagaacatcattgcgcaagctatgggagcacacgggtcttcgtcatga

SEQ ID NO: 9059 - protein, 244 aa, Muscodor strobelii
  misc_feature: SGI Peptide ID NO. 562816
  misc_feature (3)..(95): Pfam Id: PF00677 Pfam Desc: Lumazine binding domain
  misc_feature (108)..(198): Pfam Id: PF00677 Pfam Desc: Lumazine binding domain
  misc_feature (1)..(239): NCBI GI: 256735117 Blast Desc: expressed protein [Nectria haematococca mpVI 77-13-4]
  misc_feature (1)..(239): NCBI GI: 46108498 Blast Desc: FG01131.1 [Gibberella zeae PH-1]
  misc_feature (1)..(214): NCBI GI: 39945208 Blast Desc: MGG_04586 [Magnaporthe grisea 70-15] gi|145021465|gb|EDK05594.1| MGG_04586 [Magnaporthe grisea 70-15]
  misc_feature (1)..(211): NCBI GI: 116180802 Blast Desc: CHGG_01029 [Chaetomium globosum CBS 148.51] gi|88185326|gb|EAQ92794.1| CHGG_01029 [Chaetomium globosum CBS 148.51]
  misc_feature (1)..(235): NCBI GI: 171687409 Blast Desc: protein product [Podospora anserina] gi|170943666|emb|CAP69318.1| protein product [Podospora anserina]
  misc_feature (1)..(237): NCBI GI: 85111377 Blast Desc: riboflavin synthase alpha chain [Neurospora crassa OR74A] gi|28925656|gb|EAA34671.1| riboflavin synthase alpha chain [Neurospora crassa OR74A]
  misc_feature (1)..(243): NCBI GI: 238838152 Blast Desc: riboflavin synthase alpha chain [Microsporum canis CBS 113480]
  misc_feature (1)..(241): NCBI GI: 169599402 Blast Desc: SNOG_02521 [Phaeosphaeria nodorum SN15] gi|111069613|gb|EAT90733.1| SNOG_02521 [Phaeosphaeria nodorum SN15]
  misc_feature (1)..(237): NCBI GI: 240273675 Blast Desc: riboflavin synthase [Ajellomyces capsulatus H143]
  misc_feature (1)..(242): NCBI GI: 239606950 Blast Desc: riboflavin synthase subunit alpha [Ajellomyces dermatitidis ER-3]
  misc_feature (1)..(235): SWISSPROT Homolog: EC 2.5.1.9 Riboflavin synthase
MFTGLVEEIGTVSELNSNDETGGTSLTISLPAESKLLTDAILGDSIAINGVCLTATELVTAGAQPSFKVGIAPETLRLTNLGALKQDSRVNLERAVRADTRMGGHFVQGHVDTTAEIINIAADGNAVTFRFQPRDAQRAAVMRYVVHKGFIALDGTSLTITQVNDDEGWWEVMLIAYTQEKVVLAKKKVGESVNVEVDVLAKYAEKSMAGYLGAHGGDALIKPVIEKMVQNIIAQAMGAHGSSS

SEQ ID NO: 9060 - DNA, 2492 bp, Muscodor strobelii; identical to SEQ ID NO: 9057
  misc_feature: SGI EST ID NO. CUFF.21629.1
  misc_feature: Variant of the nucleotide sequence at SEQ ID NO 9058

SEQ ID NO: 9061 - DNA, 1038 bp, Muscodor strobelii
  misc_feature: SGI cDNA ID NO. 562817
  misc_feature: Encodes the peptide sequence at SEQ ID NO 9062
atggctggcgataagatggatgtagaggctgctgagcagcagctcaaggatatggctcactctgagcagcattacttcaacagctacaaccaccatggcatccacgaagagatgttgaaagacgaggtccgaaccagatcctacatgaacgcgatcattaacaacaagcatatcttcaaggataaggttgttcttgatgtggggtgtggcactgcgattctttctatgttcgccgcaaaggctggcgccaaacatgtcatcggcgtcgacatgtccacaatcattttcaaggcccgagagatcgtcaaggtcaatggcttggaagacaagatcaccctgatccagggcaagatggaagagattgagatgccctttccccaagtcgacatcatcatttctgaatggatgggctacttcctcttgtacgagagcatgctcgacactgtcttgtatgccagggaccgatacctggtaaaagatggactaatcttccccgataaggcaacgatatacgcgtgtggtatcgaggatggtgattacaaggatgagaagattggcttctgggataatgtttatggctttgactattcaccgctcaaggccaccgcgcttaccgagcccctcgtcgacactgtcgagctgaaggctgctgtcactgacccagccagcatcataaccctcgatctctatacttgcacaactgccgacttggccttctcgctgccgttcagcctcaagtgtcaacgagacgactttgtccacgccctggtcgcgtggtttgatatcgacttcactgcctgtcacaaacccattcgcttttccactggtccgcacacgaaatacacgcactggaaacagaccgtgttctaccttaaggacgttttgacagtccagtctggtgagcaaatcacgtgtaacttgatggtgaagccgaatgacaagaaccgccgcgacctcgatattgccatcgattacaaactggaaacggacgaccagagccgctttggagagggatcttgtagctacaagatgtgctga

SEQ ID NO: 9062 - protein, 345 aa, Muscodor strobelii
  misc_feature: SGI Peptide ID NO. 562817
  misc_feature (65)..(165): Pfam Id: PF08241 Pfam Desc: Methyltransferase domain
  misc_feature (65)..(136): Pfam Id: PF08241 Pfam Desc: Methyltransferase domain
  misc_feature (64)..(90): Pfam Id: PF06325 Pfam Desc: Ribosomal protein L11 methyltransferase (PrmA)
  misc_feature (1)..(345): NCBI GI: 46108504 Blast Desc: FG01134.1 [Gibberella zeae PH-1]
  misc_feature (1)..(345): NCBI GI: 256734402 Blast Desc: protein arginine N-methyltransferase [Nectria haematococca mpVI 77-13-4]
  misc_feature (1)..(345): NCBI GI: 171687415 Blast Desc: protein product [Podospora anserina] gi|170943669|emb|CAP69321.1| protein product [Podospora anserina]
  misc_feature (1)..(345): NCBI GI: 261355929 Blast Desc: HNRNP arginine N-methyltransferase [Verticillium albo-atrum VaMs.102]
  misc_feature (2)..(345): NCBI GI: 85111383 Blast Desc: protein arginine N-methyltransferase 1 [Neurospora crassa OR74A] gi|28925659|gb|EAA34674.1| protein arginine N-methyltransferase 1 [Neurospora crassa OR74A]
  misc_feature (1)..(345): NCBI GI: 116180796 Blast Desc: conserved [Chaetomium globosum CBS 148.51] gi|88185323|gb|EAQ92791.1| conserved [Chaetomium globosum CBS 148.51]
  misc_feature (11)..(345): NCBI GI: 156062928 Blast Desc: conserved [Sclerotinia sclerotiorum 1980] gi|154696916|gb|EDN96654.1| conserved [Sclerotinia sclerotiorum 1980]
  misc_feature (11)..(345): NCBI GI: 154314752 Blast Desc: conserved [Botryotinia fuckeliana B05.10] gi|150848707|gb|EDN23900.1| conserved [Botryotinia fuckeliana B05.10]
  misc_feature (8)..(344): NCBI GI: 259481155 Blast Desc: TPA: RmtA [Source:UniProtKB/TrEMBL;Acc:Q5VLE3] [Aspergillus nidulans FGSC A4]
  misc_feature (8)..(344): NCBI GI: 119496549 Blast Desc: protein arginine n-methyltransferase 1 [Neosartorya fischeri NRRL 181] gi|119413210|gb|EAW23151.1| protein arginine n-methyltransferase 1, [Neosartorya fischeri NRRL 181]
  misc_feature (6)..(325): SWISSPROT Homolog: EC 2.1.1.125 Histone-arginine N-methyltransferase
MAGDKMDVEAAEQQLKDMAHSEQHYFNSYNHHGIHEEMLKDEVRTRSYMNAIINNKHIFKDKVVLDVGCGTAILSMFAAKAGAKHVIGVDMSTIIFKAREIVKVNGLEDKITLIQGKMEEIEMPFPQVDIIISEWMGYFLLYESMLDTVLYARDRYLVKDGLIFPDKATIYACGIEDGDYKDEKIGFWDNVYGFDYSPLKATALTEPLVDTVELKAAVTDPASIITLDLYTCTTADLAFSLPFSLKCQRDDFVHALVAWFDIDFTACHKPIRFSTGPHTKYTHWKQTVFYLKDVLTVQSGEQITCNLMVKPNDKNRRDLDIAIDYKLETDDQSRFGEGSCSYKMC

SEQ ID NO: 9063 - DNA, 1609 bp, Muscodor strobelii
  misc_feature: SGI EST ID NO. CUFF.21579.0
  misc_feature: Variant of the nucleotide sequence at SEQ ID NO 9061
ttcgagcccaagaacgaagaaaaaaataaaaattatcttgacgtgtcccgaggcagcgaccttcctctcaactttttgcgcggtcaaaactcgggcattccgcactcttttcgcccttgcaaattgccccgattttgcctcgccatctgttgtgcaactggtctactgcatccctcgtgtgtttcccttgaaatggctggcgataagatggatgtagaggctgctgagcagcagctcaaggatatggctcactctgagcagcattacttcaacagctacaaccaccatggcatccacgaagagatgttgaaagacgaggtccgaaccagatcctacatgaacgcgatcattaacaacaagcatatcttcaaggataaggttgttcttgatgtggggtgtggcactgcgattctttctatgttcgccgcaaaggctggcgccaaacatgtcatcggcgtcgacatgtccacaatcattttcaaggcccgagagatcgtcaaggtcaatggcttggaagacaagatcaccctgatccagggcaagatggaagagattgagatgccctttccccaagtcgacatcatcatttctgaatggatgggctacttcctcttgtacgagagcatgctcgacactgtcttgtatgccagggaccgatacctggtaaaagatggactaatcttccccgataaggcaacgatatacgcgtgtggtatcgaggatggtgattacaaggatgagaagattggcttctgggataatgtttatggctttgactattcaccgctcaaggccaccgcgcttaccgagcccctcgtcgacactgtcgagctgaaggctgctgtcactgacccagccagcatcataaccctcgatctctatacttgcacaactgccgacttggccttctcgctgccgttcagcctcaagtgtcaacgagacgactttgtccacgccctggtcgcgtggtttgatatcgacttcactgcctgtcacaaacccattcgcttttccactggtccgcacacgaaatacacgcactggaaacagaccgtgttctaccttaaggacgttttgacagtccagtctggtgagcaaatcacgtgtaacttgatggtgaagccgaatgacaagaaccgccgcgacctcgatattgccatcgattacaaactggaaacggacgaccagagccgctttggagagggatcttgtagctacaagatgtgctgagtggggaactccgttagataggggataaggactattcggttgagctagacaagtcgcaatcgccttcatcctcagaccgccggcaaatagagtcgccatttcgggaccgtttgcgtaccttgaggggcagtcagggcaaggcagctcgatatggcatcttgaatgcagtgtcggcatattaagacgatttcttggtgatcataccagatgcgtcatcatattgctctgaatatatagagagcacggaggagcacgtgtgacaagaagaaatagtacaggcacgcagacttgaccattctaagatgggtgctaaaagtagaggtagcctcaaatatacctgaaatctcagacagatgaatagaggcttgcgcaacattca

SEQ ID NO: 9064 - DNA, 2139 bp, Muscodor strobelii
  misc_feature: SGI cDNA ID NO. 562818
  misc_feature: Encodes the peptide sequence at SEQ ID NO 9065
atggattccttgaaagagaaggaagctctctttgagcagcttgagacattacaaaatcgggatgacggatcagattctttcgatgaaaaggagcaaaccttaagggagcagagcaaagcttttttccgtctggagaagaaaatggtcaatccagcaatagttgctaggtcacaaactccagctatcgtgccgaaatacttgtcgaagcctagcaacgatgatgtacagataatatccgtcacaccaataaatccaaaaaggccgttgttagtccctacctcttctctcagcagcataattgcagaaacagtccagccagctcagagacagagccggctgcaaacctacctaccgacgcactcgcaagtatcgcagacaaacgacgagcagtcaccttctctagcaatggccaagagaaagcgatcagctccgcttgatatggcacccgaatgcaaacaaatcttcaaagatcttgcatttttctatatccccaacgatgatgtcaaccctgcgaggaagttgcggatcaagaaagcaagggagttcggagcacaatgggtgcgggatattacagaagccgaatatgtcattgttgatcgactcctacatctggaagatatccagtcgattctagacggccacccacagcaacataagctcactgtcgtgagcgaaaagtatcagagtgactgcctgcaagagaaacgactcatcgatgccggatcactgtatgatgttctgcctcgagcaaagatggagcagacttcagtcactgaaatgtctagtcagtcgtccctacaactgaagaagacacttggggagcggtcagagacgcagacatctaggaaatcatctcccttcagaaccagggaagagagccctcacgagagaatacaagatggcaattcggaaatcatgaatgcatcaggaatcatctcacaagcattttctgacgaattagctgagtgtattgagaccgttttggacgatccgaagtccaaacccgatgacgatgcggatgagtttggcacgtcagaaccagaagagtatcggccttcaaagaagatccgtgggagcaatacagcaactgacactcattataacaagtttctttgtatgaagggaggtactcggcagaagagatacagtgggccgaacgcagatgtcatagagttgtttgaagaaatggcgcacgagaatggtttctacggcaacatgcacgcctcgaacttcaaggtgcagtcgtatcgaaaagctatcgccgttcttcgacgccacccccaaaagatcaaaacagtccaagaagcaaaggcacttcctggtattggccagcaaatagctgaacatatacaggaaatatctgcgactggccgtttcagaaagctagaagaaatccagagcgaaccaggaagggaagcactgcatctattctggaatatctacggagtgggaatagagactgccagagcctgggttgagcagggttatcgcacacttgatgatctccgttctaaggcaatgctttcagagaaccagcagattggtctcgatcactatgaggatttgcttacacgcatcccaagagaagagatcgaggctctgggcaactgggtcatcaaagcggccaaggaaatcgacccgacagtggaaatcatcattggaggcggctatcgccgtggttcggatagttcaaacgacatcgacttgatagtgacgaaagtaggaaccacggtagcgaaagatttaggtccctttctcgatgagctcgtggcgaaactactgggagaagggtttctgaccgcgaccctggcatctcacaagcgtctggagggcaacaagtggcatggctgctgtgtccttcctgagaagtctcgtcttgattccagatcaccgtaccgcccggtatggcgccgaatcgattttcttctagttccagaaacggatattggtgcggcgttgatatacttcacgggcaacgatctgttcaatcgttccataagattacttgcgaataagaagggcatgcggctcaatcaccgagctctatcagggcccggaattcatgaaggcaaagacgagaggaagatctttgaattgcttggagttcaatggcgggagccgcatgaaagatggtgttaa

SEQ ID NO: 9065 - protein, 712 aa, Muscodor strobelii
  misc_feature: SGI Peptide ID NO. 562818
  misc_feature (1)..(712): NCBI GI: 46107476 Blast Desc: FG00621.1 [Gibberella zeae PH-1]
  misc_feature (3)..(712): NCBI GI: 116180792 Blast Desc: CHGG_01024 [Chaetomium globosum CBS 148.51] gi|88185321|gb|EAQ92789.1| CHGG_01024 [Chaetomium globosum CBS 148.51]
  misc_feature (4)..(712): NCBI GI: 171687419 Blast Desc: protein product [Podospora anserina] gi|170943671|emb|CAP69323.1| protein product [Podospora anserina]
  misc_feature (90)..(712): NCBI GI: 39945190 Blast Desc: MGG_04577 [Magnaporthe grisea 70-15] gi|145021469|gb|EDK05598.1| MGG_04577 [Magnaporthe grisea 70-15]
  misc_feature (365)..(712): NCBI GI: 256735193 Blast Desc: NECHADRAFT_74784 [Nectria haematococca mpVI 77-13-4]
  misc_feature (101)..(712): NCBI GI: 70995309 Blast Desc: DNA polymerase POL4 [Aspergillus fumigatus Af293] gi|66850049|gb|EAL90376.1| DNA polymerase POL4, [Aspergillus fumigatus Af293] gi|159131169|gb|EDP56282.1| DNA polymerase POL4,
  misc_feature (138)..(712): NCBI GI: 212542803 Blast Desc: DNA polymerase POL4, [Penicillium marneffei ATCC 18224] gi|210066463|gb|EEA20556.1| DNA polymerase POL4, [Penicillium marneffei ATCC 18224]
  misc_feature (93)..(710): NCBI GI: 156052889 Blast Desc: SS1G_06612 [Sclerotinia sclerotiorum 1980] gi|154704390|gb|EDO04129.1| SS1G_06612 [Sclerotinia sclerotiorum 1980]
  misc_feature (94)..(712): NCBI GI: 242767987 Blast Desc: DNA polymerase POL4, [Talaromyces stipitatus ATCC 10500] gi|218724674|gb|EED24091.1| DNA polymerase POL4, [Talaromyces stipitatus ATCC 10500]
  misc_feature (100)..(712): NCBI GI: 239613353 Blast Desc: DNA polymerase POL4 [Ajellomyces dermatitidis ER-3]
  misc_feature (368)..(710): SWISSPROT Homolog: EC 2.7.7.7 DNA-directed DNA polymerase
MDSLKEKEALFEQLETLQNRDDGSDSFDEKEQTLREQSKAFFRLEKKMVNPAIVARSQTPAIVPKYLSKPSNDDVQIISVTPINPKRPLLVPTSSLSSIIAETVQPAQRQSRLQTYLPTHSQVSQTNDEQSPSLAMAKRKRSAPLDMAPECKQIFKDLAFFYIPNDDVNPARKLRIKKAREFGAQWVRDITEAEYVIVDRLLHLEDIQSILDGHPQQHKLTVVSEKYQSDCLQEKRLIDAGSLYDVLPRAKMEQTSVTEMSSQSSLQLKKTLGERSETQTSRKSSPFRTREESPHERIQDGNSEIMNASGIISQAFSDELAECIETVLDDPKSKPDDDADEFGTSEPEEYRPSKKIRGSNTATDTHYNKFLCMKGGTRQKRYSGPNADVIELFEEMAHENGFYGNMHASNFKVQSYRKAIAVLRRHPQKIKTVQEAKALPGIGQQIAEHIQEISATGRFRKLEEIQSEPGREALHLFWNIYGVGIETARAWVEQGYRTLDDLRSKAMLSENQQIGLDHYEDLLTRIPREEIEALGNWVIKAAKEIDPTVEIIIGGGYRRGSDSSNDIDLIVTKVGTTVAKDLGPFLDELVAKLLGEGFLTATLASHKRLEGNKWHGCCVLPEKSRLDSRSPYRPVWRRIDFLLVPETDIGAALIYFTGNDLFNRSIRLLANKKGMRLNHRALSGPGIHEGKDERKIFELLGVQWREPHERWC

SEQ ID NO: 9066 - DNA, 2649 bp, Muscodor strobelii
  misc_feature: SGI EST ID NO. CUFF.21632.0
  misc_feature: Variant of the nucleotide sequence at SEQ ID NO 9064
tagtaataagcaccctgctaaaatagcttttaaacaaaccagggaattgccatgtcattcatataggtacatataaatactcaaattagtgcctggagcattagtaattggaccatttggtgttgcaactcatctgttgccctacccaccatcttcttttctattcacccagtggacgccactgctgccttcgcgacaactggtcattcggcccacgcaaacacgtgcaatcagcgccttcatttacaaagtacctacctccctatataactgatccgttgttgcctcagtagtgtcaaacagctgtgaatagccaccgtccacaattcttcacagacaaatgtctcaccacgttatgcaagaaagactagctgtggttcaccgccatcgatggattccttgaaagagaaggaagctctctttgagcagcttgagacattacaaaatcgggatgacggatcagattctttcgatgaaaaggagcaaaccttaagggagcagagcaaagcttttttccgtctggagaagaaaatggtcaatccagcaatagttgctaggtcacaaactccagctatcgtgccgaaatacttgtcgaagcctagcaacgatgatgtacagataatatccgtcacaccaataaatccaaaaaggccgttgttagtccctacctcttctctcagcagcataattgcagaaacagtccagccagctcagagacagagccggctgcaaacctacctaccgacgcactcgcaagtatcgcagacaaacgacgagcagtcaccttctctagcaatggccaagagaaagcgatcagctccgcttgatatggcacccgaatgcaaacaaatcttcaaagatcttgcatttttctatatccccaacgatgatgtcaaccctgcgaggaagttgcggatcaagaaagcaagggagttcggagcacaatgggtgcgggatattacagaagccgaatatgtcattgttgatcgactcctacatctggaagatatccagtcgattctagacggccacccacagcaacataagctcactgtcgtgagcgaaaagtatcagagtgactgcctgcaagagaaacgactcatcgatgccggatcactgtatgatgttctgcctcgagcaaagatggagcagacttcagtcactgaaatgtctagtcagtcgtccctacaactgaagaagacacttggggagcggtcagagacgcagacatctaggaaatcatctcccttcagaaccagggaagagagccctcacgagagaatacaagatggcaattcggaaatcatgaatgcatcaggaatcatctcacaagcattttctgacgaattagctgagtgtattgagaccgttttggacgatccgaagtccaaacccgatgacgatgcggatgagtttggcacgtcagaaccagaagagtatcggccttcaaagaagatccgtgggagcaatacagcaactgacactcattataacaagtttctttgtatgaagggaggtactcggcagaagagatacagtgggccgaacgcagatgtcatagagttgtttgaagaaatggcgcacgagaatggtttctacggcaacatgcacgcctcgaacttcaaggtgcagtcgtatcgaaaagctatcgccgttcttcgacgccacccccaaaagatcaaaacagtccaagaagcaaaggcacttcctggtattggccagcaaatagctgaacatatacaggaaatatctgcgactggccgtttcagaaagctagaagaaatccagagcgaaccaggaagggaagcactgcatctattctggaatatctacggagtgggaatagagactgccagagcctgggttgagcagggttatcgcacacttgatgatctccgttctaaggcaatgctttcagagaaccagcagattggtctcgatcactatgaggatttgcttacacgcatcccaagagaagagatcgaggctctgggcaactgggtcatcaaagcggccaaggaaatcgacccgacagtggaaatcatcattggaggcggctatcgccgtggttcggatagttcaaacgacatcgacttgatagtgacgaaagtaggaaccacggtagcgaaagatttaggtccctttctcgatgagctcgtggcgaaactactgggagaagggtttctgaccgcgaccctggcatctcacaagcgtctggagggcaacaagtggcatggctgctgtgtccttcctgagaagtctcgtcttgattccagatcaccgtaccgcccggtatggcgccgaatcgattttcttctagttccagaaacggatattggtgcggcgttgatatacttcacgggcaacgatctgttcaatcgttccataagattacttgcgaataagaagggcatgcggctcaatcaccgagctctatcagggcccggaattcatgaaggcaaagacgagaggaagatctttgaattgcttggagttcaatggcgggagccgcatgaaagatggtgttaatgtttatcggcttacactttaaggaataaggaattacctctatgtacgatgaacttatgactttagccataatctacactttgtagttgtgtccatctgcaaagtcccacctcgcttatt

SEQ ID NO: 9067 - DNA, 1860 bp, Muscodor strobelii
  misc_feature: SGI cDNA ID NO. 562819
  misc_feature: Elevated expression when VOC is produced
  misc_feature: Encodes the peptide sequence at SEQ ID NO 9068
atgcaaacgccaacatcgggtagaattattgtcgcctgcaccctgttcttttcaacagtggtagcgtccttcgacggcaatctgaactatgcgagcccctcaaaacgccatccaggtttaggaatagatgtccctcgtgttgtgcatcgaagtctaaagcgtagtgctgtcgcctacgcggcagatgagctcagtttcacccatggtgtcgcaagtggcgatcctctatcagatcgagtgattctttggactcgagttgcgccatcactggcgtccgatggtagcaatactacagtagagggaccagtgcctctgtatagccatgacactcagacttatattgaagctgacccaagcccgatctgtgttgactggactgtattttctacatcgagcaatgcctccactactgtagcaagtggaaaagcatatacggttacaagcgatattgactacaccataaaagttgacgctacagggttgcaaccatttacgacgtacaactaccaattcactatctgcggttcgactgtcaagagtcctgtcgggcgaacgaagactgcacctaaagaagacgctgatgtagccgagatcaagctggctgtgttttcctgctcgaactatcccaacggatacttcaatgcttatgggaatgccgcacgaaaagacgagcatgacttcatcgtacaccttggagactacatctacgagagcggggttggaggagagcgagcaactgatccatctgatgaaatctttacgctacttgattataggacccggcatagtcagtatcgtacagatccggacttgcaactcgcgtctgaaaattttgcgtggatcgcgacttgggacgatcatgaagtctcgaataatggataccgtgatggtagttccggccttaataacacagaagattcattcttgaaggatggcggtgtcagcgtcgaccaacgcaagatgaacgcagtcagagcgtactttgagtggatgccaattcgacaagttgatttggacgacaatctgcgcgtctggcgcacattccaaatgggcagtctcatggatcttataatactggacactaggaactatgatagaagtatcacatctttggattggaacgacgaatatattgatttaatccgagacgatgcctcacgaagcttgatgggctcgcggcaagaaaattggttctaccatcagctttcagattcttcagatcgtggtgcagcgtggcgcgtcattggaaatcaaatcattttctccaaagtattcgaatcgtacggactgagtggcgacaactggagcggctatatcgcaaatcgaaacagaactcttaagcatctatacgacaacgatattggaaataatatctttcttgccggtgatagccaccaaaattgggttctggatttggtatggctcgatgagaaagactatgatcctgacacaggcagcggttccattggcgtcgaatttgctggcacggcggtgtcgtcgggcggccaagatgggccaatcgattttgctagattgcaggcgcagtatcgcgttggaaacaacacagaattgcaatggcaagaagggtactatcgcggatatattttcttatctgtgaagcctgacgtggtggaagctcgttactatggttctccttccgtcgcttcacgtaactcgtgggatttgccacttgcaaacttcacggtgctcagtggcgagaataagctcaaacgaccaattgctgggggatctgttgaagcgggcgcactgcagactggtgagacaaagccaaccaatctaacactgaatactgatacgttcgaatgggatgtcgttggttatgatcaaatgtatttgtga

SEQ ID NO: 9068 - protein, 619 aa, Muscodor strobelii
  misc_feature: SGI Peptide ID NO. 562819
  misc_feature (68)..(548): Pfam Id: PF09423 Pfam Desc: PhoD-like phosphatase
  misc_feature (151)..(548): Pfam Id: PF09423 Pfam Desc: PhoD-like phosphatase
  misc_feature (68)..(88): Pfam Id: PF09423 Pfam Desc: PhoD-like phosphatase
  misc_feature (9)..(617): NCBI GI: 46124465 Blast Desc: FG06610.1 [Gibberella zeae PH-1]
  misc_feature (9)..(619): NCBI GI: 256726502 Blast Desc: NECHADRAFT_39397 [Nectria haematococca mpVI 77-13-4]
  misc_feature (13)..(598): NCBI GI: 116202263 Blast Desc: CHGG_09016 [Chaetomium globosum CBS 148.51] gi|88177534|gb|EAQ85002.1| CHGG_09016 [Chaetomium globosum CBS 148.51]
  misc_feature (8)..(619): NCBI GI: 171677634 Blast Desc: protein product [Podospora anserina] gi|170936885|emb|CAP61544.1| protein product [Podospora anserina]
  misc_feature (27)..(619): NCBI GI: 171691638 Blast Desc: protein product [Podospora anserina] gi|170945767|emb|CAP71881.1| protein product [Podospora anserina]
  misc_feature (9)..(619): NCBI GI: 169618547 Blast Desc: SNOG_12465 [Phaeosphaeria nodorum SN15] gi|160703634|gb|EAT80278.2| SNOG_12465 [Phaeosphaeria nodorum SN15]
  misc_feature (7)..(619): NCBI GI: 169765784 Blast Desc: [Aspergillus oryzae RIB40] gi|83765218|dbj|BAE55361.1| protein product [Aspergillus oryzae]
  misc_feature (22)..(619): NCBI GI: 238482391 Blast Desc: alkaline phosphatase, [Aspergillus flavus NRRL3357] gi|220700484|gb|EED56822.1| alkaline phosphatase, [Aspergillus flavus NRRL3357]
  misc_feature (20)..(618): NCBI GI: 115386552 Blast Desc: conserved [Aspergillus terreus NIH2624] gi|114190815|gb|EAU32515.1| conserved [Aspergillus terreus NIH2624]
  misc_feature (27)..(619): NCBI GI: 67903270 Blast Desc: AN8622.2 [Aspergillus nidulans FGSC A4] gi|40741466|gb|EAA60656.1| AN8622.2 [Aspergillus nidulans FGSC A4] gi|259483161|tpe|CBF78311.1| TPA: alkaline phosphatase, FGSC
  misc_feature (66)..(596): SWISSPROT Homolog: EC 3.1.3.1 Alkaline phosphatase
  misc_feature: Useful for introducing or modulating the production of volatile compounds
MQTPTSGRIIVACTLFFSTVVASFDGNLNYASPSKRHPGLGIDVPRVVHRSLKRSAVAYAADELSFTHGVASGDPLSDRVILWTRVAPSLASDGSNTTVEGPVPLYSHDTQTYIEADPSPICVDWTVFSTSSNASTTVASGKAYTVTSDIDYTIKVDATGLQPFTTYNYQFTICGSTVKSPVGRTKTAPKEDADVAEIKLAVFSCSNYPNGYFNAYGNAARKDEHDFIVHLGDYIYESGVGGERATDPSDEIFTLLDYRTRHSQYRTDPDLQLASENFAWIATWDDHEVSNNGYRDGSSGLNNTEDSFLKDGGVSVDQRKMNAVRAYFEWMPIRQVDLDDNLRVWRTFQMGSLMDLIILDTRNYDRSITSLDWNDEYIDLIRDDASRSLMGSRQENWFYHQLSDSSDRGAAWRVIGNQIIFSKVFESYGLSGDNWSGYIANRNRTLKHLYDNDIGNNIFLAGDSHQNWVLDLVWLDEKDYDPDTGSGSIGVEFAGTAVSSGGQDGPIDFARLQAQYRVGNNTELQWQEGYYRGYIFLSVKPDVVEARYYGSPSVASRNSWDLPLANFTVLSGENKLKRPIAGGSVEAGALQTGETKPTNLTLNTDTFEWDVVGYDQMYL

SEQ ID NO: 9069 - DNA, 2332 bp, Muscodor strobelii
  misc_feature: SGI EST ID NO. CUFF.21904.0
  misc_feature: Variant of the nucleotide sequence at SEQ ID NO 9067
cgtttgcctacatctgcaaggagcaaaccccgcacgtaggtcaagactgttattgcacaataaatcattgaagaattcagctaggatgttagtctgtgctggacagaagactggcggcgattataaattaacgcggctggtagcttgcatcacaggatgttttcattaaagtagtaatgactgagttggtctcatattctcaggtatacccgcacaaggcgattgattgtattgactcgaggagtccaactgagcaatgcaaacgccaacatcgggtagaattattgtcgcctgcaccctgttcttttcaacagtggtagcgtccttcgacggcaatctgaactatgcgagcccctcaaaacgccatccaggtttaggaatagatgtccctcgtgttgtgcatcgaagtctaaagcgtagtgctgtcgcctacgcggcagatgagctcagtttcacccatggtgtcgcaagtggcgatcctctatcagatcgagtgattctttggactcgagttgcgccatcactggcgtccgatggtagcaatactacagtagagggaccagtgcctctgtatagccatgacactcagacttatattgaagctgacccaagcccgatctgtgttgactggactgtattttctacatcgagcaatgcctccactactgtagcaagtggaaaagcatatacggtgtgtacagaacaatttcatcccttcaatcatagatcatgacgaataagaaaagaggctaacatgttataaaaccttagtacaagcgatattgactacaccataaaagttgacgctacagggttgcaaccatttacgacgtacaactaccaattcactatctgcggttcgactgtcaagagtcctgtcgggcgaacgaagactgcacctaaagaagacgctgatgtagccgagatcaagctggctgtgttttcctgctcgaactatcccaacggatacttcaatgcttatgggaatgccgcacgaaaagacgagcatgacttcatcgtacaccttggagactacatctacgagagcggggttggaggagagcgagcaactgatccatctgatgaaatctttacgctacttgattataggacccggcatagtcagtatcgtacagatccggacttgcaactcgcgtctgaaaattttgcgtggatcgcgacttgggacgatcatgaagtctcgaataatggataccgtgatggtagttccggccttaataacacagaagattcattcttgaaggatggcggtgtcagcgtcgaccaacgcaagatgaacgcagtcagagcgtactttgagtggatgccaattcgacaagttgatttggacgacaatctgcgcgtctggcgcacattccaaatgggcagtctcatggatcttataatactggacactaggaactatgatagaagtatcacatctttggattggaacgacgaatatattgatttaatccgagacgatgcctcacgaagcttgatgggctcgcggcaagaaaattggttctaccatcagctttcagattcttcagatcgtggtgcagcgtggcgcgtcattggaaatcaaatcattttctccaaagtattcgaatcgtacggactgagtggcgacaactggagcggctatatcgcaaatcgaaacagaactcttaagcatctatacgacaacgatattggaaataatatctttcttgccggtgatagccaccaaaattgggttctggatttggtatggctcgatgagaaagactatgatcctgacacaggcagcggttccattggcgtcgaatttgctggcacggcggtgtcgtcgggcggccaagatgggccaatcgattttgctagattgcaggcgcagtatcgcgttggaaacaacacagaattgcaatggcaagaagggtactatcgcggatatattttcttatctgtgaagcctgacgtggtggaagctcgttactatggttctccttccgtcgcttcacgtaactcgtgggatttgccacttgcaaacttcacggtgctcagtggcgagaataagctcaaacgaccaattgctgggggatctgttgaagcgggcgcactgcagactggtgagacaaagccaaccaatctaacactgaatactgatacgttcgaatgggatgtcgttggttatgatcaaatgtatttgtgagcgggcagctaccaataattactttcagacatgccgtatactcaggagatgtagctagccttatcgatgacattaagaagagttcgtacttcgcagtgatttgacattcatcgaagtagacaatacctccgacataag

SEQ ID NO: 9070 - DNA, 1917 bp, Muscodor strobelii
  misc_feature: SGI cDNA ID NO. 562820
  misc_feature: Encodes the peptide sequence at SEQ ID NO 9071
atgcaaacgccaacatcgggtagaattattgtcgcctgcaccctgttcttttcaacagtggtagcgtccttcgacggcaatctgaactatgcgagcccctcaaaacgccatccaggtttaggaatagatgtccctcgtgttgtgcatcgaagtctaaagcgtagtgctgtcgcctacgcggcagatgagctcagtttcacccatggtgtcgcaagtggcgatcctctatcagatcgagtgattctttggactcgagttgcgccatcactggcgtccgatggtagcaatactacagtagagggaccagtgcctctgtatagccatgacactcagacttatattgaagctgacccaagcccgatctgtgttgactggactgtattttctacatcgagcaatgcctccactactgtagcaagtggaaaagcatatacggttacaagcgatattgactacaccataaaagttgacgctacagggttgcaaccatttacgacgtacaactaccaattcactatctgcggttcgactgtcaagagtcctgtcgggcgaacgaagactgcacctaaagaagacgctgatgtagccgagatcaagctggctgtgttttcctgctcgaactatcccaacggatacttcaatgcttatgggaatgccgcacgaaaagacgagcatgacttcatcgtacaccttggagactacatctacgagagcggggttggaggagagcgagcaactgatccatctgatgaaatctttacgctacttgattataggacccggcatagtcagtatcgtacagatccggacttgcaactcgcgtctgaaaattttgcgtggatcgcgacttgggacgatcatgaagtctcgaataatggataccgtgatggtagttccggccttaataacacagaagattcattcttgaaggatggcggtgtcagcgtcgaccaacgcaagatgaacgcagtcagagcgtactttgagtggatgccaattcgacaagttgatttggacgacaatctgcgcgtctggcgcacattccaaatgggcagtctcatggtaaatagtataggcccttccctggctggtctatttgctaaatatcttctttgcaaggatcttataatactggacactaggaactatgatagaagtatcacatctttggattggaacgacgaatatattgatttaatccgagacgatgcctcacgaagcttgatgggctcgcggcaagaaaattggttctaccatcagctttcagattcttcagatcgtggtgcagcgtggcgcgtcattggaaatcaaatcattttctccaaagtattcgaatcgtacggactgagtggcgacaactggagcggctatatcgcaaatcgaaacagaactcttaagcatctatacgacaacgatattggaaataatatctttcttgccggtgatagccaccaaaattgggttctggatttggtatggctcgatgagaaagactatgatcctgacacaggcagcggttccattggcgtcgaatttgctggcacggcggtgtcgtcgggcggccaagatgggccaatcgattttgctagattgcaggcgcagtatcgcgttggaaacaacacagaattgcaatggcaagaagggtactatcgcggatatattttcttatctgtgaagcctgacgtggtggaagctcgttactatggttctccttccgtcgcttcacgtaactcgtgggatttgccacttgcaaacttcacggtgctcagtggcgagaataagctcaaacgaccaattgctgggggatctgttgaagcgggcgcactgcagactggtgagacaaagccaaccaatctaacactgaatactgatacgttcgaatgggatgtcgttggttatgatcaaatgtatttgtga

SEQ ID NO: 9071 - protein, 638 aa, Muscodor strobelii
  misc_feature: SGI Peptide ID NO. 562820
  misc_feature (68)..(567): Pfam Id: PF09423 Pfam Desc: PhoD-like phosphatase
  misc_feature (151)..(353): Pfam Id: PF09423 Pfam Desc: PhoD-like phosphatase
  misc_feature (401)..(567): Pfam Id: PF09423 Pfam Desc: PhoD-like phosphatase
  misc_feature (68)..(88): Pfam Id: PF09423 Pfam Desc: PhoD-like phosphatase
  misc_feature (9)..(636): NCBI GI: 46124465 Blast Desc: FG06610.1 [Gibberella zeae PH-1]
  misc_feature (9)..(638): NCBI GI: 256726502 Blast Desc: NECHADRAFT_39397 [Nectria haematococca mpVI 77-13-4]
  misc_feature (13)..(617): NCBI GI: 116202263 Blast Desc: CHGG_09016 [Chaetomium globosum CBS 148.51] gi|88177534|gb|EAQ85002.1| CHGG_09016 [Chaetomium globosum CBS 148.51]
  misc_feature (8)..(638): NCBI GI: 171677634 Blast Desc: protein product [Podospora anserina] gi|170936885|emb|CAP61544.1| protein product [Podospora anserina]
  misc_feature (27)..(638): NCBI GI: 171691638 Blast Desc: protein product [Podospora anserina] gi|170945767|emb|CAP71881.1| protein product [Podospora anserina]
  misc_feature (9)..(638): NCBI GI: 169618547 Blast Desc: SNOG_12465 [Phaeosphaeria nodorum SN15] gi|160703634|gb|EAT80278.2| SNOG_12465 [Phaeosphaeria nodorum SN15]
  misc_feature (20)..(637): NCBI GI: 115386552 Blast Desc: conserved [Aspergillus terreus NIH2624] gi|114190815|gb|EAU32515.1| conserved [Aspergillus terreus NIH2624]
  misc_feature (7)..(638): NCBI GI: 169765784 Blast Desc: [Aspergillus oryzae RIB40] gi|83765218|dbj|BAE55361.1| protein product [Aspergillus oryzae]
  misc_feature (22)..(638): NCBI GI: 238482391 Blast Desc: alkaline phosphatase, [Aspergillus flavus NRRL3357] gi|220700484|gb|EED56822.1| alkaline phosphatase, [Aspergillus flavus NRRL3357]
  misc_feature (27)..(638): NCBI GI: 67903270 Blast Desc: AN8622.2 [Aspergillus nidulans FGSC A4] gi|40741466|gb|EAA60656.1| AN8622.2 [Aspergillus nidulans FGSC A4] gi|259483161|tpe|CBF78311.1| TPA: alkaline phosphatase, FGSC
  misc_feature (66)..(615): SWISSPROT Homolog: EC 3.1.3.1 Alkaline phosphatase
MQTPTSGRIIVACTLFFSTVVASFDGNLNYASPSKRHPGLGIDVPRVVHRSLKRSAVAYAADELSFTHGVASGDPLSDRVILWTRVAPSLASDGSNTTVEGPVPLYSHDTQTYIEADPSPICVDWTVFSTSSNASTTVASGKAYTVTSDIDYTIKVDATGLQPFTTYNYQFTICGSTVKSPVGRTKTAPKEDADVAEIKLAVFSCSNYPNGYFNAYGNAARKDEHDFIVHLGDYIYESGVGGERATDPSDEIFTLLDYRTRHSQYRTDPDLQLASENFAWIATWDDHEVSNNGYRDGSSGLNNTEDSFLKDGGVSVDQRKMNAVRAYFEWMPIRQVDLDDNLRVWRTFQMGSLMVNSIGPSLAGLFAKYLLCKDLIILDTRNYDRSITSLDWNDEYIDLIRDDASRSLMGSRQENWFYHQLSDSSDRGAAWRVIGNQIIFSKVFESYGLSGDNWSGYIANRNRTLKHLYDNDIGNNIFLAGDSHQNWVLDLVWLDEKDYDPDTGSGSIGVEFAGTAVSSGGQDGPIDFARLQAQYRVGNNTELQWQEGYYRGYIFLSVKPDVVEARYYGSPSVASRNSWDLPLANFTVLSGENKLKRPIAGGSVEAGALQTGETKPTNLTLNTDTFEWDVVGYDQMYL

SEQ ID NO: 9072 - DNA, 2332 bp, Muscodor strobelii; identical to SEQ ID NO: 9069
  misc_feature: SGI EST ID NO. CUFF.21904.0
  misc_feature: Variant of the nucleotide sequence at SEQ ID NO 9070

SEQ ID NO: 9073 - DNA, 1530 bp, Muscodor strobelii
  misc_feature: SGI cDNA ID NO. 562821
  misc_feature: Elevated expression when VOC is produced
  misc_feature: Encodes the peptide sequence at SEQ ID NO 9074
atggtcgtggtggacggcgtcgacctcgaagctttggactatgtccagaaatatccttacaatggcacgatcccgacgggaggagattccttaaacgagaatctcaatattttctacgagtctggggatattggttggatgatcacagcaaccgccttggtgctactgatgattccaggcgttggcttcttctattccgggctggctagacgcaagtctgccctttctttgatatggctttctgttatggccacagctgtcacgacttttcaatggttcttttggggctactcccttaccttttcacatcatgccagttcattcattggtgatctttcaaattttggtttcaaggacgtcctcggtgctccatccgttggctcaactcgagttcccgacctcctattcgcagtctatcagggcatgttttctgccataaccgttgcgcttgccactggtgctgtcgctgaacgtggaaggatgttgccttgtgttatttttatgttaatatggtcaacacttatttacgaccctatcgcctgttggacttggaaccctgctggatggtcgaataaacttggcgggttggatttcgccggcggtacacccgtccacattgcctctggctctgcagcacttgcctactctatgatgcttggcaaacgacgaggccatggcacccacgagctgaactatcgccctcacaacgtaacgcatattgtgattgggaccgtattcctgtgggttggctggttcggtttcaatgctggtagcgctctcgctgccaatctacgggcagtcatggccgcagtagtgactaatctcgctgcatgttgtggtggtatcacctggtgcgtgatcgattatcggttggaacgcaaatggtctactgtcgggttctgctctggtgtaattgctggtctagttgccattacacctggatcaggctacgttccgtcttgggccgcggtaccttttggagtgctcggggccctttttgccaactacgccaccaaactcaagttcgttcttcagatcgacgacgccctagatatctttgccgtccatgccgtcggtggcatcgttgggaacattcttaccggatttttcgctgccgattacattgcacaccttgatggggcctctgtcataccgggtggttggctgaatcatcactggattcaacttgcgtatcagttggccgattccgtcgctggtggtgtctactctttcggcggcacagtcataatacttttcgtcatcaatctcattccaggtttgaaactccgtgcgacagaagacgctgagattttgggcatcgatgacgctgaaattggcgagtttgcatacgactacgtcgagctgacgcgagaggtcttgaatgatatcgaggagaacgacgatcacagccgctattcgatgatggaaggcaaccaaactttcgacccacgggagaagaatagtattccgttaattgatgcaaggggttttgcggggcaatcatcaatgtctcgtgctcatgctcaatag

SEQ ID NO: 9074 - protein, 509 aa, Muscodor strobelii
  misc_feature: SGI Peptide ID NO. 562821
  misc_feature (45)..(450): Pfam Id: PF00909 Pfam Desc: Ammonium Transporter Family
  misc_feature (2)..(488): NCBI GI: 156052867 Blast Desc: SS1G_06601 [Sclerotinia sclerotiorum 1980] gi|154704379|gb|EDO04118.1| SS1G_06601 [Sclerotinia sclerotiorum 1980]
  misc_feature (8)..(507): NCBI GI: 171687421 Blast Desc: protein product [Podospora anserina] gi|170943672|emb|CAP69324.1| protein product [Podospora anserina]
  misc_feature (13)..(489): NCBI GI: 242768292 Blast Desc: ammonium transporter (Mep2), [Talaromyces stipitatus ATCC 10500] gi|218724735|gb|EED24152.1| ammonium transporter (Mep2), [Talaromyces stipitatus ATCC 10500]
  misc_feature (13)..(464): NCBI GI: 212542533 Blast Desc: ammonium transporter (Mep2), [Penicillium marneffei ATCC 18224] gi|210066328|gb|EEA20421.1| ammonium transporter (Mep2), [Penicillium marneffei ATCC 18224]
  misc_feature (8)..(486): NCBI GI: 17221150 Blast Desc: high affinity ammonium transporter [Tuber borchii]
  misc_feature (34)..(500): NCBI GI: 256735194 Blast Desc: [Nectria haematococca mpVI 77-13-4]
  misc_feature (15)..(488): NCBI GI: 119495796 Blast Desc: ammonium transporter, [Neosartorya fischeri NRRL 181] gi|119412837|gb|EAW22778.1| ammonium transporter, [Neosartorya fischeri NRRL 181]
  misc_feature (15)..(485): NCBI GI: 121701807 Blast Desc: ammonium transporter, [Aspergillus clavatus NRRL 1] gi|119397311|gb|EAW07742.1| ammonium transporter, [Aspergillus clavatus NRRL 1]
  misc_feature (19)..(480): NCBI GI: 115491497 Blast Desc: ammonium transporter MEP2 [Aspergillus terreus NIH2624] gi|114197236|gb|EAU38936.1| ammonium transporter MEP2 [Aspergillus terreus NIH2624]
  misc_feature (15)..(488): NCBI GI: 145239581 Blast Desc: An08g03200 [Aspergillus niger] gi|134076948|emb|CAK45357.1| protein product [Aspergillus niger]
  misc_feature: Useful for introducing or modulating the production of volatile compounds
MVVVDGVDLEALDYVQKYPYNGTIPTGGDSLNENLNIFYESGDIGWMITATALVLLMIPGVGFFYSGLARRKSALSLIWLSVMATAVTTFQWFFWGYSLTFSHHASSFIGDLSNFGFKDVLGAPSVGSTRVPDLLFAVYQGMFSAITVALATGAVAERGRMLPCVIFMLIWSTLIYDPIACWTWNPAGWSNKLGGLDFAGGTPVHIASGSAALAYSMMLGKRRGHGTHELNYRPHNVTHIVIGTVFLWVGWFGFNAGSALAANLRAVMAAVVTNLAACCGGITWCVIDYRLERKWSTVGFCSGVIAGLVAITPGSGYVPSWAAVPFGVLGALFANYATKLKFVLQIDDALDIFAVHAVGGIVGNILTGFFAADYIAHLDGASVIPGGWLNHHWIQLAYQLADSVAGGVYSFGGTVIILFVINLIPGLKLRATEDAEILGIDDAEIGEFAYDYVELTREVLNDIEENDDHSRYSMMEGNQTFDPREKNSIPLIDARGFAGQSSMSRAHAQ

SEQ ID NO: 9075 - DNA, 1863 bp, Muscodor strobelii
  misc_feature: SGI EST ID NO. CUFF.22028.2
  misc_feature: Variant of the nucleotide sequence at SEQ ID NO 9073
tgcatatcgtcatgctgccgtccactctttattaacctttgctcttcaccaaccctggccgcccgaatccattgacacatttttacctaacagattcttttgaacctccagctgaaatcctcagcagagcctcactacgcaacaactcgagattggtgtggactataatattttgtctagttgaacgtgacggtcatcgcaactatggtcgtggtggacggcgtcgacctcgaagctttggactatgtccagaaatatccttacaatggcacgatcccgacgggaggagattccttaaacgagaatctcaatattttctacgagtctggggatattggttggatgatcacagcaaccgccttggtgctactgatgattccaggcgttggcttcttctattccgggctggctagacgcaagtctgccctttctttgatatggctttctgttatggccacagctgtcacgacttttcaatggttcttttggggctactcccttaccttttcacatcatgccagttcattcattggtgatctttcaaattttggtttcaaggacgtcctcggtgctccatccgttggctcaactcgagttcccgacctcctattcgcagtctatcagggcatgttttctgccataaccgttgcgcttgccactggtgctgtcgctgaacgtggaaggatgttgccttgtgttatttttatgttaatatggtcaacacttatttacgaccctatcgcctgttggacttggaaccctgctggatggtcgaataaacttggcgggttggatttcgccggcggtacacccgtccacattgcctctggctctgcagcacttgcctactctatgatgcttggcaaacgacgaggccatggcacccacgagctgaactatcgccctcacaacgtaacgcatattgtgattgggaccgtattcctgtgggttggctggttcggtttcaatgctggtagcgctctcgctgccaatctacgggcagtcatggccgcagtagtgactaatctcgctgcatgttgtggtggtatcacctggtgcgtgatcgattatcggttggaacgcaaatggtctactgtcgggttctgctctggtgtaattgctggtctagttgccattacacctggatcaggctacgttccgtcttgggccgcggtaccttttggagtgctcggggccctttttgccaactacgccaccaaactcaagttcgttcttcagatcgacgacgccctagatatctttgccgtccatgccgtcggtggcatcgttgggaacattcttaccggatttttcgctgccgattacattgcacaccttgatggggcctctgtcataccgggtggttggctgaatcatcactggattcaacttgcgtatcagttggccgattccgtcgctggtggtgtctactctttcggcggcacagtcataatacttttcgtcatcaatctcattccaggtttgaaactccgtgcgacagaagacgctgagattttgggcatcgatgacgctgaaattggcgagtttgcatacgactacgtcgagctgacgcgagaggtcttgaatgatatcgaggagaacgacgatcacagccgctattcgatgatggaaggcaaccaaactttcgacccacgggagaagaatagtattccgttaattgatgcaaggggttttgcggggcaatcatcaatgtctcgtgctcatgctcaatagatctttgggttgtttcagatagggctttatgtatattactaatcacgtcttctattccgctgaatgaatacttagacaagtccaatatgtatattttaacggctttgcctctgtgttgccttcggtccc

SEQ ID NO: 9076 - DNA, 804 bp, Muscodor strobelii
  misc_feature: SGI cDNA ID NO. 562822
  misc_feature: Encodes the peptide sequence at SEQ ID NO 9077
atgtctgattccgaatcgggttctaagagagagaaattcaagtctttctttaaggcggggctctctaaaggtatcaccaaaggcaaagaggagctcacgaaaggaaagctacatttgcagcacgccataggcttaggacaccagcccaatgttgtacccgagggcgagcccggagtgctggatgagcgacgaacagtagcaatcggttggcatcctgtcccaggtgcagcatggttggcccaaagcagcctcggcaaattgatcacagacaaaatcaataaatatccagacccaacacaacactgggcaattctagttggaggaaaaataactaacgcaccacctttgcggataccagactattgccatcaactatggatggatgagaacttggatgtcatctacatcaatggcaagttggaaggcagcggctggaccacgtatgaaattgggcacacgaaactcaatgatcaagccctcagggaagctggcgagatgaccatatacaatatgagagagagacagaaaggctacaatctcatcactaataattgccaaaacttcgccttgaatatgttggacgctatccaagttgggaagcacaagcaatttggcacagcaatggcgatctatcagcgagctactggcaaaggtgctgtcagtgatctcttcctggcaaagctacccgaagcggaggaacaggacgatgtgtcaacagaacaagtcgtcaacaatgcatctaaggtaatggatgagaatacaacgcaattggacgcacatgaaacgccgaacatttcgcgttga

SEQ ID NO: 9077 - protein, 267 aa, Muscodor strobelii
  misc_feature: SGI Peptide ID NO. 562822
  misc_feature (1)..(261): NCBI GI: 116204971 Blast Desc: CHGG_10369 [Chaetomium globosum CBS 148.51] gi|88176497|gb|EAQ83965.1| CHGG_10369 [Chaetomium globosum CBS 148.51]
  misc_feature (1)..(258): NCBI GI: 256722620 Blast Desc: NECHADRAFT_72124 [Nectria haematococca mpVI 77-13-4]
  misc_feature (3)..(258): NCBI GI: 46118876 Blast Desc: FG04737.1 [Gibberella zeae PH-1]
  misc_feature (34)..(225): NCBI GI: 169606136 Blast Desc: SNOG_06102 [Phaeosphaeria nodorum SN15] gi|111064813|gb|EAT85933.1| SNOG_06102 [Phaeosphaeria nodorum SN15]
  misc_feature (9)..(261): NCBI GI: 261358745 Blast Desc: conserved [Verticillium albo-atrum VaMs.102]
  misc_feature (26)..(193): NCBI GI: 85100807 Blast Desc: NCU01124 [Neurospora crassa OR74A] gi|7635875|emb|CAB88591.1| [Neurospora crassa] gi|28922568|gb|EAA31795.1| [Neurospora crassa OR74A]
  misc_feature (47)..(261): NCBI GI: 85093626 Blast Desc: NCU05755 [Neurospora crassa OR74A] gi|28921181|gb|EAA30494.1| [Neurospora crassa OR74A]
  misc_feature (96)..(196): NCBI GI: 169869506 Blast Desc: [Coprinopsis cinerea okayama7#130] gi|116497594|gb|EAU80489.1| [Coprinopsis cinerea okayama7#130]
MSDSESGSKREKFKSFFKAGLSKGITKGKEELTKGKLHLQHAIGLGHQPNVVPEGEPGVLDERRTVAIGWHPVPGAAWLAQSSLGKLITDKINKYPDPTQHWAILVGGKITNAPPLRIPDYCHQLWMDENLDVIYINGKLEGSGWTTYEIGHTKLNDQALREAGEMTIYNMRERQKGYNLITNNCQNFALNMLDAIQVGKHKQFGTAMAIYQRATGKGAVSDLFLAKLPEAEEQDDVSTEQVVNNASKVMDENTTQLDAHETPNISR

SEQ ID NO: 9078 - DNA, 378 bp, Muscodor strobelii
  misc_feature: SGI EST ID NO. CUFF.21597.0
  misc_feature: Variant of the nucleotide sequence at SEQ ID NO 9076
ctggacctgccccctggttcgcaaatcgattagacttccactagccaatcacaaagatgtctgattccgaatcgggttctaagagagagaaattcaagtctttctttaaggcggggctctctaaaggtatcaccaaaggcaaagaggagctcacgaaaggaaagctacatttgcagcacgccataggcttaggacaccagcccaatgttgtacccgagggcgagcccggagtgctggatgagcgacgaacagtagcaatcggttggcatcctgtcccaggtgcagcatggttggcccaaagcagcctcggcaaattgatcacagacaaaatcaataaatatccagacccaacacaacactgggcaattctagttggag

SEQ ID NO: 9079 - DNA, 924 bp, Muscodor strobelii
  misc_feature: SGI cDNA ID NO. 562823
  misc_feature: Encodes the peptide sequence at SEQ ID NO 9080
atgtctgattccgaatcgggttctaagagagagaaattcaagtctttctttaaggcggggctctctaaaggtatcaccaaaggcaaagaggagctcacgaaaggaaagctacatttgcagcacgccataggcttaggacaccagcccaatgttgtacccgagggcgagcccggagtgctggatgagcgacgaacagtagcaatcggttggcatcctgtcccaggtgcagcatggttggcccaaagcagcctcggcaaattgatcacagacaaaatcaataaatgccggaaggttcctgtttgcttctcttcgttccttacacgagacatcattgtctcaagtcatttaatatcatataacaacgagttggaggtgattgagcctgtcaaatatcaggaatcaatccttcgcccaaaccctacggccccgcaggggaaatcgagaaaaataactaacgcaccacctttgcggataccagactattgccatcaactatggatggatgagaacttggatgtcatctacatcaatggcaagttggaaggcagcggctggaccacgtatgaaattgggcacacgaaactcaatgatcaagccctcagggaagctggcgagatgaccatatacaatatgagagagagacagaaaggctacaatctcatcactaataattgccaaaacttcgccttgaatatgttggacgctatccaagttgggaagcacaagcaatttggcacagcaatggcgatctatcagcgagctactggcaaaggtgctgtcagtgatctcttcctggcaaagctacccgaagcggaggaacaggacgatgtgtcaacagaacaagtcgtcaacaatgcatctaaggtaatggatgagaatacaacgcaattggacgcacatgaaacgccgaacatttcgcgttga

SEQ ID NO: 9080 - protein, 307 aa, Muscodor strobelii
  misc_feature: SGI Peptide ID NO. 562823
  misc_feature (1)..(301): NCBI GI: 116204971 Blast Desc: CHGG_10369 [Chaetomium globosum CBS 148.51] gi|88176497|gb|EAQ83965.1| CHGG_10369 [Chaetomium globosum CBS 148.51]
  misc_feature (1)..(298): NCBI GI: 256722620 Blast Desc: NECHADRAFT_72124 [Nectria haematococca mpVI 77-13-4]
  misc_feature (3)..(298): NCBI GI: 46118876 Blast Desc: FG04737.1 [Gibberella zeae PH-1]
  misc_feature (34)..(265): NCBI GI: 169606136 Blast Desc: SNOG_06102 [Phaeosphaeria nodorum SN15] gi|111064813|gb|EAT85933.1| SNOG_06102 [Phaeosphaeria nodorum SN15]
  misc_feature (9)..(301): NCBI GI: 261358745 Blast Desc: conserved [Verticillium albo-atrum VaMs.102]
  misc_feature (26)..(233): NCBI GI: 85100807 Blast Desc: NCU01124 [Neurospora crassa OR74A] gi|7635875|emb|CAB88591.1| [Neurospora crassa] gi|28922568|gb|EAA31795.1| [Neurospora crassa OR74A]
  misc_feature (158)..(301): NCBI GI: 85093626 Blast Desc: NCU05755 [Neurospora crassa OR74A] gi|28921181|gb|EAA30494.1| [Neurospora crassa OR74A]
MSDSESGSKREKFKSFFKAGLSKGITKGKEELTKGKLHLQHAIGLGHQPNVVPEGEPGVLDERRTVAIGWHPVPGAAWLAQSSLGKLITDKINKCRKVPVCFSSFLTRDIIVSSHLISYNNELEVIEPVKYQESILRPNPTAPQGKSRKITNAPPLRIPDYCHQLWMDENLDVIYINGKLEGSGWTTYEIGHTKLNDQALREAGEMTIYNMRERQKGYNLITNNCQNFALNMLDAIQVGKHKQFGTAMAIYQRATGKGAVSDLFLAKLPEAEEQDDVSTEQVVNNASKVMDENTTQLDAHETPNISR

SEQ ID NO: 9081 - DNA, 378 bp, Muscodor strobelii; identical to SEQ ID NO: 9078
  misc_feature: SGI EST ID NO. CUFF.21597.0
  misc_feature: Variant of the nucleotide sequence at SEQ ID NO 9079

SEQ ID NO: 9082 - DNA, 504 bp, Muscodor strobelii
  misc_feature: SGI cDNA ID NO. 562824
  misc_feature: Encodes the peptide sequence at SEQ ID NO 9083
atgggctgtccatcggatcttgcggttgcaatcacatcgagaaacgcaaaatacgggcagtatgtagattgcaaggaatgggagaaactcacaacggaaattgtcctaccagactgcagatggagaatctgcgacatcaaaggcacgccgctcgtcagccaaggcaaaccattatcatgggattcagcagcggaatacctcgaatattttcccagggtgctggcccagatgaactcattacacatgttcggtattggagagtttgagcaaatcgacgacgacacaatcaatgctgtgttctcgatggaggatcagcttgtgaacaagcagttgggtacgtgggctgagctacggggtggtggatttgctttccagacgtggaaacgacgggatggcgactggtatttgcaggaattggtggtcaagaggacttatcagaagatgtcggcgcttgtgtcgttcgctgttttcttgcaggagaaacttgggattcccatgatgtga

SEQ ID NO: 9083 - protein, 167 aa, Muscodor strobelii
  misc_feature: SGI Peptide ID NO. 562824
  misc_feature (6)..(162): NCBI GI: 256724359 Blast Desc: NECHADRAFT_102143 [Nectria haematococca mpVI 77-13-4]
  misc_feature (1)..(148): NCBI GI: 46118186 Blast Desc: FG04691.1 [Gibberella zeae PH-1]
  misc_feature (11)..(149): NCBI GI: 85102739 Blast Desc: NCU01292 [Neurospora crassa OR74A] gi|28922923|gb|EAA32142.1| [Neurospora crassa OR74A] gi|28950094|emb|CAD70857.1| [Neurospora crassa]
  misc_feature (10)..(148): NCBI GI: 145608232 Blast Desc: MGG_03272 [Magnaporthe grisea 70-15] gi|145015727|gb|EDK00217.1| MGG_03272 [Magnaporthe grisea 70-15]
  misc_feature (51)..(148): NCBI GI: 46102636 Blast Desc: FG00022.1 [Gibberella zeae PH-1]
MGCPSDLAVAITSRNAKYGQYVDCKEWEKLTTEIVLPDCRWRICDIKGTPLVSQGKPLSWDSAAEYLEYFPRVLAQMNSLHMFGIGEFEQIDDDTINAVFSMEDQLVNKQLGTWAELRGGGFAFQTWKRRDGDWYLQELVVKRTYQKMSALVSFAVFLQEKLGIPMM

SEQ ID NO: 9084 - DNA, 249 bp, Muscodor strobelii
  misc_feature: SGI EST ID NO. CUFF.21602.0
  misc_feature: Variant of the nucleotide sequence at SEQ ID NO 9082
cggcgcttgtgtcgttcgctgttttcttgcaggagaaacttgggattcccatgatgtgattgcaagtggccattacacacgacaaactgtatcatacacgaagagcgatccgatgctcagcgaaggttgagacgacatcacagtattctgttttcctcacattggattttcacgattttagctagcacttttattatttgaaggcgttggtgtttgggtcctaccggttttccgcccggagtaataagg

SEQ ID NO: 9085 - DNA, 1917 bp, Muscodor strobelii
  misc_feature: SGI cDNA ID NO. 562825
  misc_feature: Encodes the peptide sequence at SEQ ID NO 9086
atggcacatagatgcgctctcattctttcccttatcttgtgtcttgtcctatggacccacgagagtctgggtggtggtgtccagtatgactatgggggtaatttcgacttgcggaacttcaaacgagacttgagccagtcctcagtcgtagttggagctccacttcttgatggtgaacctcaacccagactagagatccgagagcttgagaaagaccaagcggcatggaccctttacctcctagctcagagctggatgcagtacacgccacaggagtctccgttctcgtggtaccagatggcaggcattcatggtgcacccggtctgacctggggcaatgtcaacgcgactcctggaaatgaggacagcggatattgtcaccatgtctctatcctctttcctacctggcatcggccgtatctcgccctgtacgaacaaaccatgtaccagcttgttcagttcatttctgctctgtatcctcctgaagacctcgatcgctaccaacgtgccgcgaagagatttcgcttgccgtattgggattgggctctcgtacctcctgaaggagaaagtgtcctaccgctcagcgtgggcggctccccaaatgtgaacgtttcgggtccaaatggcgttcagaatatttcaaacccacttttcagttatacatttaggcccttcaatgggtccatctttccaaatactccgtacaatacatggaacgagaccaaacgcgcgcctttcccacaacaggctcctgatgctatctctaataactcagctgttgcgagtgctctcgacgctcatctgccatcatatcagcaacggttgtataacctattcgccaactacgataattataccaaattctccaacgaagcatggattggcaaaaatgaaatcaacgattctttcgattcgatagagtcactacacgactcgatccacaccattgggggcggctcatggggacatttggccatcattgcatattcggcatttgaccctctcttcttcctgcaccacgccaatgtcgacaggatattcgccatgtggcaagtgctttacaatggtacttatgtcgtgcccactgcagctaactattcaacccacacgcaaaaggtgggcgcgattgaggatatcgatacgccgctcacgccgtttttctcgaacacgagttcattctggacgtcagacatgatccgggatcacacagtttttggttatacatacgcggatgtcgccaataagagtcgcggtgacgtagtcggcgtcataaatcgcatgtatacagattatagtccagcaaacatatctctacgcgagatatggcaagggctagaggatgctcatccatctagtcatgacccaattatacaatcggcaggtcaaccgaaatccctctcggtaagggcgctggcctggcagcataactggcgaagcaatatacccgccaaagctgtgtttcaaggcaattcgtaccgcgaatggatcgcgaacatcgcagtcaagaaacattccctgaggacctccttcttgatacacttattttttggagccgtgccaggagacagctctacatggaaaacttcggacaatctcgtcggaagtttgggagtattcgccaacaacaaagccatgaagaacgagggcacaataacgggaacaataccactaacgtcggcattggtgaacatggttgcctccggacacatctcaagtctagacacggaggacgttgaacctttcctcaaaatgatgttggagatgagaatagctttgatcaatggaacagtggtcgaagccaaagacgtcgacggacttggcgtcagcattgtcagctcattggtcgctgctccgacgaagaaagacgaacttagcgcatggggcgaagtcgaggcccattttgatctgttcccataa

SEQ ID NO: 9086 - protein, 638 aa, Muscodor strobelii
  misc_feature: SGI Peptide ID NO. 562825
  misc_feature (47)..(416): Pfam Id: PF00264 Pfam Desc: Common central domain of tyrosinase
  misc_feature (72)..(188): Pfam Id: PF00264 Pfam Desc: Common central domain of tyrosinase
  misc_feature (307)..(366): Pfam Id: PF00264 Pfam Desc: Common central domain of tyrosinase
  misc_feature (29)..(637): NCBI GI: 171696210 Blast Desc: protein product [Podospora anserina] gi|170948347|emb|CAP60511.1| protein product [Podospora anserina]
  misc_feature (1)..(636): NCBI GI: 116181612 Blast Desc: CHGG_01434 [Chaetomium globosum CBS 148.51] gi|88185731|gb|EAQ93199.1| CHGG_01434 [Chaetomium globosum CBS 148.51]
  misc_feature (4)..(565): NCBI GI: 85115169 Blast Desc: NCU08615 [Neurospora crassa OR74A] gi|28926618|gb|EAA35587.1| [Neurospora crassa OR74A]
  misc_feature (63)..(636): NCBI GI: 156034857 Blast Desc: SS1G_13364 [Sclerotinia sclerotiorum 1980] gi|154698767|gb|EDN98505.1| SS1G_13364 [Sclerotinia sclerotiorum 1980]
  misc_feature (7)..(636): NCBI GI: 145613512 Blast Desc: MGG_01571 [Magnaporthe grisea 70-15] gi|145020583|gb|EDK04712.1| MGG_01571 [Magnaporthe grisea 70-15]
  misc_feature (63)..(637): NCBI GI: 154291827 Blast Desc: BC1G_14990 [Botryotinia fuckeliana B05.10] gi|150846598|gb|EDN21791.1| BC1G_14990 [Botryotinia fuckeliana B05.10]
  misc_feature (29)..(620): NCBI GI: 256729828 Blast Desc: NECHADRAFT_47204 [Nectria haematococca mpVI 77-13-4]
  misc_feature (57)..(618): NCBI GI: 156030474 Blast Desc: tyrosinase precursor [Sclerotinia sclerotiorum 1980] gi|154700852|gb|EDO00591.1| tyrosinase precursor [Sclerotinia sclerotiorum 1980]
  misc_feature (63)..(636): NCBI GI: 154291271 Blast Desc: BC1G_15125 [Botryotinia fuckeliana B05.10] gi|150847028|gb|EDN22221.1| BC1G_15125 [Botryotinia fuckeliana B05.10]
  misc_feature (4)..(612): NCBI GI: 46122501 Blast Desc: FG05628.1 [Gibberella zeae PH-1]
  misc_feature (57)..(573): SWISSPROT Homolog: EC 1.14.18.1 Monophenol monooxygenase
MAHRCALILSLILCLVLWTHESLGGGVQYDYGGNFDLRNFKRDLSQSSVVVGAPLLDGEPQPRLEIRELEKDQAAWTLYLLAQSWMQYTPQESPFSWYQMAGIHGAPGLTWGNVNATPGNEDSGYCHHVSILFPTWHRPYLALYEQTMYQLVQFISALYPPEDLDRYQRAAKRFRLPYWDWALVPPEGESVLPLSVGGSPNVNVSGPNGVQNISNPLFSYTFRPFNGSIFPNTPYNTWNETKRAPFPQQAPDAISNNSAVASALDAHLPSYQQRLYNLFANYDNYTKFSNEAWIGKNEINDSFDSIESLHDSIHTIGGGSWGHLAIIAYSAFDPLFFLHHANVDRIFAMWQVLYNGTYVVPTAANYSTHTQKVGAIEDIDTPLTPFFSNTSSFWTSDMIRDHTVFGYTYADVANKSRGDVVGVINRMYTDYSPANISLREIWQGLEDAHPSSHDPIIQSAGQPKSLSVRALAWQHNWRSNIPAKAVFQGNSYREWIANIAVKKHSLRTSFLIHLFFGAVPGDSSTWKTSDNLVGSLGVFANNKAMKNEGTITGTIPLTSALVNMVASGHISSLDTEDVEPFLKMMLEMRIALINGTVVEAKDVDGLGVSIVSSLVAAPTKKDELSAWGEVEAHFDLFP

SEQ ID NO: 9087 - DNA, 2770 bp, Muscodor strobelii
  misc_feature: SGI EST ID NO. CUFF.21622.0
  misc_feature: Variant of the nucleotide sequence at SEQ ID NO 9085
ccagtgtcaacgctgagtcacttcccaaagtcatgctcgcacaagtacatcatcaagaagaggcagcaagcgggagaggtgcccgattgaggatcggggggcttgccgtaattgaagtatcggtcgtagtttccgcaataatggcttgatagctacggtgattgcctaggacaaacggagtcccggtgcctgctcttctcctactgcaccccaccgacacatcgagatttttcccgcgacgtggaagttctaaacctctgctacatcaagcatctcttgcttgttctgtccgcgacgccgtcattcgttcaactgtcgtcttggttcgatgtcgctccttaccctcggcttcgtttgtcagaggttctccttgccgttttccgcccatcaatacaacgatcaaataattctcagattcgctcttccacacgactactcctgtcactttcacctcgaagtatcggttgtgaataccgctgtgcaagcctttgaccttcaggcctcattcgtaggtctagcttcggagagtctgtcagcaagctcagtgtgaaggcatttaattcccccttcgtcctcctcacatcttcgccacctatcagcacacaagattccttgatcgactcttcatttcatattcgcctacaacctggagagcagccgaggccttttttctagtattttgtctaattctttacccacgattctcaacatggcacatagatgcgctctcattctttcccttatcttgtgtcttgtcctatggacccacgagagtctgggtggtggtgtccagtatgactatgggggtaatttcgacttgcggaacttcaaacgagacttgagccagtcctcagtcgtagttggagctccacttcttgatggtgaacctcaacccagactagagatccgagagcttgagaaagaccaagcggcatggaccctttacctcctagctcagagctggatgcagtacacgccacaggagtctccgttctcgtggtaccagatggcaggtgagaagtcgctcagctgcaacatcgtctggctgatgctaacctagagcaggcattcatggtgcacccggtctgacctggggcaatgtcaacgcgactcctggaaatgaggacagcggatattgtcaccatgtctctatcctctttcctacctggcatcggccgtatctcgccctgtacgaacaaaccatgtaccagcttgttcagttcatttctgctctgtatcctcctgaagacctcgatcgctaccaacgtgccgcgaagagatttcgcttgccgtattgggattgggctctcgtacctcctgaaggagaaagtgtcctaccgctcagcgtgggcggctccccaaatgtgaacgtttcgggtccaaatggcgttcagaatatttcaaacccacttttcagttatacatttaggcccttcaatgggtccatctttccaaatactccgtacaatacatggaacgagaccaaacgcgcgcctttcccacaacaggctcctgatgctatctctaataactcagctgttgcgagtgctctcgacgctcatctgccatcatatcagcaacggttgtataacctattcgccaactacgataattataccaaattctccaacgaagcatggattggcaaaaatgaaatcaacgattctttcgattcgatagagtcactacacgactcgatccacaccattgggggcggctcatggggacatttggccatcattgcatattcggcatttgaccctctcttcttcctgcaccacgccaatgtcgacaggatattcgccatgtggcaagtgctttacaatggtacttatgtcgtgcccactgcagctaactattcaacccacacgcaaaaggtgggcgcgattgaggatatcgatacgccgctcacgccgtttttctcgaacacgagttcattctggacgtcagacatgatccgggatcacacagtttttggttatacatacgcggatgtcgccaataagagtcgcggtgacgtagtcggcgtcataaatcgcatgtatacagattatagtccagcaaacatatctctacgcgagatatggcaagggctagaggatgctcatccatctagtcatgacccaattatacaatcggcaggtcaaccgaaatccctctcggtaagggcgctggcctggcagcataactggcgaagcaatatacccgccaaagctgtgtttcaaggcaattcgtaccgcgaatggatcgcgaacatcgcagtcaagaaacattccctgaggacctccttcttgatacacttattttttggagccgtgccaggagacagctctacatggaaaacttcggacaatctcgtcggaagtttgggagtattcgccaacaacaaagccatgaagaacgagggcacaataacgggaacaataccactaacgtcggcattggtgaacatggttgcctccggacacatctcaagtctagacacggaggacgttgaacctttcctcaaaatgatgttggagatgagaatagctttgatcaatggaacagtggtcgaagccaaagacgtcgacggacttggcgtcagcattgtcagctcattggtcgctgctccgacgaagaaagacgaacttagcgcatggggcgaagtcgaggcccattttgatctgttcccataagaaataatcatttttgtaaccactctgccaaactgttgggctctcattagatagaacggctataatttgctcttaattctactctatttcga

SEQ ID NO: 9088 - DNA, 3771 bp, Muscodor strobelii
  misc_feature: SGI cDNA ID NO. 562826
  misc_feature: Encodes the peptide sequence at SEQ ID NO 9089
atggctcgaccgaaaccctccaagccgtctaaacacacggcgagcagcgcaaccagcacgacctgggaccaccagtacaacacgcttcgccgcgagaatctgttcagaaaccctcccaccgaccactccgcttatccccttctccagcaagccgtcaatccacatatcgagtccttcgatgccctcttcagccccggcggtcttatcgaccgtggccttgacgacataggctccaagctgtttctcgacggcgacgaccagacgctgctccaggcacgaaacaggctagacatcagatgcacaagtgtccacctgcaaaaatcgctcttgcctcctagtaataaatttgcggtcaaaaacagagaaatccttcctgccgagtgtcgagagcgtcatgtatcctatcggggcaagctgtccgccaccttcgagtatcgcatcaacaatggcgaagccaagcaattcaccagagagctgggaaacctccctataatggtcaaatcagagtattgtcaccttagaggtaacagtccagcccaactggtggcccgcaaagaagaatccgaggagctcggcgggtacttcatagtcaatggcattgagaagatcatacgactcctcctcatgaacagacggaactttcccttagccatcaatcgtcccagtttcacgaatcgtggccatgactacaccccgtttggtatcatcataaggtcggtgcgcccagacgaaacgtcccagaccaacgttctccattatttgaaggatggcaacataactttccgcttttcctggagaaagaacgagtatctcataccggtaatgatgatcttgaaggcgctcacggagaccaacgaccgcgaggtctttgagggcctcgtcggttccccacattccaagggtgtgacgaacacttttctcacagaccgtgtggagcttctacttcgcacatataagagctatggattgtacagcatgcaaaagactcgagcctaccttggagagaaatttcggccggtcttgggtgtaccggaaacactgtccaattacgaagttgggaccgaattcctgcgcagaattattctcgttcatcttggaaatgtcaacgtgaccgaagaacaatgctccgacaagttccgtatgattctcctgatgatcagaaagctctatgctcttgttgctggtgattgcacagtggataatcccgatgctgttcagaatcaagaaatcctgctcggtggattcctgtacggccagattatcaaagaacggatagacgacgtactggctactcaactccgcacggcgcttcgcgactacttcagacgctcgccgtcgcgtacattcacatcggacgagttttcaaaagatttcccgacgaagatcttcgccaagacgaacgaaaatgttggccaagcactggagtatttcctttcaactggcaatctatctagtccctccggcctggaccttcaacaggtttccggttttacagttgtagccgagaagctcaatttccttcgcttcatcagtcatttccgaatggttcacagaggtagtttctttgctcaactcaaaacaaccaccgtgcgaaagcttttaccagaatcgtgggggtttttgtgtcccgttcatacccctgatggctcaccctgtggtctgctcaaccatcttgctcacaaatgcaagattatgacccattcagttgatgccgggacggtccccaagcttgccgctgagctcggcgttgttgatacatcttccgccgctacagacgagagcgtcgtggtaatgctaaacggccgcatattaggatggtgcaaaccgtccgagtcgaggcggatagctgataccttcagatattggaaagtggagggttcccatggaatacctctgcaactcgaaattggccatgtgcccgcatctaacggtggatcttatccaggaatctttatgtctgcagagccttctagaatggtgcggcccgttaagtatctaccattagagaaagaagatttcgtcggaacacacgaacagccctatatgtctatcgcttgtactgagcaggaggttgtctctggccagtctacccatgttgaatttgaccctaccaacattctttcgatcctcgccaacatgacaccattttcggatttcaaccagtcgcctagaaatatgtaccaatgtcagatgggtaaacaaaccatgggaacacccggaacatccttggcgtatcgcacagacaataagatgtatcgtctccaaactgggcagacgccagtcgttcgatctcccctccataatgcttatggcttcgacaactttcccaacggtaccaatgctgtcgttgctgttatttcatacactggatatgatatggacgacgccatgattctgaataaatcagcgcacgaaagaggcttcggtcatggaaccatttataaaactaaaaagtacacgatcaaggacgccaaagacgagaaacgcggcatttcaatcaagaacgcaacgaagctctttggctatgcaccaggcggtactgtgaacgcgtggacacagtctatgctagatgatgatggtcttcctcaagtgggccgccaagtacaggaaggtgacatcctctttgcctaccatgaagttgtcgcagattatagtggaaatctcatcagccgagatggtaacacaaagtatgagaagtataaggactctgaacaggcgttcatcgaagaggtccgaatcattggcaatgagtcaggtaatgaacccgctcaaacaatttcaatcaagtttcgcataccccgatcaccgatcattggcgacaaattttcctcgaggcacggccaaaagggtgtctgctcacaaaagtggcctgcgattgatatgcccttctctgagtcgggcatgcagcctgatattatcattaaccctcacgctttcccgtctcgcatgacgattggtatgttcgtggagtcgcttgcgggaaaatccggtgctcttcatgggctggctcaagattcgacacctttcagattcgatgaagagaacacggcagcagactatttcggccatcagctcatgaaggcaggctataattatcacggcaacgagcccatgtattcaggtattacaggtgaagagctggcggcagacatctacattggtgtcgtgtactaccagcggttacggcacatggttaacgataaataccaagtcagaaccacgggcccggtagtcgctacaactggtcaaccaatcaagggtaggaagcgcggtggtggtattcgcgtgggtgaaatggaaagagacgcattgttggcccacggtactgcattccttctacaagaccgcctcttaaactgctcggactacacaccgtcatgggtctgccgtaggtgcggttcctttttatcggtgcagcctaccgtcactccctttagcgggaggaagaaggtggttaacacagtgcgatgccgcaactgtgcgaaacgcgtagatctcctgccggaggctgaaatcagtaaaatcacgggcgagatctgggaagacggacaaggaaaccaatgggtgggtggagaagataccaccaaagtcgctgtgccaggagcactgaagtatctcgacgtagaactagcggcgatgggagtgaaactcaagtatcgagtagatcccaaggatgcgccccgaaaaggacggttgcaacagaagacattcgagagtcttggtctcggaggcatgcccaatggccaccctcgagctatcaccgcggcctag

SEQ ID NO: 9089 - protein, 1256 aa, Muscodor strobelii
  misc_feature: SGI Peptide ID NO. 562826
  misc_feature (662)..(703): Pfam Id: PF04567 Pfam Desc: RNA polymerase Rpb2, domain 5
  misc_feature (604)..(661): Pfam Id: PF06883 Pfam Desc: RNA polymerase I, Rpa2 specific domain
  misc_feature (50)..(481): Pfam Id: PF04563 Pfam Desc: RNA polymerase beta subunit
  misc_feature (211)..(411): Pfam Id: PF04561 Pfam Desc: RNA polymerase Rpb2, domain 2
  misc_feature (499)..(565): Pfam Id: PF04565 Pfam Desc: RNA polymerase Rpb2, domain 3
  misc_feature (708)..(1090): Pfam Id: PF00562 Pfam Desc: RNA polymerase Rpb2, domain 6
  misc_feature (1092)..(1222): Pfam Id: PF04560 Pfam Desc: RNA polymerase Rpb2, domain 7
  misc_feature (118)..(205): Pfam Id: PF04563 Pfam Desc: RNA polymerase beta subunit
  misc_feature (211)..(296): Pfam Id: PF04561 Pfam Desc: RNA polymerase Rpb2, domain 2
  misc_feature (332)..(411): Pfam Id: PF04561 Pfam Desc: RNA polymerase Rpb2, domain 2
  misc_feature (1092)..(1133): Pfam Id: PF04560 Pfam Desc: RNA polymerase Rpb2, domain 7
  misc_feature (14)..(1243): NCBI GI: 145613510 Blast Desc: MGG_01572 [Magnaporthe grisea 70-15] gi|145020582|gb|EDK04711.1| MGG_01572 [Magnaporthe grisea 70-15]
  misc_feature (18)..(1242): NCBI GI: 85115172 Blast Desc: DNA-directed RNA polymerase I 135 kDa polypeptide [Neurospora crassa OR74A] gi|51704242|sp|O74633.2|RPA2_NEUCR RecName: Full=DNA-directed RNA polymerase I subunit RPA2; RNA I I
  misc_feature (18)..(1242): NCBI GI: 3668171 Blast Desc: RNA polymerase I second-largest subunit [Neurospora crassa]
  misc_feature (14)..(1233): NCBI GI: 171696212 Blast Desc: protein product [Podospora anserina] gi|170948348|emb|CAP60512.1| protein product [Podospora anserina]
  misc_feature (14)..(1233): NCBI GI: 261357336 Blast Desc: DNA-directed RNA polymerase I subunit RPA2 [Verticillium albo-atrum VaMs.102]
  misc_feature (14)..(1240): NCBI GI: 116181610 Blast Desc: CHGG_01433 [Chaetomium globosum CBS 148.51] gi|88185730|gb|EAQ93198.1| CHGG_01433 [Chaetomium globosum CBS 148.51]
  misc_feature (9)..(1223): NCBI GI: 154291829 Blast Desc: BC1G_14991 [Botryotinia fuckeliana B05.10] gi|150846599|gb|EDN21792.1| BC1G_14991 [Botryotinia fuckeliana B05.10]
  misc_feature (14)..(1243): NCBI GI: 256729829 Blast Desc: [Nectria haematococca mpVI 77-13-4]
  misc_feature (14)..(1243): NCBI GI: 46122499 Blast Desc: FG05627.1 [Gibberella zeae PH-1]
  misc_feature (9)..(1223): NCBI GI: 156034861 Blast Desc: SS1G_13366 [Sclerotinia sclerotiorum 1980] gi|154698769|gb|EDN98507.1| SS1G_13366 [Sclerotinia sclerotiorum 1980]
  misc_feature (22)..(1242): SWISSPROT Homolog: EC 2.7.7.6 DNA-directed RNA polymerase
MARPKPSKPSKHTASSATSTTWDHQYNTLRRENLFRNPPTDHSAYPLLQQAVNPHIESFDALFSPGGLIDRGLDDIGSKLFLDGDDQTLLQARNRLDIRCTSVHLQKSLLPPSNKFAVKNREILPAECRERHVSYRGKLSATFEYRINNGEAKQFTRELGNLPIMVKSEYCHLRGNSPAQLVARKEESEELGGYFIVNGIEKIIRLLLMNRRNFPLAINRPSFTNRGHDYTPFGIIIRSVRPDETSQTNVLHYLKDGNITFRFSWRKNEYLIPVMMILKALTETNDREVFEGLVGSPHSKGVTNTFLTDRVELLLRTYKSYGLYSMQKTRAYLGEKFRPVLGVPETLSNYEVGTEFLRRIILVHLGNVNVTEEQCSDKFRMILLMIRKLYALVAGDCTVDNPDAVQNQEILLGGFLYGQIIKERIDDVLATQLRTALRDYFRRSPSRTFTSDEFSKDFPTKIFAKTNENVGQALEYFLSTGNLSSPSGLDLQQVSGFTVVAEKLNFLRFISHFRMVHRGSFFAQLKTTTVRKLLPESWGFLCPVHTPDGSPCGLLNHLAHKCKIMTHSVDAGTVPKLAAELGVVDTSSAATDESVVVMLNGRILGWCKPSESRRIADTFRYWKVEGSHGIPLQLEIGHVPASNGGSYPGIFMSAEPSRMVRPVKYLPLEKEDFVGTHEQPYMSIACTEQEVVSGQSTHVEFDPTNILSILANMTPFSDFNQSPRNMYQCQMGKQTMGTPGTSLAYRTDNKMYRLQTGQTPVVRSPLHNAYGFDNFPNGTNAVVAVISYTGYDMDDAMILNKSAHERGFGHGTIYKTKKYTIKDAKDEKRGISIKNATKLFGYAPGGTVNAWTQSMLDDDGLPQVGRQVQEGDILFAYHEVVADYSGNLISRDGNTKYEKYKDSEQAFIEEVRIIGNESGNEPAQTISIKFRIPRSPIIGDKFSSRHGQKGVCSQKWPAIDMPFSESGMQPDIIINPHAFPSRMTIGMFVESLAGKSGALHGLAQDSTPFRFDEENTAADYFGHQLMKAGYNYHGNEPMYSGITGEELAADIYIGVVYYQRLRHMVNDKYQVRTTGPVVATTGQPIKGRKRGGGIRVGEMERDALLAHGTAFLLQDRLLNCSDYTPSWVCRRCGSFLSVQPTVTPFSGRKKVVNTVRCRNCAKRVDLLPEAEISKITGEIWEDGQGNQWVGGEDTTKVAVPGALKYLDVELAAMGVKLKYRVDPKDAPRKGRLQQKTFESLGLGGMPNGHPRAITAA

SEQ ID NO: 9090 - DNA, 4561 bp, Muscodor strobelii
  misc_feature: SGI EST ID NO. CUFF.21612.0
  misc_feature: Variant of the nucleotide sequence at SEQ ID NO 9088
caggcgacatgtagcggatcttgcaacctcgaagtggggagtgctgcagggagcactagaaccgttacgagcatctactgtaggtgccttatgtatgtcagcaaccccaccaacattggagtaaggaggtatcttagttgaagatatcgataaagccctttatcgtatcaacaatcctgataaggtaacttttttttcccgccgcaagttgcgacagctctacagtcaaggaccggtcttccagtccgataaggttgttctcgttttaatcgcctaaataaatgtacgcttgaaagcgcttcgcatgggccactaaacactgacaagcaaccaacccctttggttcagcttgaacaagagccgcagccatggctcgaccgaaaccctccaagccgtctaaacacacggcgagcagcgcaaccagcacgacctgggaccaccagtacaacacgcttcgccgcgagaatctgttcagaaaccctcccaccgaccactccgcttatccccttctccagcaagccgtcaatccacatatcgagtccttcgatgccctcttcagccccggcggtcttatcgaccgtggccttgacgacataggctccaagctgtttctcgacggcgacgaccagacgctgctccaggcacgaaacaggctagacatcagatgcacaagtgtccacctgcaaaaatcgctcttgcctcctagtaataaatttgcggtcaaaaacagagaaatccttcctgccgagtgtcgagagcgtcatgtatcctatcggggcaagctgtccgccaccttcgagtatcgcatcaacaatggcgaagccaagcaattcaccagagagctgggaaacctccctataatggtcaaatcagagtattgtcaccttagaggtaacagtccagcccaactggtggcccgcaaagaagaatccgaggagctcggcgggtacttcatagtcaatggcattgagaagatcatacgactcctcctcatgaacagacggaactttcccttagccatcaatcgtcccagtttcacgaatcgtggccatgactacaccccgtttggtatcatcataaggtcggtgcgcccagacgaaacgtcccagaccaacgttctccattatttgaaggatggcaacataactttccgcttttcctggagaaagaacgagtatctcataccggtaatgatgatcttgaaggcgctcacggagaccaacgaccgcgaggtctttgagggcctcgtcggttccccacattccaagggtgtgacgaacacttttctcacagaccgtgtggagcttctacttcgcacatataagagctatggattgtacagcatgcaaaagactcgagcctaccttggagagaaatttcggccggtcttgggtgtaccggaaacactgtccaattacgaagttgggaccgaattcctgcgcagaattattctcgttcatcttggaaatgtcaacgtgaccgaagaacaatgctccgacaagttccgtatgattctcctgatgatcagaaagctctatgctcttgttgctggtgattgcacagtggataatcccgatgctgttcagaatcaagaaatcctgctcggtggattcctgtacggccagattatcaaagaacggatagacgacgtactggctactcaactccgcacggcgcttcgcgactacttcagacgctcgccgtcgcgtacattcacatcggacgagttttcaaaagatttcccgacgaagatcttcgccaagacgaacgaaaatgttggccaagcactggagtatttcctttcaactggcaatctatctagtccctccggcctggaccttcaacaggtttccggttttacagttgtagccgagaagctcaatttccttcgcttcatcagtcatttccgaatggttcacagaggtagtttctttgctcaactcaaaacaaccaccgtgcgaaagcttttaccagaatcgtgggggtttttgtgtcccgttcatacccctgatggctcaccctgtggtctgctcaaccatcttgctcacaaatgcaagattatgacccattcagttgatgccgggacggtccccaagcttgccgctgagctcggcgttgttgatacatcttccgccgctacagacgagagcgtcgtggtaatgctaaacggccgcatattaggatggtgcaaaccgtccgagtcgaggcggatagctgataccttcagatattggaaagtggagggttcccatggaatacctctgcaactcgaaattggccatgtgcccgcatctaacggtggatcttatccaggaatctttatgtctgcagagccttctagaatggtgcggcccgttaagtatctaccattagagaaagaagatttcgtcggaacacacgaacagccctatatgtctatcgcttgtactgagcaggaggttgtctctggccagtctacccatgttgaatttgaccctaccaacattctttcgatcctcgccaacatgacaccattttcggatttcaaccagtcgcctagaaatatgtaccaatgtcagatgggtaaacaaaccatgggaacacccggaacatccttggcgtatcgcacagacaataagatgtatcgtctccaaactgggcagacgccagtcgttcgatctcccctccataatgcttatggcttcgacaactttcccaacggtaccaatgctgtcgttgctgttatttcatacactggatatgatatggacgacgccatgattctgaataaatcagcgcacgaaagaggcttcggtcatggaaccatttataaaactaaaaagtacacgatcaaggacgccaaagacgagaaacgcggcatttcaatcaagaacgcaacgaagctctttggctatgcaccaggcggtactgtgaacgcgtggacacagtctatgctagatgatgatggtcttcctcaagtgggccgccaagtacaggaaggtgacatcctctttgcctaccatgaagttgtcgcagattatagtggaaatctcatcagccgagatggtaacacaaagtatgagaagtataaggactctgaacaggcgttcatcgaagaggtccgaatcattggcaatgagtcaggtaatgaacccgctcaaacaatttcaatcaagtttcgcataccccgatcaccgatcattggcgacaaattttcctcgaggcacggccaaaagggtgtctgctcacaaaagtggcctgcgattgatatgcccttctctgagtcgggcatgcagcctgatattatcattaaccctcacgctttcccgtctcgcatgacgattggtatgttcgtggagtcgcttgcgggaaaatccggtgctcttcatgggctggctcaagattcgacacctttcagattcgatgaagagaacacggcagcagactatttcggccatcagctcatgaaggcaggctataattatcacggcaacgagcccatgtattcaggtattacaggtgaagagctggcggcagacatctacattggtgtcgtgtactaccagcggttacggcacatggttaacgataaataccaagtcagaaccacgggcccggtagtcgctacaactggtcaaccaatcaagggtaggaagcgcggtggtggtattcgcgtgggtgaaatggaaagagacgcattgttggcccacggtactgcattccttctacaagaccgcctcttaaactgctcggactacacaccgtcatgggtctgccgtaggtgcggttcctttttatcggtgcagcctaccgtcactccctttagcgggaggaagaaggtggttaacacagtgcgatgccgcaactgtgcgaaacgcgtagatctcctgccggaggctgaaatcagtaaaatcacgggcgagatctgggaagacggacaaggaaaccaatgggtgggtggagaagataccaccaaagtcgctgtgccaggagcactgaagtatctcgacgtagaactagcggcgatgggagtgaaactcaagtatcgagtagatcccaaggatgcgccccgaaaaggacggttgcaacagaagacattcgagagtcttggtctcggaggcatgcccaatggccaccctcgagctatcaccgcggcctagagccgacttgaacaaatcaatcacccacactagcatttacatcggaaggagttacaaggaatggaactaggttattcggtggagtgtaccaactccgagaacatgatttcgcgagcaatgagttacgaggcttttactcccgtgattggatttatgtcgtacaaaattcagatcaacccggtgacgaacgccgatatcaaggcacgtaaccgagagacggtgagtctgtctcaaagaaaatttgatatgtgtcgcacataagacggtaggacagacacgcaagccccggtcgctggacatcatgatagtagaataagttaaacagtggccgaaaaggtagatacaaggattgcttgaattcggatgaatgcataggtcagctctggcagatttcgagttcattcatcagtgcatgatcgcgg

SEQ ID NO: 9091 - DNA, 552 bp, Muscodor strobelii
  misc_feature: SGI cDNA ID NO. 562827
  misc_feature: Elevated expression when VOC is produced
  misc_feature: Encodes the peptide sequence at SEQ ID NO 9092
atggcgggtctatttcgcaaagtatacgactggttgctcaggaccttctgggcgagcgagatggatgtaacgatgatcggcttagagaatgcagggaagacctcgttgcttcgcgttttgtcgggaggagagttcacgatcgactccattcctacagtcggcttcaacatgaagcgggtgcagcgcggtcatgtaacaatcaaatgttgggacttgggaggtcagcctcgcttcaggccgatgtgggagagatactgtcgcggcgtgaatgcgatcgttttcatcgtcgacatagcggatcatgctaagctgccagtggccaaagaagagctgcattcgcttatgtcgcagaagactctcgagggtattcctctgctcgttttgggtaacaagtccgatctgcctgataaaatttcggtggatgaattaattgacgccctggacttaaagaccatcgcccatcgggaagtttcctgttatggcataagtgcaaaggaagagacgaatctggacgccgtaatccaatggctcatgaaatgggcgaacagataa

SEQ ID NO: 9092 - protein, 183 aa, Muscodor strobelii
  misc_feature: SGI Peptide ID NO. 562827
  misc_feature (5)..(181): Pfam Id: PF00025 Pfam Desc: ADP-ribosylation factor family
  misc_feature (23)..(133): Pfam Id: PF08477 Pfam Desc: Miro-like protein
  misc_feature (23)..(183): Pfam Id: PF00071 Pfam Desc: Ras family
  misc_feature (5)..(152): Pfam Id: PF00025 Pfam Desc: ADP-ribosylation factor family
  misc_feature (1)..(183): NCBI GI: 116181608 Blast Desc: CHGG_01432 [Chaetomium globosum CBS 148.51] gi|88185729|gb|EAQ93197.1| CHGG_01432 [Chaetomium globosum CBS 148.51]
  misc_feature (1)..(183): NCBI GI: 171696216 Blast Desc: protein product [Podospora anserina] gi|170948350|emb|CAP60514.1| protein product [Podospora anserina]
  misc_feature (1)..(183): NCBI GI: 261357337 Blast Desc: ADP-ribosylation factor 1 [Verticillium albo-atrum VaMs.102]
  misc_feature (1)..(183): NCBI GI: 85115179 Blast Desc: NCU08618 [Neurospora crassa OR74A] gi|28926621|gb|EAA35590.1| NCU08618 [Neurospora crassa OR74A]
  misc_feature (1)..(183): NCBI GI: 255948068 Blast Desc: Pc22g07850 [Penicillium chrysogenum Wisconsin 54-1255] gi|211591818|emb|CAP98073.1| Pc22g07850 [Penicillium chrysogenum Wisconsin 54-1255]
  misc_feature (1)..(183): NCBI GI: 145243296 Blast Desc: An11g01790 [Aspergillus niger] gi|134078854|emb|CAK45913.1| protein product [Aspergillus niger]
  misc_feature (1)..(183): NCBI GI: 212533181 Blast Desc: ADP-ribosylation factor family protein [Penicillium marneffei ATCC 18224] gi|210072111|gb|EEA26200.1| ADP-ribosylation factor family protein [Penicillium marneffei
  misc_feature (1)..(183): NCBI GI: 189191998 Blast Desc: ADP-ribosylation factor family protein [Pyrenophora tritici-repentis Pt-1C-BFP] gi|187973944|gb|EDU41443.1| ADP-ribosylation factor family protein [Pyrenophora Pt-1C-BFP]
  misc_feature (1)..(183): NCBI GI: 121699295 Blast Desc: ADP-ribosylation factor family protein [Aspergillus clavatus NRRL 1] gi|119396115|gb|EAW06547.1| ADP-ribosylation factor family protein [Aspergillus clavatus NRRL 1]
  misc_feature (1)..(183): NCBI GI: 46122495 Blast Desc: FG05625.1 [Gibberella zeae PH-1]
  misc_feature: Useful for introducing or modulating the production of volatile compounds
MAGLFRKVYDWLLRTFWASEMDVTMIGLENAGKTSLLRVLSGGEFTIDSIPTVGFNMKRVQRGHVTIKCWDLGGQPRFRPMWERYCRGVNAIVFIVDIADHAKLPVAKEELHSLMSQKTLEGIPLLVLGNKSDLPDKISVDELIDALDLKTIAHREVSCYGISAKEETNLDAVIQWLMKWANR

SEQ ID NO: 9093 - DNA, 4318 bp, Muscodor strobelii
  misc_feature: SGI EST ID NO. CUFF.21795.1
  misc_feature: Variant of the nucleotide sequence at SEQ ID NO 9091
ttacaacgtcctcgtatttcactaagaatagtacgtgtagtgatccaggaaacgtgaggtatgtgacccgggttggggtggcatcggctctcttcccagtcagtcaatcatgccaatccatccccggtcttgtctttgcgacccgccttttgtctgccactgctacctctcttccccatctaccagtgccagccccgccaggataggataccttaccagctcttggtgttgctctcttcccgagttactagttgcctagctctatttcctcccccatctctctactcttctaatcgacgctggcggcgccaactccgctgcgccctacaagaaacgaatgagacccccgtcctcctagccgctgtgacgctgtctcgtcaaatgcaaggttgaccctcaacaagcatcccccctagcccagcagcccaccttggttgatcacgtctcccgctcgaaaaaaaggcacggggcatcctacagcttgtgcgatctccgtagtggggaactgtgaccctctatcgtaggcgtcactgtccatcccacatccacatccatccttttcccagtcggtgcatgtgtttccagaagtgcgtgttgtgtctctgcgtattctgtctagacgcttccgccagtggccgccagtagctctacgactgatctccttcatcgaggggcttgaccaagccaacgactccgtgcctggctacgacccgcccgccgccgtcgtgagcgctacaacacgcaacagggccgcccgcgcgtcattcgagacatttctattcctcgtttacagcaagtcaggaacacacacactatttaacaccttgtttgagacatcctactcaaccgtcctgtccactccgctctcatcccggcagcccagttagcccagccttgtcgtccacttttcagtttgctcaccgtcttcctcgtcccgtgctcttctaaacagttcttcaccttcgtttaccgtaacttacgctttcgcgcacttctacgtcctctatctcgacactatggcgggtctatttcgcaaagtatacgactggttgctcaggaccttctgggcgagcgagatggatgtaacgatgatcggcttagagaatgcagggaagacctcgttgcttcgcgttttgtcgggaggagagttcacgatcgagtctccattcctacagtcggcttcaacatgaagcgggtgcagcgcggtcatgtaacaatcaaatgttgggacttgggaggtcagcctcgcttcaggccgatgtgggagagatactgtcgcggcgtgaatgcgatcgttttcatcgtcgacatagcggatcatgctaagctgccagtggccaaagaagagctgcattcgcttatgtcgcagaagactctcgagggtattcctctgctcgttttgggtaacaagtccgatctgcctgataaaatttcggtggatgaattaattgacgccctggacttaaagaccatcgcccatcgggaagtttcctgttatggcataagtgcaaaggaagagacgaatctggacgccgtaatccaatggctcatgaaatgggcgaacagataaaactcagcttttctctcctcgacgcaagattactctcgtggccgattcgaaccggcgctgattcgaccgcagcatctttctcattcccgtctctttcaacagtctgatgcattttatgaagctcatgatatcccggaatccaaagacgagtcgctcctcgagtgtgagcggactaatatataaacttctctcgcgagcttgtaatggaaacgttgcccggccatcaacacacaggcagtatattttggatccagagcttcaacatttcgcgccggtcttggtactcccttgcgcgggacgcgctagggcatatcgcatccgctagaactgtgtcgatgattgcttgagtgctggtagagccagcgtaagagggaggcattccacgacgagcatctcgatgttgaaagatttctgtgtgatcaaacgtgatccatgatccgcatacggatgggcgtgcatggcagcaactaccctgatgttgtatttaggcgcatttcttgacgaaaccaataatgattcatgatcttttcaggatttaatatcctcgaaaccacaataatacacggtgattcgtgcttcgcgcttcggattcacttgagaatccggtcttagaaacgtagaacaaaggcgcaatactgaatgttgagagtgtcactcgatattgcgaggtcaagcacgcaagtcaacaagtatagtttaagcgtgaggaaacgcaacttccttctcgatctttcatcggaacaggggatttgaaagaacagaaagagaggaaatgttagcaggtacagggtaggaaagaaaaggggcagacatgtatgcttttgaaaggcatacactatgcatcccacctctatcatggatgcggatgcggtgatgcgttggcaaaaagaccctcctctaagcgtcgagacaaggacaggcaatgattggctccgggaaggggatgccggtcgcaacgtggactcgccctagggtaaaataatcaattgtccgctggcgggaaagaccaataggcgttgcatttccagccctttctcgcgctctttggcgactcctgtcctggtgtcaagttgcatctaggcgtggtgccccagcgaaagtgagcaagccaggattgttgagggacgtaagaagccgtgctatcgaaatatgctccaaaaagaacggcgacgttctatgactatccagtgatcagggaggagcagagaggattgaaggtttggacatgctccaagttatcaggaggaatcaattattgtagtaataataggtgggcgtgcgggcgggcgtcgcgtcagggcgagagatggagcgcccgtttcggagaatttttgacgtggcagcagttcattaggcagtccacttgggtgggcgagccagggacacatcaacaaccatgccactgttgctctccgtggctgctccccgtctccagacgacgagcaacccaatgtccaatagtcacatcttcactactacatccctgagaatggtattctaaccgacagctatgtatacatccatagggtgtcggagaccgagaacgtcaccctaacccctcgtggaacctcacatctaccggcttctttcggtcgagtttctgatcttcaaacatggtaatctttctgtattatttcaagcctctaaagacgtagctctctagctacatatatgcacgtgcgttcgcgtgtcgacttcctcggcctcaaaaggttatatgatatcatgacgaagatcttcagagcttgcagatcgaccgaaccactgtagactaggtagagagcagcaaaaggaggtccgcagtagcggtcccaagattattctccatatagagcttatcaccgttagaaaatgaaaatctttagaaacgacagaatgcttcatctagttgcgagaagtcagattctgccaaagacgatgggaacgcagcgaaatggttcttagtgagctgagagctgactgtgcatatatataatcatttatgctttatcaacacctgtacagctgatatgccgatctacacattgtgcctgcgtcatccaaaggctgcgaattgacttactagcaagcagacaagacattagcgactttgcgcaaaagttggcatgacccggacaggaccagggtcaaacgcagccaaatagcaatactttagtgataatacactagatatgatgcatccaatggtattgacactgaaatgtacggtatatggatggaggctaaacattgcagcagaaatcagagttcatcgtcaaagtttgaaggcgaaagccgattgagccgctgtggaactcagggtcctgccgatgatgcatgtgtatgggaaagggcaaatgctatgacatcgaaccagctaggaatgtcgcgtgcttgctgtttcacggctcggtgcttgtgccgtgtcgtggctagtattgagctgtcaagctgaattccaaatttgcatcgggcaacaggcgggcaggcatttagatgacggggcttccgtattcaatagtattgatccggaagaggctcagccttgttagcggagttgtcatttcgttctaattcattcaggcaacggttttgttcgaaagacctgctcgcatcacaagaataatgcaaatcagaatttgatgtcgtagtggtagcagttgtattggatgcagtctgtttccgtagccagaggcagcgactagtcgggttccaatgcgtctgagaattggaattatttgccttctctgatcattgccgtgatccggc

SEQ ID NO: 9094 - DNA, 468 bp, Muscodor strobelii
  misc_feature: SGI cDNA ID NO. 562828
  misc_feature: Reduced expression when VOC is produced
  misc_feature: Encodes the peptide sequence at SEQ ID NO 9095
atggcccccatcgtcgagcatgtcgagcacttagctcgctctttacttcagaagcgctgtgcttctaatcagtaccgagactcttatggttattgcagggactattcgagttggtactggtatggacgttgggttttcgccgccatcgttatcattctgttcctcgccctgatcttcctttggacatgcgtcagctcacgtcgtcgtcgtcgccgaggagctgctccttactatggaactgggtggatggctccgaataatggtcaatactacaataatccgcaaggctacaaccaacccccgccacccgcttatggagcgcctaacaaccagagctatcccatgacgaatcagtaccagactaccgacggcatgtatcgtggcggccaggacagcggcgttgagccgccaaagaatgtctacactggtgattacgctcctccaaccggcccaccgcccggcaagtaa

SEQ ID NO: 9095 - protein, 155 aa, Muscodor strobelii
  misc_feature: SGI Peptide ID NO. 562828
  misc_feature (35)..(155): NCBI GI: 156034867 Blast Desc: SS1G_13369 [Sclerotinia sclerotiorum 1980] gi|154698772|gb|EDN98510.1| SS1G_13369 [Sclerotinia sclerotiorum 1980]
  misc_feature (1)..(141): NCBI GI: 116181604 Blast Desc: [Chaetomium globosum CBS 148.51] gi|88185727|gb|EAQ93195.1| [Chaetomium globosum CBS 148.51]
  misc_feature (1)..(155): NCBI GI: 85115190 Blast Desc: NCU08621 [Neurospora crassa OR74A] gi|28926624|gb|EAA35593.1| [Neurospora crassa OR74A]
  misc_feature (31)..(155): NCBI GI: 119193498 Blast Desc: CIMG_01126 [Coccidioides immitis RS] gi|240105686|gb|EER23879.1| CPC735_052490 [Coccidioides posadasii C735 delta SOWgp]
  misc_feature (1)..(155): NCBI GI: 256732612 Blast Desc: NECHADRAFT_102552 [Nectria haematococca mpVI 77-13-4]
  misc_feature (25)..(153): NCBI GI: 261356025 Blast Desc: VDBG_04562 [Verticillium albo-atrum VaMs.102]
  misc_feature (14)..(155): NCBI GI: 46125389 Blast Desc: FG07072.1 [Gibberella zeae PH-1]
  misc_feature (27)..(144): NCBI GI: 242777453 Blast Desc: conserved [Talaromyces stipitatus ATCC 10500] gi|218722656|gb|EED22074.1| conserved [Talaromyces stipitatus ATCC 10500]
  misc_feature (15)..(153): NCBI GI: 67526955 Blast Desc: AN3935.2 [Aspergillus nidulans FGSC A4] gi|40740054|gb|EAA59244.1| AN3935.2 [Aspergillus nidulans FGSC A4]
  misc_feature (15)..(153): NCBI GI: 259481490 Blast Desc: TPA: conserved [Aspergillus nidulans FGSC A4]
  misc_feature: Useful for introducing or modulating the production of volatile compounds
MAPIVEHVEHLARSLLQKRCASNQYRDSYGYCRDYSSWYWYGRWVFAAIVIILFLALIFLWTCVSSRRRRRRGAAPYYGTGWMAPNNGQYYNNPQGYNQPPPPAYGAPNNQSYPMTNQYQTTDGMYRGGQDSGVEPPKNVYTGDYAPPTGPPPGK

SEQ ID NO: 9096 - DNA, 1249 bp, Muscodor strobelii
  misc_feature: SGI EST ID NO. CUFF.21913.1
  misc_feature: Variant of the nucleotide sequence at SEQ ID NO 9094
gcggcattcctgacaccgcatccatctgaaagttggatgatgacgagccaagaccgaagccatctcattgcctttaaaactcactcccgccacgccattaccccatcattgaatccgttgccttgcttgttttccatttgtgttcaagaattaatcgatccaccatcgattttctacaccatccatctcccgaatccttatttcatcaaccacctacgttccggttcgcatctcattgtcgcaacgcggtccctactgtagcactcgtctctcagctagctacagccctaggctaaaacgtcatcttgcatatccgcccctagttgacagccattccacaccaagcaatcaacacctcgccacacatcaactcatccatctcaaagtctcgtcatggcccccatcgtcgagcatgtcgagcacttagctcgctctttacttcagaagcgctgtgcttctaatcagtaccgagactcttatggttattgcagggactattcgagttggtactggtatggacgttgggttttcgccgccatcgttatcattctgttcctcgccctgatcttcctttggacatgcgtcagctcacgtcgtcgtcgtcgccgaggagctgctccttactatggaactgggtggatggctccgaataatggtcaatactacaataatccgcaaggctacaaccaacccccgccacccgcttatggagcgcctaacaaccagagctatcccatgacgaatcagtaccagactaccgacggcatgtatcgtggcggccaggacagcggcgttgagccgccaaagaatgtctacactggtgattacgctcctccaaccggcccaccgcccggcaagtaatggtttcgccggtaaatttgttacgaatagggaggataatgacagaatcacgaaggagacaaataccataataaacaatgagtcgcacacaccacgaaatcttgatagtcgcaagaccaagcaataggcgttcaccaggcgttgaggtctaggatacgaaacagtcttgcttcacagtggacgaataaaaggccgaatgccaatgattcacgtattatacattaataaaactactggagacttcccatctgcagcctcgtcgtgacatgctcaacattgaaggcgataatcttgtcattcttcgaaccattaccttcggatttttcagtgcgcgtacaactgataaccgtatatcaagagttgtgattgtcatcaaacctcaatagct

SEQ ID NO: 9097 - DNA, 459 bp, Muscodor strobelii
  misc_feature: SGI cDNA ID NO. 562829
  misc_feature: Reduced expression when VOC is produced
  misc_feature: Encodes the peptide sequence at SEQ ID NO 9098
atggcccccatcgtcgagcatgtcgagcacttagctcgctctttacttcagaagcgctgtgcttctaatcagtaccgagactcttatggttattgcagggactattcgagttggtactggtatggacgttgggttttcgccgccatcgttatcattctgttcctcgccctgatcttcctttggacctcacgtcgtcgtcgtcgccgaggagctgctccttactatggaactgggtggatggctccgaataatggtcaatactacaataatccgcaaggctacaaccaacccccgccacccgcttatggagcgcctaacaaccagagctatcccatgacgaatcagtaccagactaccgacggcatgtatcgtggcggccaggacagcggcgttgagccgccaaagaatgtctacactggtgattacgctcctccaaccggcccaccgcccggcaagtaa

SEQ ID NO: 9098 - protein, 152 aa, Muscodor strobelii
  misc_feature: SGI Peptide ID NO. 562829
  misc_feature (35)..(152): NCBI GI: 156034867 Blast Desc: SS1G_13369 [Sclerotinia sclerotiorum 1980] gi|154698772|gb|EDN98510.1| SS1G_13369 [Sclerotinia sclerotiorum 1980]
  misc_feature (1)..(152): NCBI GI: 256732612 Blast Desc: NECHADRAFT_102552 [Nectria haematococca mpVI 77-13-4]
  misc_feature (1)..(152): NCBI GI: 85115190 Blast Desc: NCU08621 [Neurospora crassa OR74A] gi|28926624|gb|EAA35593.1| [Neurospora crassa OR74A]
  misc_feature (14)..(152): NCBI GI: 46125389 Blast Desc: FG07072.1 [Gibberella zeae PH-1]
  misc_feature (25)..(150): NCBI GI: 261356025 Blast Desc: VDBG_04562 [Verticillium albo-atrum VaMs.102]
  misc_feature (18)..(151): NCBI GI: 50294778 Blast Desc: CAGL0M10417g [Candida glabrata CBS138] gi|49529114|emb|CAG62778.1| protein product [Candida glabrata]
  misc_feature (31)..(152): NCBI GI: 119193498 Blast Desc: CIMG_01126 [Coccidioides immitis RS] gi|240105686|gb|EER23879.1| CPC735_052490 [Coccidioides posadasii C735 delta SOWgp]
  misc_feature (27)..(141): NCBI GI: 242777453 Blast Desc: conserved [Talaromyces stipitatus ATCC 10500] gi|218722656|gb|EED22074.1| conserved [Talaromyces stipitatus ATCC 10500]
  misc_feature (15)..(150): NCBI GI: 67526955 Blast Desc: AN3935.2 [Aspergillus nidulans FGSC A4] gi|40740054|gb|EAA59244.1| AN3935.2 [Aspergillus nidulans FGSC A4]
  misc_feature (1)..(80): NCBI GI: 171696220 Blast Desc: protein product [Podospora anserina] gi|170948352|emb|CAP60516.1| protein product [Podospora anserina]
  misc_feature: Useful for introducing or modulating the production of volatile compounds
MAPIVEHVEHLARSLLQKRCASNQYRDSYGYCRDYSSWYWYGRWVFAAIVIILFLALIFLWTSRRRRRRGAAPYYGTGWMAPNNGQYYNNPQGYNQPPPPAYGAPNNQSYPMTNQYQTTDGMYRGGQDSGVEPPKNVYTGDYAPPTGPPPGK

SEQ ID NO: 9099 - DNA, 1249 bp, Muscodor strobelii; identical to SEQ ID NO: 9096
  misc_feature: SGI EST ID NO. CUFF.21913.1
  misc_feature: Variant of the nucleotide sequence at SEQ ID NO 9097

SEQ ID NO: 9100 - DNA, 1200 bp, Muscodor strobelii
  misc_feature: SGI cDNA ID NO. 562830
  misc_feature: Reduced expression when VOC is produced
  misc_feature: Encodes the peptide sequence at SEQ ID NO 9101
atggcagccactttgaaaaacgtcattgtcattggagggtcatatgttggcatggctgcaacaaaaggacttgctaatgtcttgcccgctacacatcgcgttttgctagttgagcctcatagtcattttcatcatttattcgcgtttccacgatttgctatcattccgacacacgaacataaagctttcataccatacacaggcacctttgccgacgtaccgaactccgatcggcatggtgtcataagggcacgagtgtccgccttgcacccggaccgcgttgtcttggatcgcgattggcaaggtgttcgcgaaattccttatgagtatctggtcgtggccacaggcactaagcttcgcgcgccgggaacaatgttggatgatgacaagccactttctgtcaagtatttacaagactatcaaaacaatctcaaacaggccaattctattgcaataataggtggaggcgctgtcggcgtccagatggcgacagatctgaaggagatatatcccgagaaggatgttactctcatccactcacgagatcagctaatgccattgtaccacaagaaacttgatgagataatcaagacacggtgtcaagagctcggtataaaactcgtccttggttcccgtgtcgacattccagcggatgacttccaagctgccagcggctctggcaaacccattactatttcattacagaacggtaacacggtacaagcagatgcggtgattccagcaactggccagacgcccaatacacagttcttatcgactctctcaagctcgtccgaaggatcgatcataaatccggacaataagttcatccgtgtcaagcctacgttgcagtttcaagatccgaagtatccgaacctcttcgccattggcgatgttgccgacagtggagcacataaagccgcgagacctggcctcgcacatgcgcaggtcctttcgaataacatcttagatctcatcaatggacgtgagccaaccgggcaaattgagataacaccgccggcgattcatttgaccttgggcctgtctaagaatttggtattccgtaacccaaatataaatgaaggcgccactgaaccgactatgatgcacagagacgatggaacgagagatatgagcatagatggtgtttgggcccgaagaggcgttaatgtcacgagcgatgccgagtaccacctataa

SEQ ID NO: 9101 - protein, 399 aa, Muscodor strobelii
  misc_feature: SGI Peptide ID NO. 562830
  misc_feature (149)..(250): Pfam Id: PF00070 Pfam Desc: Pyridine nucleotide-disulphide oxidoreductase
  misc_feature (7)..(304): Pfam Id: PF07992 Pfam Desc: Pyridine nucleotide-disulphide oxidoreductase
  misc_feature (1)..(399): NCBI GI: 256723822 Blast Desc: NECHADRAFT_67853 [Nectria haematococca mpVI 77-13-4]
  misc_feature (1)..(399): NCBI GI: 115396934 Blast Desc: ATEG_04928 [Aspergillus terreus NIH2624] gi|114193675|gb|EAU35375.1| ATEG_04928 [Aspergillus terreus NIH2624]
  misc_feature (1)..(399): NCBI GI: 238492249 Blast Desc: Amid-like NADH oxidoreductase, [Aspergillus flavus NRRL3357] gi|220695855|gb|EED52197.1| Amid-like NADH oxidoreductase, [Aspergillus flavus NRRL3357]
  misc_feature (1)..(399): NCBI GI: 119497635 Blast Desc: Amid-like NADH oxidoreductase, [Neosartorya fischeri NRRL 181] gi|119413739|gb|EAW23678.1| Amid-like NADH oxidoreductase, [Neosartorya fischeri NRRL 181]
  misc_feature (1)..(395): NCBI GI: 46111963 Blast Desc: FG02863.1 [Gibberella zeae PH-1]
  misc_feature (1)..(399): NCBI GI: 58271140 Blast Desc: oxidoreductase [Cryptococcus neoformans var. neoformans JEC21] gi|57228985|gb|AAW45419.1| oxidoreductase, [Cryptococcus neoformans var. neoformans JEC21]
  misc_feature (1)..(399): NCBI GI: 134114560 Blast Desc: CNBH0350 [Cryptococcus neoformans var. neoformans B-3501A] gi|50256618|gb|EAL19341.1| CNBH0350 [Cryptococcus neoformans var. neoformans B-3501A]
  misc_feature (2)..(399): NCBI GI: 145251497 Blast Desc: An15g07360 [Aspergillus niger] gi|134082796|emb|CAK48570.1| protein product [Aspergillus niger]
  misc_feature (1)..(399): NCBI GI: 255939344 Blast Desc: Pc16g00160 [Penicillium chrysogenum Wisconsin 54-1255] gi|211585064|emb|CAP92686.1| Pc16g00160 [Penicillium chrysogenum Wisconsin 54-1255]
  misc_feature (1)..(399): NCBI GI: 242790505 Blast Desc: Amid-like NADH oxidoreductase, [Talaromyces stipitatus ATCC 10500] gi|218718155|gb|EED17575.1| Amid-like NADH oxidoreductase, [Talaromyces stipitatus ATCC 10500]
  misc_feature (83)..(321): SWISSPROT Homolog: EC 1.8.1.4 Dihydrolipoyl dehydrogenase
  misc_feature: Useful for introducing or modulating the production of volatile compounds
MAATLKNVIVIGGSYVGMAATKGLANVLPATHRVLLVEPHSHFHHLFAFPRFAIIPTHEHKAFIPYTGTFADVPNSDRHGVIRARVSALHPDRVVLDRDWQGVREIPYEYLVVATGTKLRAPGTMLDDDKPLSVKYLQDYQNNLKQANSIAIIGGGAVGVQMATDLKEIYPEKDVTLIHSRDQLMPLYHKKLDEIIKTRCQELGIKLVLGSRVDIPADDFQAASGSGKPITISLQNGNTVQADAVIPATGQTPNTQFLSTLSSSSEGSIINPDNKFIRVKPTLQFQDPKYPNLFAIGDVADSGAHKAARPGLAHAQVLSNNILDLINGREPTGQIEITPPAIHLTLGLSKNLVFRNPNINEGATEPTMMHRDDGTRDMSIDGVWARRGVNVTSDAEYHL

SEQ ID NO: 9102 - DNA, 1491 bp, Muscodor strobelii
  misc_feature: SGI EST ID NO. CUFF.21639.0
  misc_feature: Variant of the nucleotide sequence at SEQ ID NO 9100
caataacccagctgttgtataatagattaacttcttcatcttatttgtatagaaagcttacgcatagatacatcacaagatggcagccactttgaaaaacgtcattgtcattggagggtcatatgttggcatggctgcaacaaaaggacttgctaatgtcttgcccgctacacatcgcgttttgctagttgagcctcatagtcattttcatcatttattcgcgtttccacgatttgctatcattccgacacacgaacataaagctttcataccatacacaggcacctttgccgacgtaccgaactccgatcggcatggtgtcataagggcacgagtgtccgccttgcacccggaccgcgttgtcttggatcgcgattggcaaggtgttcgcgaaattccttatgagtatctggtcgtggccacaggcactaagcttcgcgcgccgggaacaatgttggatgatgacaagccactttctgtcaagtatttacaagactatcaaaacaatctcaaacaggccaattctattgcaataataggtggaggcgctgtcggcgtccagatggcgacagatctgaaggagatatatcccgagaaggatgttactctcatccactcacgagatcagctaatgccattgtaccacaagaaacttgatgagataatcaagacacggtgtcaagagctcggtataaaactcgtccttggttcccgtgtcgacattccagcggatgacttccaagctgccagcggctctggcaaacccattactatttcattacagaacggtaacacggtacaagcagatgcggtgattccagcaactggccagacgcccaatacacagttcttatcgactctctcaagctcgtccgaaggatcgatcataaatccggacaataagttcatccgtgtcaagcctacgttgcagtttcaagatccgaagtatccgaacctcttcgccattggcgatgttgccgacagtggagcacataaagccgcgagacctggcctcgcacatgcgcaggtcctttcgaataacatcttagatctcatcaatggacgtgagccaaccgggcaaattgagataacaccgccggcgattcatttgaccttgggcctgtctaagaatttggtattccgtaacccaaatataaatgaaggcgccactgaaccgactatgatgcacagagacgatggaacgagagatatgagcatagatggtgtttgggcccgaagaggcgttaatgtcacgagcgatgccgagtaccacctataatccaatgtttcgatagacatgtgaaggtagcatagaaaagtccaagagatgatagtgaagagcattcgaactagcggaaatcgatttccagagccagatgagccgtaatttcactagtccttatttcagcaaatataacaaccatttttcatcaagtatcgagccgtcagcccagcctaacgaatttgaaacctacattatctctagttgtc

SEQ ID NO: 9103 - DNA, 663 bp, Muscodor strobelii
  misc_feature: SGI cDNA ID NO. 562831
  misc_feature: Encodes the peptide sequence at SEQ ID NO 9104
atgccctgcagcatccgccttgaaggacctgttgttccatgcaatcgctgcgctcctacggctccgccacagccgcaaggttttgtttatgtgcctaacgttgccggcactgttactggacccatctacgagctgccggccgcccccgttcggcgttatgaacttccggccaactcgcagcagaacctaccgtttcaacacccgcaggtccgctcgatggagtcctgggtcaacgaccagaaccagagctctcgcgcttccgattctgaccgagctcccagccgagtttccaggggcacccagactgactctgggcgtaacagtcactatgacggccagttgcagcgcaacaattcccgttctcgtgcctcctcacgccgcgattacgacgaggactttgacgaggaggtgcagcgcgatgtcagtaaccagattcgcaccacgcgatacaggcctgacacgggaatggattccaccgctgacctaatgtcagccatgagcattgaattgcccggtgggggtcgtatggcccaagtgatgacttatccacggccctctcgaggctctggcggtcagggacgatcttcttcgcgccgttacccttctcgccctgcttcaccttcttacgaagaggaagactatgatgacagccgccgccgctaa

SEQ ID NO: 9104 - protein, 220 aa, Muscodor strobelii
  misc_feature: SGI Peptide ID NO. 562831
MPCSIRLEGPVVPCNRCAPTAPPQPQGFVYVPNVAGTVTGPIYELPAAPVRRYELPANSQQNLPFQHPQVRSMESWVNDQNQSSRASDSDRAPSRVSRGTQTDSGRNSHYDGQLQRNNSRSRASSRRDYDEDFDEEVQRDVSNQIRTTRYRPDTGMDSTADLMSAMSIELPGGGRMAQVMTYPRPSRGSGGQGRSSSRRYPSRPASPSYEEEDYDDSRRR

SEQ ID NO: 9105 - DNA, 1605 bp, Muscodor strobelii
  misc_feature: SGI cDNA ID NO. 562832
  misc_feature: Reduced expression when VOC is produced
  misc_feature: Encodes the peptide sequence at SEQ ID NO 9106
atgcccaacattcgcctagcaatggagcggagtctccatgacaggaacttgggaaactcattcgtgcgtctgcttggtcggagcgccgtcgctgcgtttgggaagcgggacagtttgaccgatatacaaggccaggtcaaagacgctgctgatgccttttcgagttgggacaattgcatgagcgtcgtttggtgcaaatggcctgtcattgcgctgattataattggagggctaatactcctgtctatcgtttggtgtatcgggcgatgcctctgctgcgggttatcgtgctgctgctcatgctgccagtgtctcaaatgctgtggcgagtgttgcgggatgtgcgatcctcctggagggcgacgcaacaaatatgtggacgaacccttagttcccccgcaccaggatcaggcctaccgctcacaagcaccaatgcactctggcttcaaaaccgcaaagcctagcgtgccccagtatgctgtatttgactccggcgacaagaaggatgcagattcactccctgcaatgccaacctggggtgatgcttcttcccaaaaagtgctgttagaggaggaagctgttgagatggaaccgttgaagaaacccgaaccagctcctagtccgtccctcatgaatgtgaataatacaacccacgcggcaattccgagtcgaggcgctgcttcgcctggcaatatcagtccatacggtgcaccgccaggaacacagggctctaacggatatatggcgactggccagaatatgagggacccttatggagcacaagattacaattataataacgaccagagctataggcaacagtatggacaagatggtttgaacgataccgctcctaaatacttggcgggagccgccccacatcagaaccagacccacgacgacggctatggctatggttatgctagtcaggggccttcacaatatcagtcgcgaagcccgcaaccatataacgacgagtacggccggagtgctacacctacatccagaagcgggtatcggggcacacctacgaatgaaggctacggcaatcctcgtggatcccctgcacctcaagcgggctatggaccaggcaacacatctcggatgagaacacctgcgcctcaatatgatggctatggtaacgatacccggagctcaccagctccacaggcaaattatgggtatggagccccggctcgaacgggaacacccggccctggctacggaaatgcacggaggtctccagggccgcaggcggcctacgaccgccccaatcgtgcccgtacgcaagacgattatttctcgcaacagccggcccctatccgttcacgtacacaagatgattataatcgacaaaattctcctgccccacgtcgtcagtacacaggagactcacagagtgcttatgcacgagcagcgcctgaggcgcaaaggtcaccaccgatctcccctattcaaaacaacagtggttttgacttcaattccggatacagccggcaaagtccggctcctgaacagagcagcacaggaggacctgcatatccgggctaccgctcctacaagccggcacagtccacccagcaacaaaactgggacagttattga

SEQ ID NO: 9106 - protein, 534 aa, Muscodor strobelii
  misc_feature: SGI Peptide ID NO. 562832
  misc_feature (8)..(522): NCBI GI: 39951869 Blast Desc: MGG_01577 [Magnaporthe grisea 70-15] gi|145020578|gb|EDK04707.1| MGG_01577 [Magnaporthe grisea 70-15]
  misc_feature (1)..(521): NCBI GI: 256732613 Blast Desc: NECHADRAFT_100038 [Nectria haematococca mpVI 77-13-4]
  misc_feature (1)..(203): NCBI GI: 85111846 Blast Desc: NCU02842 [Neurospora crassa OR74A] gi|11359385|pir||T49510 fibroin-3 related protein [imported] - Neurospora crassa gi|28925900|gb|EAA34896.1| [Neurospora crassa
  misc_feature (1)..(440): NCBI GI: 46125387 Blast Desc: FG07071.1 [Gibberella zeae PH-1]
  misc_feature (139)..(499): NCBI GI: 116181600 Blast Desc: CHGG_01428 [Chaetomium globosum CBS 148.51] gi|88185725|gb|EAQ93193.1| CHGG_01428 [Chaetomium globosum CBS 148.51]
  misc_feature (72)..(203): NCBI GI: 171696222 Blast Desc: protein product [Podospora anserina] gi|170948353|emb|CAP60517.1| protein product [Podospora anserina]
  misc_feature (48)..(199): NCBI GI: 238846130 Blast Desc: conserved [Microsporum canis CBS 113480]
  misc_feature (41)..(199): NCBI GI: 238487956 Blast Desc: conserved [Aspergillus flavus NRRL3357] gi|220700095|gb|EED56434.1| conserved [Aspergillus flavus NRRL3357]
  misc_feature (25)..(199): NCBI GI: 119469445 Blast Desc: NFIA_053910 [Neosartorya fischeri NRRL 181] gi|119406094|gb|EAW16045.1| conserved [Neosartorya fischeri NRRL 181]
  misc_feature (35)..(199): NCBI GI: 225557522 Blast Desc: conserved [Ajellomyces capsulatus G186AR]
  misc_feature: Useful for introducing or modulating the production of volatile compounds
MPNIRLAMERSLHDRNLGNSFVRLLGRSAVAAFGKRDSLTDIQGQVKDAADAFSSWDNCMSVVWCKWPVIALIIIGGLILLSIVWCIGRCLCCGLSCCCSCCQCLKCCGECCGMCDPPGGRRNKYVDEPLVPPHQDQAYRSQAPMHSGFKTAKPSVPQYAVFDSGDKKDADSLPAMPTWGDASSQKVLLEEEAVEMEPLKKPEPAPSPSLMNVNNTTHAAIPSRGAASPGNISPYGAPPGTQGSNGYMATGQNMRDPYGAQDYNYNNDQSYRQQYGQDGLNDTAPKYLAGAAPHQNQTHDDGYGYGYASQGPSQYQSRSPQPYNDEYGRSATPTSRSGYRGTPTNEGYGNPRGSPAPQAGYGPGNTSRMRTPAPQYDGYGNDTRSSPAPQANYGYGAPARTGTPGPGYGNARRSPGPQAAYDRPNRARTQDDYFSQQPAPIRSRTQDDYNRQNSPAPRRQYTGDSQSAYARAAPEAQRSPPISPIQNNSGFDFNSGYSRQSPAPEQSSTGGPAYPGYRSYKPAQSTQQQNWDSY

SEQ ID NO: 9107 - DNA, 2579 bp, Muscodor strobelii
  misc_feature: SGI EST ID NO. CUFF.21658.0
  misc_feature: Variant of the nucleotide sequence at SEQ ID NO 9105
ggcctttccagcttcagagtcttgtccatcttttcagatttctcgaggctctgcggctttgcgatcccttgatccagagtccacactgctggctgtcactctttttgttttatgttttattctcttttacgcctcacagcatttccgtcgtcattctctatcccgcactcacaatcgcttagatcgtcaactctacgcccgccccttgttgagcaaaaaaaactgtttctacaatctcgagtatcgacaccgcacccgagaaacatcgatctgtgcaacatcgtactacagaacccccctcttccttttttttttttttttttaccgacgccaacgggagatcttgggttcaaaaccaggtgcgggttttgcaagtgatggtggaggatagcttggattggattgattattggaaacaaacggacgatcaggcgatcagacactcgctaccgactcgatagctaccgctcgcaacgccgatgccccaatattataggccattatacatatcatcgacatcagcgcagcgcaaggttttgcgttgtcagaccaatttggggaaaaaggagaaacaaacggtggaaggaagaggcgtggcgagaaatagaaagagggtaagatgcccaacattcgcctagcaatggagcggagtctccatgacaggaacttgggaaactcattcgtgcgtctgcttggtcggagcgccgtcgctgcgtttgggaagcgggacagtttgaccgatatacaaggccaggtcaaagacgctgctgatgccttttcgagttgggacaattgcatgagcgtcgtttggtgcaaatggcctgtcattgcgctgattataattggagggctaatactcctgtctatcgtttggtgtatcgggcgatgcctctgctgcgggttatcgtgctgctgctcatgctgccagtgtctcaaatgctgtggcgagtgttgcgggatgtgcgatcctcctggagggcgacgcaacaaatatgtggacgaacccttagttcccccgcaccaggatcaggcctaccgctcacaagcaccaatgcactctggcttcaaaaccgcaaagcctagcgtgccccagtatgctgtatttgactccggcgacaagaaggatgcagattcactccctgcaatgccaacctggggtgatgcttcttcccaaaaagtgctgttagaggaggaagctgttgagatggaaccgttgaagaaacccgaaccagctcctagtccgtccctcatgaatgtgaataatacaacccacgcggcaattccgagtcgaggcgctgcttcgcctggcaatatcagtccatacggtgcaccgccaggaacacagggctctaacggatatatggcgactggccagaatatgagggacccttatggagcacaagattacaattataataacgaccagagctataggcaacagtatggacaagatggtttgaacgataccgctcctaaatacttggcgggagccgccccacatcagaaccagacccacgacgacggctatggctatggttatgctagtcaggggccttcacaatatcagtcgcgaagcccgcaaccatataacgacgagtacggccggagtgctacacctacatccagaagcgggtatcggggcacacctacgaatgaaggctacggcaatcctcgtggatcccctgcacctcaagcgggctatggaccaggcaacacatctcggatgagaacacctgcgcctcaatatgatggctatggtaacgatacccggagctcaccagctccacaggcaaattatgggtatggagccccggctcgaacgggaacacccggccctggctacggaaatgcacggaggtctccagggccgcaggcggcctacgaccgccccaatcgtgcccgtacgcaagacgattatttctcgcaacagccggcccctatccgttcacgtacacaagatgattataatcgacaaaattctcctgccccacgtcgtcagtacacaggagactcacagagtgcttatgcacgagcagcgcctgaggcgcaaaggtcaccaccgatctcccctattcaaaacaacagtggttttgacttcaattccggatacagccggcaaagtccggctcctgaacagagcagcacaggaggacctgcatatccgggctaccgctcctacaagccggcacagtccacccagcaacaaaactgggacagttattgagcaaagagactgcagatttgttcacgactagagaagctagacgctttcgggatgatacagtaaaatgattttcttggagctcagggtagctgccaatggaaagaaatgcggcgtcctggatatgtgaaatggttcatattatacctctgtatgaattgcattaggcgatggtgatgaaagaagaccgctgctgcagtctgatgtacaaaatgctcctaaataccttgtcacgatgtttgtatatcttccttgggtattgggaacgtcaggttccccatgctcttgattaaataaatagcttacaatgctatgcacctactacgactccttcgttctctgtggaatgcaatttgtg

SEQ ID NO: 9108 - DNA, 2970 bp, Muscodor strobelii
  misc_feature: SGI cDNA ID NO. 562833
  misc_feature: Encodes the peptide sequence at SEQ ID NO 9109
atggaaacatcagatcaatcactcgtcttggaacatcacaacgaagatccagagccatggacgagtctgcaagatatgctccgcagcgttgcagaaaccgcgccgtcccgtaggcacatgttttacccactcgggaacacttcgaagcctaccgtgttgtcgtacagcagtctgtatatgcaggctcagcaatacgccgagctcgtacaaaacatcgacggtttcattgagagatctccgatcctcatccactttgaagaccatcaagatttcgtcctctggttttgggcagttttacttgcgaatggcattcccgtcccgagctcacccctaagtcatcattcagagcatcgtagggatcacctccgacacttgtcggagttgctggaaagtccaatttgtatcacgaggaatagttcacttggcctgtttctaggagatcatggactcaaattgcacagtattgagaaattactggatggctcgaccaaacaccatagacgaaatgagatggggaaaattcggactaagaaacggagggcttccagtgtggaatccgatatatcgccagttcggttgtcgaaacgtcgtactcgatctctcaacgaagaggatcattcggtgcttgacgggctcgccatgctaatgcttacttcgggttctagcggaaattccaaggcagtcatgctgacccatgagcaagtcctcgccgctcttcgaggcaagtctttagtgcgtcgactcacgccggggaagccgttgctgaactggcttgggcttgatcatgttggtagtctcgtcgagctgcatctcttagccatgtatctaggggtcgatcaaatccacgtccaagcgcctgacattctagcctcgccacctctgttcctggatctactgagtcagcaccaagttgctaggtcatttgcgccaaatggctttttggccaagctagtcatggctgttgatccggaggagtctaccgataagaccagcaggtggaatttcagcagcctgactgatctcatatctggcggcgaagccaacgatatggacacttgcatagctgttgcacgtcttttgaccaggcatggggcccccttgacggctatgacacctgctttcggcatgacggagacttgcgctggatctgcgtacaataccaattgtccgcagtatgatactaaaagaggccatacatttgcatctgtaggtacatgcacgagaagtatggagatgcgcataaacgcgtccttggaaaaagacgtagtagtgttagctgaacctaatgcaatcggagcgctcgaagtacgtggaaaagccgtcttcaggggctactatcgaaacaacaaagccactgcagcatctttcaccactgatcagtggtttcgaacgggagatcgcgccatcatagactctgagggcaacttgagcctggttggtagagctcaagaagtggtcaatatcaatgggaaaaaaactcccctcgcggaaatagaaatggccgtcgaaaaagcgctaagtggcatggtatctcgagttgttgtctttgcgtcgagaagttttgaaggccgtacggaacaggtcgttattatgtacgttgccaaatttcaacctcttagtcccgaaagtgcgagagacatcgacagaaaagtgatggaagtttgctacctatgtacagcttcgaggccgctagtctatgggttagaaaacgaaagcaagttcccggtgtcaacattgggaaagatctctagagttaagatgaggtcccttttcgaagatggatgctttcaacatgatattgagacccatcatggcctcctagcattgggagccaagcgagatccagcaatttttgtaccagctagccaagccgaactcgatctcctagctgattttaaagggagtattggacgtgacctcggccaatcttttggggtggaaacttccatcttcaccgttggcttcacatctatggacctgattcgactcaagcatcgtcttgacaagcgtcttggaattgatgtatccgtcgcactgttgctaaagcgtcaaacagcccgtgagttggcagccgcgctgtgtgacttcgatactgagcaggatgaaaagcgactggtctcagatcaagttgtaagttacgatcctgtcgtgacactcaaggagacaggcagcaaaacaccgctgtggctggttcatcctggtgtcggcgaaattttagtattcatcggcctttctctacaactctcagaccaagacagtccagtatacgcgctgcgtgctcgaggttttgaacctggcgaaacgtgcttcggttctattcgagaagtggttgaaagctatcacgcagctatcaaaagacgacagcccaagggtccttatgccattgcgggctatagctatggctcgatgcttgcttttgaactagccaaagaactagagaagacggatgtcgtgcaatttctaggcagcttcaatctgcccccacacatcaagtatagaatgcgtcagctgaactggaacgtctgtcatatccatcttgcctactttctcgacctcgtcacggagacaatgtgtgatgagctggagcatgatttccataacaaggaacgcattgaaatagttgataaagtcgtggaagtcagtgatagtgcccgcatgatagaattgggtctaaatagagacgttttgatcaggtggacggatgtagcatacagcttgcagagtatggcggtggattatgagcccagtggtatgacgaggtcaatcgacgtcttccatgctgtgccgttgaggcaagtcgccgagtctcgcgaagactgggtagaaaaccacttgggcaaatggaaagactttgccgaattgactgcttttcataaagttggtggagagcattataccatgatctcgccacaacacgtggcgagcttcgccaaaactttgattgaggtaatgcagcttcgcgggttatag

SEQ ID NO: 9109 - protein, 989 aa, Muscodor strobelii
  misc_feature: SGI Peptide ID NO. 562833
  misc_feature (54)..(515): Pfam Id: PF00501 Pfam Desc: AMP-binding enzyme
  misc_feature (726)..(984): Pfam Id: PF00975 Pfam Desc: Thioesterase domain
  misc_feature (726)..(822): Pfam Id: PF00975 Pfam Desc: Thioesterase domain
  misc_feature (23)..(989): NCBI GI: 116206018 Blast Desc: CHGG_02302 [Chaetomium globosum CBS 148.51] gi|88182899|gb|EAQ90367.1| CHGG_02302 [Chaetomium globosum CBS 148.51]
  misc_feature (22)..(989): NCBI GI: 171677654 Blast Desc: protein product [Podospora anserina] gi|170936895|emb|CAP61554.1| protein product [Podospora anserina]
  misc_feature (61)..(978): NCBI GI: 238841486 Blast Desc: TdiA [Microsporum canis CBS 113480]
  misc_feature (26)..(989): NCBI GI: 212533157 Blast Desc: thioesterase domain protein [Penicillium marneffei ATCC 18224] gi|210072099|gb|EEA26188.1| thioesterase domain protein [Penicillium marneffei ATCC 18224]
  misc_feature (21)..(989): NCBI GI: 115387353 Blast Desc: [Aspergillus terreus NIH2624] gi|114195266|gb|EAU36966.1| [Aspergillus terreus NIH2624]
  misc_feature (19)..(989): NCBI GI: 115492317 Blast Desc: conserved [Aspergillus terreus NIH2624] gi|114197646|gb|EAU39346.1| conserved [Aspergillus terreus NIH2624]
  misc_feature (19)..(989): NCBI GI: 156141035 Blast Desc: TdiA [Emericella nidulans]
  misc_feature (19)..(989): NCBI GI: 116208788 Blast Desc: CHGG_03687 [Chaetomium globosum CBS 148.51] gi|88184284|gb|EAQ91752.1| CHGG_03687 [Chaetomium globosum CBS 148.51]
  misc_feature (19)..(989): NCBI GI: 67903052 Blast Desc: AN8513.2 [Aspergillus nidulans FGSC A4] gi|40747701|gb|EAA66857.1| AN8513.2 [Aspergillus nidulans FGSC A4] gi|259484466|tpe|CBF80711.1| TPA: TdiA [Aspergillus nidulans
  misc_feature (47)..(989): NCBI GI: 239614048 Blast Desc: TdiA [Ajellomyces dermatitidis ER-3]
METSDQSLVLEHHNEDPEPWTSLQDMLRSVAETAPSRRHMFYPLGNTSKPTVLSYSSLYMQAQQYAELVQNIDGFIERSPILIHFEDHQDFVLWFWAVLLANGIPVPSSPLSHHSEHRRDHLRHLSELLESPICITRNSSLGLFLGDHGLKLHSIEKLLDGSTKHHRRNEMGKIRTKKRRASSVESDISPVRLSKRRTRSLNEEDHSVLDGLAMLMLTSGSSGNSKAVMLTHEQVLAALRGKSLVRRLTPGKPLLNWLGLDHVGSLVELHLLAMYLGVDQIHVQAPDILASPPLFLDLLSQHQVARSFAPNGFLAKLVMAVDPEESTDKTSRWNFSSLTDLISGGEANDMDTCIAVARLLTRHGAPLTAMTPAFGMTETCAGSAYNTNCPQYDTKRGHTFASVGTCTRSMEMRINASLEKDVVVLAEPNAIGALEVRGKAVFRGYYRNNKATAASFTTDQWFRTGDRAIIDSEGNLSLVGRAQEVVNINGKKTPLAEIEMAVEKALSGMVSRVVVFASRSFEGRTEQVVIMYVAKFQPLSPESARDIDRKVMEVCYLCTASRPLVYGLENESKFPVSTLGKISRVKMRSLFEDGCFQHDIETHHGLLALGAKRDPAIFVPASQAELDLLADFKGSIGRDLGQSFGVETSIFTVGFTSMDLIRLKHRLDKRLGIDVSVALLLKRQTARELAAALCDFDTEQDEKRLVSDQVVSYDPVVTLKETGSKTPLWLVHPGVGEILVFIGLSLQLSDQDSPVYALRARGFEPGETCFGSIREVVESYHAAIKRRQPKGPYAIAGYSYGSMLAFELAKELEKTDVVQFLGSFNLPPHIKYRMRQLNWNVCHIHLAYFLDLVTETMCDELEHDFHNKERIEIVDKVVEVSDSARMIELGLNRDVLIRWTDVAYSLQSMAVDYEPSGMTRSIDVFHAVPLRQVAESREDWVENHLGKWKDFAELTAFHKVGGEHYTMISPQHVASFAKTLIEVMQLRGL

SEQ ID NO: 9110 - DNA, 489 bp, Muscodor strobelii
  misc_feature: SGI EST ID NO. CUFF.21645.0
  misc_feature: Variant of the nucleotide sequence at SEQ ID NO 9108
tggctcgatgcttgcttttgaactagccaaagaactagagaagacggatgtcgtgcaatttctaggcagcttcaatctgcccccacacatcaagtatagaatgcgtcagctgaactggaacgtctgtcatatccatcttgcctactttctcgacctcgtcacggagacaatgtgtgatgagctggagcatgatttccataacaaggaacgcattgaaatagttgataaagtcgtggaagtcagtgatagtgcccgcatgatagaattgggtctaaatagagacgttttgatcaggtggacggatgtagcatacagcttgcagagtatggcggtggattatgagcccagtggtatgacgaggtcaatcgacgtcttccatgctgtgccgttgaggcaagtcgccgagtctcgcgaagactgggtagaaaaccacttgggcaaatggaaagactttgccgaattgactgcttttcataaagttggtggaga

SEQ ID NO: 9111 - DNA, 1149 bp, Muscodor strobelii
  misc_feature: SGI cDNA ID NO. 562834
  misc_feature: Encodes the peptide sequence at SEQ ID NO 9112
atgcctatcccgttcgaagtcgagcatgcctcggcactggccaccgccgtcgccagcatcggcgttgatgtcgtttccgcaacaacggacttcgcgagcttaacgacgacatctgcagtagtggctgccacgtcaatagcggcggcagcatctggaggagagggaggacctagcgatggcggcgaaggcgaatgcagactcctcgggccctttgccctcatcgtccagctcgccctcggtggcctggcgcttctagcacttgtctataagcggtggcgcgagcgaccacagcggcccctcaagatatggttcttcgacgcttctaagcaggtctttgggtctgtcctggtgcatggcgccaacgtcttcatgtcgatgctcacgagcggtcgcttctccatcaaactagatcccggcagtgtgcaagccgccgccaggttcatcccacgggctaccgagatgccctacgtgccgaatccttgctccttctatttgctcaatttggctattgataccactataggcatccccatactcatcgtcctcctccgcatcctcaccggcctcgtatcctacaccccgctcggcaagccatccgagtcgatacaatccggcaactacggcgacccgccaaatgcctggtggtggctaaagcagtccgtcatctatttctgcggcctcttcggcatgaagctctgcgtgctcatcatattcctgatcctaccatggatatcgcgagtcggcgactgggcactaaagtggacagagggcaacgagcgactgcagattatattcgtgatgatgttgttcccgctcatcatgaacgcgttgcagtactacatcatcgatagcttcatcaagatgaagcagacgggccaccacggacaccagagaataccgagtgaggacagcacgggggatagagatccgtttgatgatagtttcgatgatcaggatgatgatgcgtcgattatcagtggggagagcgatgcgagtgtgaagctcttgaagagtaatggcaaggggaagagggatgagagggaggaatatgacccggagcttgatgggcagactgtagtggggagtagccggagtcaggagggagagaggatcaagactttgccgaaggaacttgtcccccctgagtag

SEQ ID NO: 9112 - protein, 382 aa, Muscodor strobelii
  misc_feature: SGI Peptide ID NO. 562834
  misc_feature (7)..(382): NCBI GI: 256732610 Blast Desc: NECHADRAFT_68312 [Nectria haematococca mpVI 77-13-4]
  misc_feature (15)..(377): NCBI GI: 154309561 Blast Desc: BC1G_07251 [Botryotinia fuckeliana B05.10] gi|150852274|gb|EDN27466.1| BC1G_07251 [Botryotinia fuckeliana B05.10]
  misc_feature (55)..(382): NCBI GI: 39951871 Blast Desc: MGG_01578 [Magnaporthe grisea 70-15] gi|145020577|gb|EDK04706.1| MGG_01578 [Magnaporthe grisea 70-15]
  misc_feature (35)..(382): NCBI GI: 116181614 Blast Desc: CHGG_01435 [Chaetomium globosum CBS 148.51] gi|88185732|gb|EAQ93200.1| CHGG_01435 [Chaetomium globosum CBS 148.51]
  misc_feature (59)..(379): NCBI GI: 46125385 Blast Desc: FG07070.1 [Gibberella zeae PH-1]
  misc_feature (47)..(358): NCBI GI: 171696208 Blast Desc: protein product [Podospora anserina] gi|170948346|emb|CAP60510.1| protein product [Podospora anserina]
  misc_feature (26)..(343): NCBI GI: 164427675 Blast Desc: NCU02834 [Neurospora crassa OR74A] gi|157071839|gb|EAA34888.2| [Neurospora crassa OR74A]
  misc_feature (26)..(343): NCBI GI: 11359447 Blast Desc: NCU02834 [Neurospora crassa OR74A] gi|157071839|gb|EAA34888.2| [Neurospora crassa OR74A]
  misc_feature (25)..(357): NCBI GI: 121715258 Blast Desc: conserved [Aspergillus clavatus NRRL 1] gi|119403395|gb|EAW13812.1| conserved [Aspergillus clavatus NRRL 1]
  misc_feature (8)..(367): NCBI GI: 189191792 Blast Desc: FK506-binding protein 2 precursor [Pyrenophora tritici-repentis Pt-1C-BFP] gi|187973841|gb|EDU41340.1| FK506-binding protein 2 precursor [Pyrenophora tritici-repentis
MPIPFEVEHASALATAVASIGVDVVSATTDFASLTTTSAVVAATSIAAAASGGEGGPSDGGEGECRLLGPFALIVQLALGGLALLALVYKRWRERPQRPLKIWFFDASKQVFGSVLVHGANVFMSMLTSGRFSIKLDPGSVQAAARFIPRATEMPYVPNPCSFYLLNLAIDTTIGIPILIVLLRILTGLVSYTPLGKPSESIQSGNYGDPPNAWWWLKQSVIYFCGLFGMKLCVLIIFLILPWISRVGDWALKWTEGNERLQIIFVMMLFPLIMNALQYYIIDSFIKMKQTGHHGHQRIPSEDSTGDRDPFDDSFDDQDDDASIISGESDASVKLLKSNGKGKRDEREEYDPELDGQTVVGSSRSQEGERIKTLPKELVPPE

SEQ ID NO: 9113 - DNA, 1968 bp, Muscodor strobelii
  misc_feature: SGI EST ID NO. CUFF.21655.0
  misc_feature: Variant of the nucleotide sequence at SEQ ID NO 9111
aagaggcctaggcgcgaagtctaggcgcgaaccttgaggaagccttgctcccaatgtcgaatgtgcacggtagaagccacaagccactgttgtaatcgtctgggaccctttattttcctctcctttctcctacagcgacaccatatcttagttttacgtgtaacgcggtttactctgtcgacggtctctttgtcgacagatcgattccattaagcgctgtacctttgcccagccgttaaactccggggtgtcgatcaatcgccaggcccctcagtgacgctacgacgctacgacacgagaccacagctggagcctgaagctgctgtgctttgacgacaaaatctcgctgggttgccactaccaacaacaattcaccatccatatctcgactgtgccacggcgtctcacatctatgtcctcttaaaacaggcgcttccgacatcttgcgacggcaacggctccacaaatgcctatcccgttcgaagtcgagcatgcctcggcactggccaccgccgtcgccagcatcggcgttgatgtcgtttccgcaacaacggacttcgcgagcttaacgacgacatctgcagtagtggctgccacgtcaatagcggcggcagcatctggaggagagggaggacctagcgatggcggcgaaggcgaatgcagactcctcgggccctttgccctcatcgtccagctcgccctcggtggcctggcgcttctagcacttgtctataagcggtggcgcgagcgaccacagcggcccctcaagatatggttcttcgacgcttctaagcaggtctttgggtctgtcctggtgcatggcgccaacgtcttcatgtcgatgctcacgagcggtcgcttctccatcaaactagatcccggcagtgtgcaagccgccgccaggttcatcccacgggctaccgagatgccctacgtgccgaatccttgctccttctatttgctcaatttggctattgataccactataggcatccccatactcatcgtcctcctccgcatcctcaccggcctcgtatcctacaccccgctcggcaagccatccgagtcgatacaatccggcaactacggcgacccgccaaatgcctggtggtggctaaagcagtccgtcatctatttctgcggcctcttcggcatgaagctctgcgtgctcatcatattcctgatcctaccatggatatcgcgagtcggcgactgggcactaaagtggacagagggcaacgagcgactgcagattatattcgtgatgatgttgttcccgctcatcatgaacgcgttgcagtactacatcatcgatagcttcatcaagatgaagcagacgggccaccacggacaccagagaataccgagtgaggacagcacgggggatagagatccgtttgatgatagtttcgatgatcaggatgatgatgcgtcgattatcagtggggagagcgatgcgagtgtgaagctcttgaagagtaatggcaaggggaagagggatgagagggaggaatatgacccggagcttgatgggcagactgtagtggggagtagccggagtcaggagggagagaggatcaagactttgccgaaggaacttgtcccccctgagtagaccagggtttgtttgtttgtcacgaatgtgggctacagcatcatctggcgttttgatgattccgatagagtatatctgtactattggaggcgttgggagctgctgttcaactattgcgacttgggtatcttggcgtatactttggcttgcattattaagagaatcagatatcgcttcttcacttggtctgataattgtgggctttatttggatttggtactgtgactgtataatgtatcttatattgttgataggctgtatacttcatactgcttgtcaaactgtatatcctcaattgtttaacaccaactgcacctaggtactgtatagtcacctactgtatgcgagaggag

SEQ ID NO: 9114 - DNA, 525 bp, Muscodor strobelii
  misc_feature: SGI cDNA ID NO. 562835
  misc_feature: Encodes the peptide sequence at SEQ ID NO 9115
atgagtcgcgccggaaagcttgcgcccgagcagttgccagtcctatttatcaagaacctcaactacgaagtcaccgacggggacctcttcaagctcttcgaccctgacgagacgggcatcatccgtcaaatccgcaagggcatctcgggcgagaccaagggcactgcctacatcgtcttctggaatgctatcgatgcgaagaatgccctcgacaaactgaacggtttcaacttccagaaccgctaccttgtcgtgctgtggcaccaaccagagaagaccatgaagcttaaggagtcgaaagacgacatccagacccgcaaggagaatttagtcccgtcgtctcctctctccacctccacggctagctctgcctccacgaccttctcggccaagaagccggtggttctggcggtgaacaagaagaagagcaagcccgacgagattgcccgtcactgccgaaccgccgctaagagctttgtgcgaggcttcctcccgcagaagcaggccaaagtctgtgttacctga

SEQ ID NO: 9115 - protein, 174 aa, Muscodor strobelii
  misc_feature: SGI Peptide ID NO. 562835
  misc_feature (15)..(85): Pfam Id: PF00076 Pfam Desc: RNA recognition motif. (a.k.a. RRM, RBD, or RNP domain)
  misc_feature (1)..(110): NCBI GI: 39951873 Blast Desc: MGG_01579 [Magnaporthe grisea 70-15] gi|145020576|gb|EDK04705.1| MGG_01579 [Magnaporthe grisea 70-15]
  misc_feature (1)..(110): NCBI GI: 261195020 Blast Desc: pre-mRNA branch site protein p14 [Ajellomyces dermatitidis SLH14081] gi|239587786|gb|EEQ70429.1| pre-mRNA branch site protein p14 [Ajellomyces dermatitidis SLH14081] site
  misc_feature (1)..(110): NCBI GI: 119193232 Blast Desc: conserved [Coccidioides immitis RS]
  misc_feature (1)..(165): NCBI GI: 171696206 Blast Desc: protein product [Podospora anserina] gi|170948345|emb|CAP60509.1| protein product [Podospora anserina]
  misc_feature (1)..(110): NCBI GI: 226282525 Blast Desc: pre-mRNA branch site protein p14 [Paracoccidioides brasiliensis Pb01] gi|226292312|gb|EEH47732.1| pre-mRNA branch site protein p14 [Paracoccidioides brasiliensis Pb18]
  misc_feature (1)..(110): NCBI GI: 258574487 Blast Desc: pre-mRNA branch site protein p14 [Uncinocarpus reesii 1704] gi|237901691|gb|EEP76092.1| pre-mRNA branch site protein p14 [Uncinocarpus reesii 1704]
  misc_feature (1)..(110): NCBI GI: 154281493 Blast Desc: [Ajellomyces capsulatus NAm1] gi|150411738|gb|EDN07126.1| [Ajellomyces capsulatus NAm1] gi|225563117|gb|EEH11396.1| pre-mRNA branch site protein p14 site
  misc_feature (2)..(110): NCBI GI: 46107306 Blast Desc: FG00536.1 [Gibberella zeae PH-1]
  misc_feature (1)..(122): NCBI GI: 156045603 Blast Desc: SS1G_09992 [Sclerotinia sclerotiorum 1980] gi|154694385|gb|EDN94123.1| SS1G_09992 [Sclerotinia sclerotiorum 1980]
  misc_feature (2)..(110): NCBI GI: 256734520 Blast Desc: [Nectria haematococca mpVI 77-13-4]
MSRAGKLAPEQLPVLFIKNLNYEVTDGDLFKLFDPDETGIIRQIRKGISGETKGTAYIVFWNAIDAKNALDKLNGFNFQNRYLVVLWHQPEKTMKLKESKDDIQTRKENLVPSSPLSTSTASSASTTFSAKKPVVLAVNKKKSKPDEIARHCRTAAKSFVRGFLPQKQAKVCVT

SEQ ID NO: 9116 - DNA, 1290 bp, Muscodor strobelii
  misc_feature: SGI EST ID NO. CUFF.21664.0
  misc_feature: Variant of the nucleotide sequence at SEQ ID NO 9114
cccatcttcgaggcttgcatacaacctacaacccaaacccattgcttccagacgtatctccagacatccgtcgagcatccgagtcggcttctcgccattcacacctgttcatccacccacttcaccagcgcaaacaatcttcacaaacacgccacctagcactacgacccaattccatccatcaagatatgagtcgcgccggaaagcttgcgcccgagcagttgccagtcctatttatcaagaacctcaactacgaagtcaccgacggggacctcttcaagctcttcgaccctgacgagacgggcatcatccgtcaaatccgcaagggcatctcgggcgagaccaagggcactgcctacatcgtcttctggaatgctatcgatgcgaagaatgccctcgacaaactgaacggtttcaacttccagaaccgctaccttgtcgtgctgtggcaccaaccagagaagaccatgaagcttaaggagtcgaaagacgacatccagacccgcaaggagaatttaggtcagctcaagaagcaatacgacatcgattgacgattagacgggtctgtgggcaggcgcaagacacgcgctcgcgccacgtctgcagtcccgtcgtctcctctctccacctccacggctagctctgcctccacgaccttctcggccaagaagccggtggttctggcggtgaacaagaagaagagcaagcccgacgagattgcccgtcactgccgaaccgccgctaagagctttgtgcgaggcttcctcccgcagaagcaggccaaagtctgtgttacctgagcgtgcggatgaaccatccttatacgacatggctatgggcgtgtaactgtatggacattcctgaaataaggcgtctcggcgggctcgcggaaacagtattatatcggctttcacagccgcattcaatggtgtctgacagagggaataactctccagaaccgatcatgatatgaagacaaaagggtcttcggtatggatggcgaaatttgatttttacggatgacgaacgggctgtggcgccgcgcacaactcgctacttgagcaatgtgatattaccattcctttttttctgtcacggactcgggctcgcggcctaagaagagaatgaatcataccatttaccctgatcaaacacatatctacttgctgtgcctaatgtggggttgccttaatgaaacccgagcgtgacatgatgccttgtgcaacacgtatagactgtgatttggacattaatgaaattcaaccccagcattgtgatcgtgtatttttg

SEQ ID NO: 9117 - DNA, 1320 bp, Muscodor strobelii
  misc_feature: SGI cDNA ID NO. 562836
  misc_feature: Encodes the peptide sequence at SEQ ID NO 9118
atgccttccgccaccggttcaagctgggagaagtacaagaagaacttcgccgacgatgaaatagaagagaagaagatcacaccactctccgacgaagatattcaagtcctcaaaacatatggcgccgcaccctacggaaccgccctcaagaagctcgagcagcagatcaaagagaaacaacagagcgtcgatgagaagattggcgtcaaggagtccgacaccggtctcgccccgccacatctatgggatctagctgccgaccgccagcgtatgtccgaggagcagcccttgcaggtcgcccgctgcaccaagatcatcgccgacgagaaggacgagtccaagagcaaatatgtcatcaacgtcaagcagatagccaagttcgtcgtccagctcggtgaccgcgtgtcacccaccgatatcgaggagggcatgcgggttggtgtcgacaggaacaaatatcagattctcctgcccctaccacccaagatcgatgccagcgtcactatgatgacggtcgaggaaaagcccgatgtcacctacggcgacgtcggtggatgcaaagaacaggtcgagaagctgagagaggtcgtcgagatgcccttactgtcacccgaacgcttcgtcaacctcggtatcgatccccccaagggtgccctattatacgggccccccggtaccggaaagaccctttgcgcccgagccgtcgccaacagaaccgatgccacattcatccgagtcattggtagtgagttagtccagaagtatgtcggcgagggtgcaagaatggtgcgagagctcttcgagatggcccggacgaaaaaggcctgtatcattttcttcgacgaaatcgacgctgtaggaggagctcgcttcgacgacggagccggcggagacaacgaagtccaacgaaccatgttggagctcatcacacagcttgacggcttcgacgcacgtggaaacatcaaagtcatgttcgccaccaacagaccctccaccttagatccggccctcatgagacccggccgtattgaccgaaaaatcgaattctccctccccgacctcgagggccgcgccaacatcctccgtatccacgccaagtccatgtccgttgagcgggacatccgctgggagctcatctcccgtctctgccccaacgctaccggtgccgagctccgtagtgtgtgcacggaagccggcatgttcgccatccgcgccaggagaaaggtcgcgtccgagaaggacttcctgagcgccgtcgacaaggtcatcaagggcaatctcaagttcaactcgacggcgacgtatatgcagtacaattag

SEQ ID NO: 9118 - protein, 439 aa, Muscodor strobelii
  misc_feature: SGI Peptide ID NO. 562836
  misc_feature (217)..(404): Pfam Id: PF00004 Pfam Desc: ATPase family associated with various cellular activities (AAA)
  misc_feature (218)..(246): Pfam Id: PF07726 Pfam Desc: ATPase family associated with various cellular activities (AAA)
  misc_feature (1)..(439): NCBI GI: 39951877 Blast Desc: conserved [Magnaporthe grisea 70-15] gi|145020575|gb|EDK04704.1| conserved [Magnaporthe grisea 70-15]
  misc_feature (1)..(439): NCBI GI: 46107352 Blast Desc: FG00559.1 [Gibberella zeae PH-1]
  misc_feature (1)..(439): NCBI GI: 85111842 Blast Desc: 26S protease regulatory subunit 7 [Neurospora crassa OR74A] gi|28925898|gb|EAA34894.1| 26S protease regulatory subunit 7 [Neurospora crassa OR74A] gi|38566935|emb|CAE76238.1| 26S YTA3
  misc_feature (1)..(439): NCBI GI: 261356368 Blast Desc: 26S protease regulatory subunit 7 [Verticillium albo-atrum VaMs.102]
  misc_feature (1)..(439): NCBI GI: 154319207 Blast Desc: 26S protease regulatory subunit 7 [Botryotinia fuckeliana B05.10] gi|150856986|gb|EDN32178.1| 26S protease regulatory subunit 7 [Botryotinia fuckeliana B05.10]
  misc_feature (1)..(439): NCBI GI: 156063418 Blast Desc: SS1G_01827 [Sclerotinia sclerotiorum 1980] gi|154697161|gb|EDN96899.1| SS1G_01827 [Sclerotinia sclerotiorum 1980]
  misc_feature (1)..(439): NCBI GI: 11265294 Blast Desc: SS1G_01827 [Sclerotinia sclerotiorum 1980] gi|154697161|gb|EDN96899.1| SS1G_01827 [Sclerotinia sclerotiorum 1980]
  misc_feature (1)..(439): NCBI GI: 171696202 Blast Desc: protein product [Podospora anserina] gi|170948343|emb|CAP60507.1| protein product [Podospora anserina]
  misc_feature (1)..(439): NCBI GI: 145234069 Blast Desc: An02g12760 [Aspergillus niger] gi|134057348|emb|CAK44546.1| protein product [Aspergillus niger]
  misc_feature (1)..(439): NCBI GI: 225683273 Blast Desc: 26S protease regulatory subunit 7 [Paracoccidioides brasiliensis Pb03] gi|226283698|gb|EEH39264.1| 26S protease regulatory subunit 8 [Paracoccidioides brasiliensis Pb01] 26S 8
  misc_feature (178)..(406): SWISSPROT Homolog: EC 3.6.1.3 Adenosinetriphosphatase
MPSATGSSWEKYKKNFADDEIEEKKITPLSDEDIQVLKTYGAAPYGTALKKLEQQIKEKQQSVDEKIGVKESDTGLAPPHLWDLAADRQRMSEEQPLQVARCTKIIADEKDESKSKYVINVKQIAKFVVQLGDRVSPTDIEEGMRVGVDRNKYQILLPLPPKIDASVTMMTVEEKPDVTYGDVGGCKEQVEKLREVVEMPLLSPERFVNLGIDPPKGALLYGPPGTGKTLCARAVANRTDATFIRVIGSELVQKYVGEGARMVRELFEMARTKKACIIFFDEIDAVGGARFDDGAGGDNEVQRTMLELITQLDGFDARGNIKVMFATNRPSTLDPALMRPGRIDRKIEFSLPDLEGRANILRIHAKSMSVERDIRWELISRLCPNATGAELRSVCTEAGMFAIRARRKVASEKDFLSAVDKVIKGNLKFNSTATYMQYN

SEQ ID NO: 9119 - DNA, 1742 bp, Muscodor strobelii
  misc_feature: SGI EST ID NO. CUFF.21703.0
  misc_feature: Variant of the nucleotide sequence at SEQ ID NO 9117
caatcacatcactcagcgacttcacatctctcacgcccatcaccaccatcactcccacgatatcacgatcccgctcaacacgacaccccacaggacctcttcaacctacgtcatctatctgtgcaccatatccggatcataatacttcatatctcaggaccgccggtctcctgtcatcatgccttccgccaccggttcaagctgggagaagtacaagaagaacttcgccgacgatgaaatagaagagaagaagatcacaccactctccgacgaagatattcaagtcctcaaaacatatggcgccgcaccctacggaaccgccctcaagaagctcgagcagcagatcaaagagaaacaacagagcgtcgatgagaagattggcgtcaaggagtccgacaccggtctcgccccgccacatctatgggatctagctgccgaccgccagcgtatgtccgaggagcagcccttgcaggtcgcccgctgcaccaagatcatcgccgacgagaaggacgagtccaagagcaaatatgtcatcaacgtcaagcagatagccaagttcgtcgtccagctcggtgaccgcgtgtcacccaccgatatcgaggagggcatgcgggttggtgtcgacaggaacaaatatcagattctcctgcccctaccacccaagatcgatgccagcgtcactatgatgacggtcgaggaaaagcccgatgtcacctacggcgacgtcggtggatgcaaagaacaggtcgagaagctgagagaggtcgtcgagatgcccttactgtcacccgaacgcttcgtcaacctcggtatcgatccccccaagggtgccctattatacgggccccccggtaccggaaagaccctttgcgcccgagccgtcgccaacagaaccgatgccacattcatccgagtcattggtagtgagttagtccagaagtatgtcggcgagggtgcaagaatggtgcgagagctcttcgagatggcccggacgaaaaaggcctgtatcattttcttcgacgaaatcgacgctgtaggaggagctcgcttcgacgacggagccggcggagacaacgaagtccaacgaaccatgttggagctcatcacacagcttgacggcttcgacgcacgtggaaacatcaaagtcatgttcgccaccaacagaccctccaccttagatccggccctcatgagacccggccgtattgaccgaaaaatcgaattctccctccccgacctcgagggccgcgccaacatcctccgtatccacgccaagtccatgtccgttgagcgggacatccgctgggagctcatctcccgtctctgccccaacgctaccggtgccgagctccgtagtgtgtgcacggaagccggcatgttcgccatccgcgccaggagaaaggtcgcgtccgagaaggacttcctgagcgccgtcgacaaggtcatcaagggcaatctcaagttcaactcgacggcgacgtatatgcagtacaattagagatatcctcagcctaactatagcggtcatgggtcggtcattgtacgaatagggcggaaactacactggagctggtctgggctgcgctgggttgcattcttcgattctgcactggacggcgtgggagtagcatagatcatgaattgagacaagtttacgtaattgcttaagagtgctttctgttgtcgcttctgcgtgatcataaccgatattcgtaaactgctttaagactccgtgagcttcg

SEQ ID NO: 9120 - DNA, 1605 bp, Muscodor strobelii
  misc_feature: SGI cDNA ID NO. 562837
  misc_feature: Encodes the peptide sequence at SEQ ID NO 9121
atggccacaacagccccttctggcggcaacacgcatagcaatgcctccttcagagataaagagaagcccctggctgtgcgatcgtctaacatcgtagctgcaagagccgtcgccgatgcgatcagaacctccttgggccctcgaggcatggacaagatgattcggagtggaaagggcgagaccatcatcacaaacgacggaaacaccatgctgaagagcatgtccgtcttgcaccctaccgccaagatgctggtcaacctttcctccgcacaggatgtcgaggctggtgatggaacaacctctgtcgttgtcatttgcggagctttacttggtgccgccgacagattattatcgaagggcatccacccttcagtcatatccgagtcattccaaagagccgccgctgctgccgtccagattctacacgatatgtcccagcccgtctccttgtccgacaacgccaccctcctccaggcagccaatacctcgctgtcctccaagattgtctctcaatactccggtttactcggtaccatggccgtcaacgctgtcacaaagactatcgatattaagagcgccgacaatgtcgacttgaagaatatcagaatcattaagaaagtcggaggcacgatagaggatagtgagttggtaaatggtctggttctcacacagcctgtcataaaggccgctggcggtcccataaggatggagaaggcaaagatcggtttgattcagttccagctgagcccgcctaagccagacatggagaacactattgccgtcaacgactaccgacagatggacaagattgttaaggaagagcgtctatatctcctagatctcgtcaagaagatcaagaaagccaagtgcaatgttctccttatccagaagtctattcttcgcgacgcagtcaacgacttgtcgctacacttcctagcaaagttgaacattctggccgtcaaggatattgagcgtgatgaagtcgagttcatctgcaaatcaaccggctgcaagcccattgccgatatcgattcatttaccgaggataagttaggaactgccgatctagtcgaagaggcacagtccaacggagctcgcatggtaaaggttactggtactaagtctacaggcaagaccgtatcggtggtatgccgtggtgccaacagtctcattctcgatgaggctgagcgttcacttcacgatgctctttgcgttatccgatgcttggtaaagaagaaggccctcattgccggtggtggcgctcctgagatcgaaattgcagcccaactctctaaacaggcgcggtctctcactggtacggaagctatttgctggaaggcatttgcggacgcgctggaggttattcctacaaccctggcagagaatgctggtctcaacagcatcaaggtcgttacggatcttcgacatagacacgagatgggtgagaagaatgcaggtgtcagcatcaggagtggcggcgtgaactcaaacatcgccaaagaaaatgtgcttcagcccttattggttagcaccagcgccatagagttggctgctgagaccgtcaagatgattctgagaatcgacgacatcgccttgaccaggtaa

SEQ ID NO: 9121 - protein, 534 aa, Muscodor strobelii
  misc_feature: SGI Peptide ID NO. 562837
  misc_feature (37)..(534): Pfam Id: PF00118 Pfam Desc: TCP-1/cpn60 chaperonin family
  misc_feature (1)..(534): NCBI GI: 39951879 Blast Desc: conserved [Magnaporthe grisea 70-15] gi|58257427|gb|AAW69335.1| T-complex protein-like protein [Magnaporthe grisea] gi|145020574|gb|EDK04703.1| conserved grisea
  misc_feature (6)..(534): NCBI GI: 116181622 Blast Desc: conserved [Chaetomium globosum CBS 148.51] gi|88185736|gb|EAQ93204.1| conserved [Chaetomium globosum CBS 148.51]
  misc_feature (9)..(534): NCBI GI: 46107350 Blast Desc: FG00558.1 [Gibberella zeae PH-1]
  misc_feature (1)..(534): NCBI GI: 261356367 Blast Desc: T-complex protein 1 subunit delta [Verticillium albo-atrum VaMs.102]
  misc_feature (24)..(534): NCBI GI: 256734508 Blast Desc: [Nectria haematococca mpVI 77-13-4]
  misc_feature (1)..(534): NCBI GI: 156063416 Blast Desc: SS1G_01826 [Sclerotinia sclerotiorum 1980] gi|154697160|gb|EDN96898.1| SS1G_01826 [Sclerotinia sclerotiorum 1980]
  misc_feature (1)..(534): NCBI GI: 154319209 Blast Desc: BC1G_02556 [Botryotinia fuckeliana B05.10] gi|150856987|gb|EDN32179.1| BC1G_02556 [Botryotinia fuckeliana B05.10]
  misc_feature (13)..(534): NCBI GI: 85111840 Blast Desc: T-complex protein 1 [Neurospora crassa OR74A] gi|28925897|gb|EAA34893.1| T-complex protein 1 [Neurospora crassa OR74A] gi|38566936|emb|CAE76239.1| chaperonin CCT4, cytosolic
  misc_feature (13)..(534): NCBI GI: 11277145 Blast Desc: T-complex protein 1 [Neurospora crassa OR74A] gi|28925897|gb|EAA34893.1| T-complex protein 1 [Neurospora crassa OR74A] gi|38566936|emb|CAE76239.1| chaperonin CCT4, cytosolic
  misc_feature (2)..(534): NCBI GI: 242822809 Blast Desc: t-complex protein 1, delta subunit, [Talaromyces stipitatus ATCC 10500] gi|218712884|gb|EED12309.1| t-complex protein 1, delta subunit, [Talaromyces stipitatus ATCC 10500]
MATTAPSGGNTHSNASFRDKEKPLAVRSSNIVAARAVADAIRTSLGPRGMDKMIRSGKGETIITNDGNTMLKSMSVLHPTAKMLVNLSSAQDVEAGDGTTSVVVICGALLGAADRLLSKGIHPSVISESFQRAAAAAVQILHDMSQPVSLSDNATLLQAANTSLSSKIVSQYSGLLGTMAVNAVTKTIDIKSADNVDLKNIRIIKKVGGTIEDSELVNGLVLTQPVIKAAGGPIRMEKAKIGLIQFQLSPPKPDMENTIAVNDYRQMDKIVKEERLYLLDLVKKIKKAKCNVLLIQKSILRDAVNDLSLHFLAKLNILAVKDIERDEVEFICKSTGCKPIADIDSFTEDKLGTADLVEEAQSNGARMVKVTGTKSTGKTVSVVCRGANSLILDEAERSLHDALCVIRCLVKKKALIAGGGAPEIEIAAQLSKQARSLTGTEAICWKAFADALEVIPTTLAENAGLNSIKVVTDLRHRHEMGEKNAGVSIRSGGVNSNIAKENVLQPLLVSTSAIELAAETVKMILRIDDIALTR

SEQ ID NO: 9122 - DNA, 1882 bp, Muscodor strobelii
  misc_feature: SGI EST ID NO. CUFF.21859.0
  misc_feature: Variant of the nucleotide sequence at SEQ ID NO 9120
cgggggagcaatacctctatcgacccctctcaacaatacccagcgtcaacaccactgaacttcagccgccacgaaccagctttcaaatctccagcttcgtctgtggaggaaagaccgaaaacatttcaaaatagtcgcaagtttcgcccagcatggccacaacagccccttctggcggcaacacgcatagcaatgcctccttcagagataaagagaagcccctggctgtgcgatcgtctaacatcgtagctgcaagagccgtcgccgatgcgatcagaacctccttgggccctcgaggcatggacaagatgattcggagtggaaagggcgagaccatcatcacaaacgacggaaacaccatgctgaagagcatgtccgtcttgcaccctaccgccaagatgctggtcaacctttcctccgcacaggatgtcgaggctggtgatggaacaacctctgtcgttgtcatttgcggagctttacttggtgccgccgacagattattatcgaagggcatccacccttcagtcatatccgagtcattccaaagagccgccgctgctgccgtccagattctacacgatatgtcccagcccgtctccttgtccgacaacgccaccctcctccaggcagccaatacctcgctgtcctccaagattgtctctcaatactccggtttactcggtaccatggccgtcaacgctgtcacaaagactatcgatattaagagcgccgacaatgtcgacttgaagaatatcagaatcattaagaaagtcggaggcacgatagaggatagtgagttggtaaatggtctggttctcacacagcctgtcataaaggccgctggcggtcccataaggatggagaaggcaaagatcggtttgattcagttccagctgagcccgcctaagccagacatggagaacactattgccgtcaacgactaccgacagatggacaagattgttaaggaagagcgtctatatctcctagatctcgtcaagaagatcaagaaagccaagtgcaatgttctccttatccagaagtctattcttcgcgacgcagtcaacgacttgtcgctacacttcctagcaaagttgaacattctggccgtcaaggatattgagcgtgatgaagtcgagttcatctgcaaatcaaccggctgcaagcccattgccgatatcgattcatttaccgaggataagttaggaactgccgatctagtcgaagaggcacagtccaacggagctcgcatggtaaaggttactggtactaagtctacaggcaagaccgtatcggtggtatgccgtggtgccaacagtctcattctcgatgaggctgagcgttcacttcacgatgctctttgcgttatccgatgcttggtaaagaagaaggccctcattgccggtggtggcgctcctgagatcgaaattgcagcccaactctctaaacaggcgcggtctctcactggtacggaagctatttgctggaaggcatttgcggacgcgctggaggttattcctacaaccctggcagagaatgctggtctcaacagcatcaaggtcgttacggatcttcgacatagacacgagatgggtgagaagaatgcaggtgtcagcatcaggagtggcggcgtgaactcaaacatcgccaaagaaaatgtgcttcagcccttattggttagcaccagcgccatagagttggctgctgagaccgtcaagatgattctgagaatcgacgacatcgccttgaccaggtaagaaatgatcaggacagggttgtcaagtggaaaaaagaatgtaccataatagacttgatgtggatactactagataatggtccgctgaatgatatccctgccaaaacacaatactatgaagcaatg

SEQ ID NO: 9123 - DNA, 1002 bp, Muscodor strobelii
  misc_feature: SGI cDNA ID NO. 562838
  misc_feature: Encodes the peptide sequence at SEQ ID NO 9124
atggcgtctgtacctaaggagatgaaggccgtcctcatcaacaagacgggtggtcccgaggtcttggagcataggtcggatatccctgttcctacccctatcgatgggaacttgctcattaagaatgagtttctaggtgtgaatttcattgatacctacttccgcacgggtctctatccggcaccccaactcccttacatccttggccgggaagccgaaggcacggtagtctccaccggacccggcgacacgcacggtcttaaggtcggagaccgcgtggtctacctggctgaaggctcatacgcagaatacaactccgtgccctccgcaaaagtggtcgcgatcccctcatcaccggctttcaagcccggtgtcgcagctgcggcgctcctccaaggtctcacggcacttaccctagtccgtgaagctcacgctgttaaaaagggagattgggtcctcgtccatgccgctgccggtggcacaggtttactattggtccagttgttgaaggccatcggcgcaaataccatcggaacagcgagcacggaggaaaagtgcaaattagcaagggataacggagcaacacacaccatcaactacagcgttgaagacgtaaagaccaaagtcatggaactcacgtccggcgcaggatgtaccgccgtgtacgacggagtcggtaaatcgacattcgacctatctctcgagtgtgtcgctcgtaagggtagtttgttgtcgtttggtaatgcgtcgggggcgccggctccgctgactattgcgagactgtcggcgaagaatgctaggttgatgagacctacgctttttaactatctcgttacgagagaggaacttgtgggctatgtggaggatctgtggaagtttattgagggcgggttgagtgttaaggttcatgaggtttatcccctgagtgaggtcaagagggcccatgaggatcttgaggggaggaagagtactgggaagcttttgttggaccctacgaagtag

SEQ ID NO: 9124 - protein, 333 aa, Muscodor strobelii
  misc_feature: SGI Peptide ID NO. 562838
  misc_feature (35)..(115): Pfam Id: PF08240 Pfam Desc: Alcohol dehydrogenase GroES-like domain
  misc_feature (148)..(292): Pfam Id: PF00107 Pfam Desc: Zinc-binding dehydrogenase
  misc_feature (1)..(329): NCBI GI: 154299680 Blast Desc: BC1G_11466 [Botryotinia fuckeliana B05.10] gi|150857156|gb|EDN32348.1| BC1G_11466 [Botryotinia fuckeliana B05.10]
  misc_feature (4)..(329): NCBI GI: 156049241 Blast Desc: SS1G_08327 [Sclerotinia sclerotiorum 1980] gi|154692726|gb|EDN92464.1| SS1G_08327 [Sclerotinia sclerotiorum 1980]
  misc_feature (1)..(331): NCBI GI: 169621724 Blast Desc: SNOG_14072 [Phaeosphaeria nodorum SN15] gi|111057577|gb|EAT78697.1| SNOG_14072 [Phaeosphaeria nodorum SN15]
  misc_feature (1)..(324): NCBI GI: 189205765 Blast Desc: quinone oxidoreductase [Pyrenophora tritici-repentis Pt-1C-BFP] gi|187975310|gb|EDU41936.1| quinone oxidoreductase [Pyrenophora tritici-repentis Pt-1C-BFP]
  misc_feature (1)..(329): NCBI GI: 212534720 Blast Desc: quinone oxidoreductase, [Penicillium marneffei ATCC 18224] gi|210069915|gb|EEA24005.1| quinone oxidoreductase, [Penicillium marneffei ATCC 18224]
  misc_feature (3)..(331): NCBI GI: 119479043 Blast Desc: quinone oxidoreductase, [Neosartorya fischeri NRRL 181] gi|119407704|gb|EAW17653.1| quinone oxidoreductase, [Neosartorya fischeri NRRL 181]
  misc_feature (3)..(331): NCBI GI: 70997521 Blast Desc: quinone oxidoreductase [Aspergillus fumigatus Af293] gi|66851142|gb|EAL91468.1| quinone oxidoreductase, [Aspergillus fumigatus Af293] gi|159126764|gb|EDP51880.1| quinone [Aspergillus
  misc_feature (3)..(329): NCBI GI: 115387599 Blast Desc: ATEG_02127 [Aspergillus terreus NIH2624] gi|114195389|gb|EAU37089.1| ATEG_02127 [Aspergillus terreus NIH2624]
  misc_feature (3)..(331): NCBI GI: 121713658 Blast Desc: quinone oxidoreductase, [Aspergillus clavatus NRRL 1] gi|119402593|gb|EAW13014.1| quinone oxidoreductase, [Aspergillus clavatus NRRL 1]
  misc_feature (3)..(331): NCBI GI: 169775281 Blast Desc: [Aspergillus oryzae RIB40] gi|238496091|ref|XP_002379281.1| quinone oxidoreductase, [Aspergillus flavus NRRL3357] gi|83769971|dbj|BAE60106.1| protein
  misc_feature (2)..(330): SWISSPROT Homolog: EC 1.6.5.5 NADPH:quinone reductase
MASVPKEMKAVLINKTGGPEVLEHRSDIPVPTPIDGNLLIKNEFLGVNFIDTYFRTGLYPAPQLPYILGREAEGTVVSTGPGDTHGLKVGDRVVYLAEGSYAEYNSVPSAKVVAIPSSPAFKPGVAAAALLQGLTALTLVREAHAVKKGDWVLVHAAAGGTGLLLVQLLKAIGANTIGTASTEEKCKLARDNGATHTINYSVEDVKTKVMELTSGAGCTAVYDGVGKSTFDLSLECVARKGSLLSFGNASGAPAPLTIARLSAKNARLMRPTLFNYLVTREELVGYVEDLWKFIEGGLSVKVHEVYPLSEVKRAHEDLEGRKSTGKLLLDPTK

SEQ ID NO: 9125 - DNA, 1526 bp, Muscodor strobelii
  misc_feature: SGI EST ID NO. CUFF.21672.0
  misc_feature: Variant of the nucleotide sequence at SEQ ID NO 9123
cggggctcggcatcatcgtcatgtataaggcgtttgtggacctgcgagacggccattatattccacgaagcgacaccgggagcttacaaatgaaattgcggcgtttagtcttctccaactcacttgtcaattcaaataagttggtgatcctatcaagactcacaatcatatccgacctgaccactatcatcaatcacccatctatcgcctatctcggtggtatgtcccttcgcattgcgtcacatcgcgcaactcatcgagtatctgctctcgcgtctcaatttgctcgtagtagtagcccaaatttctatttcccagcgacaagactacaagcatcattgtctatctcaaataactttatacgcacaatggcgtctgtacctaaggagatgaaggccgtcctcatcaacaagacgggtggtcccgaggtcttggagcataggtcggatatccctgttcctacccctatcgatgggaacttgctcattaagaatgagtttctaggtgtgaatttcattgatacctacttccgcacgggtctctatccggcaccccaactcccttacatccttggccgggaagccgaaggcacggtagtctccaccggacccggcgacacgcacggtcttaaggtcggagaccgcgtggtctacctggctgaaggctcatacgcagaatacaactccgtgccctccgcaaaagtggtcgcgatcccctcatcaccggctttcaagcccggtgtcgcagctgcggcgctcctccaaggtctcacggcacttaccctagtccgtgaagctcacgctgttaaaaagggagattgggtcctcgtccatgccgctgccggtggcacaggtttactattggtccagttgttgaaggccatcggcgcaaataccatcggaacagcgagcacggaggaaaagtgcaaattagcaagggataacggagcaacacacaccatcaactacagcgttgaagacgtaaagaccaaagtcatggaactcacgtccggcgcaggatgtaccgccgtgtacgacggagtcggtaaatcgacattcgacctatctctcgagtgtgtcgctcgtaagggtagtttgttgtcgtttggtaatgcgtcgggggcgccggctccgctgactattgcgagactgtcggcgaagaatgctaggttgatgagacctacgctttttaactatctcgttacgagagaggaacttgtgggctatgtggaggatctgtggaagtttattgagggcgggttgagtgttaaggttcatgaggtttatcccctgagtgaggtcaagagggcccatgaggatcttgaggggaggaagagtactgggaagcttttgttggaccctacgaagtaggcgagatgagatttaatgagtgagtggatttctcggtgaatttggttcaaaggtgtcttctaagaggagcctaaccaagccgattatattcatgtcaatatacaattctgtagatgaagaaaaactacacgggctatgtgtcactgtctcttgata

SEQ ID NO: 9126 - DNA, 3054 bp, Muscodor strobelii
  misc_feature: SGI cDNA ID NO. 562839
  misc_feature: Encodes the peptide sequence at SEQ ID NO 9127
atggccacaacagccccttctggcggcaacacgcatagcaatgcctccttcagagataaagagaagcccctggctgtgcgatcgtctaacatcgtagctgcaagagccgtcgccgatgcgatcagaacctccttgggccctcgaggcatggacaagatgattcggagtggaaagggcgagaccatcatcacaaacgacggaaacaccatgctgaagagcatgtccgtcttgcaccctaccgccaagatgctggtcaacctttcctccgcacaggatgtcgaggctggtgatggaacaacctctgtcgttgtcatttgcggagctttacttggtgccgccgacagattattatcgaagggcatccacccttcagtcatatccgagtcattccaaagagccgccgctgctgccgtccagattctacacgatatgtcccagcccgtctccttgtccgacaacgccaccctcctccaggcagccaatacctcgctgtcctccaagattgtctctcaatactccggtttactcggtaccatggccgtcaacgctgtcacaaagactatcgatattaagagcgccgacaatgtcgacttgaagaatatcagaatcattaagaaagtcggaggcacgatagaggatagtgagttggtaaatggtctggttctcacacagcctgtcataaaggccgctggcggtcccataaggatggagaaggcaaagatcggtttgattcagttccagctgagcccgcctaagccagacatggagaacactattgccgtcaacgactaccgacagatggacaagattgttaaggaagagcgtctatatctcctagatctcgtcaagaagatcaagaaagccaagtgcaatgttctccttatccagaagtctattcttcgcgacgcagtcaacgacttgtcgctacacttcctagcaaagttgaacattctggccgtcaaggatattgagcgtgatgaagtcgagttcatctgcaaatcaaccggctgcaagcccattgccgatatcgattcatttaccgaggataagttaggaactgccgatctagtcgaagaggcacagtccaacggagctcgcatggtaaaggttactggtactaagtctacaggcaagaccgtatcggtggtatgccgtggtgccaacagtctcattctcgatgaggctgagcgttcacttcacgatgctctttgcgttatccgatgcttggtaaagaagaaggccctcattgccggtggtggcgctcctgagatcgaaattgcagcccaactctctaaacaggcgcggtctctcactggtacggaagctatttgctggaaggcatttgcggacgcgctggaggttattcctacaaccctggcagagaatgctggtctcaacagcatcaaggtcgttacggatcttcgacatagacacgagatgggtgagaagaatgcaggtgtcagcatcaggagtggcggcgtgaactcaaacatcgccaaagaaaatgtgcttcagcccttattggttagcaccagcgccatagagttggctgctgagaccgtcaagatgattctgagaatcgacgacatcgccttgaccagattcggagtttatccgggagttacaatgaggagcaccacattcgacttccgtcttgtagcgccggaagagtgggggccagatgcggggctcggcatcatcgtcatgtataaggcgtttgtggacctgcgagacggccattatattccacgaagcgacaccgggagcttacaaatgaaattgcggcgtttagtcttctccaactcacttgtcaattcaaataagttggtgatcctatcaagactcacaatcatatccgacctgaccactatcatcaatcacccatctatcgcctatctcggtggtatgtcccttcgcattgcgtcacatcgcgcaactcatcgagtatctgctctcgcgtctcaatttgctcgtagtagtagcccaaatttctatttcccagcgacaagactacaagcatcattgtctatctcaaataactttatacgcacaatggcgtctgtacctaaggagatgaaggccgtcctcatcaacaagacgggtggtcccgaggtcttggagcataggtcggatatccctgttcctacccctatcgatgggaacttgctcattaagaatgagtttctaggtgtgaatttcattgatacctacttccgcacgggtctctatccggcaccccaactcccttacatccttggccgggaagccgaaggcacggtagtctccaccggacccggcgacacgcacggtcttaaggtcggagaccgcgtggtctacctggctgaaggctcatacgcagaatacaactccgtgccctccgcaaaagtggtcgcgatcccctcatcaccggctttcaagcccggtgtcgcagctgcggcgctcctccaaggtctcacggcacttaccctagtccgtgaagctcacgctgttaaaaagggagattgggtcctcgtccatgccgctgccggtggcacaggtttactattggtccagttgttgaaggccatcggcgcaaataccatcggaacagcgagcacggaggaaaagtgcaaattagcaagggataacggagcaacacacaccatcaactacagcgttgaagacgtaaagaccaaagtcatggaactcacgtccggcgcaggatgtaccgccgtgtacgacggagtcggtaaatcgacattcgacctatctctcgagtgtgtcgctcgtaagggtagtttgttgtcgtttggtaatgcgtcgggggcgccggctccgctgactattgcgagactgtcggcgaagaatgctaggttgatgagacctacgctttttaactatctcgttacgagagaggaacttgtgggctatgtggaggatctgtggaagtttattgagggcgggttgagtgttaaggttcatgaggtttatcccctgagtgaggtcaagagggcccatgaggatcttgaggggaggaagagtactgggaagcttttgttggaccctacgaagtag

SEQ ID NO: 9127 - protein, 1017 aa, Muscodor strobelii
  misc_feature: SGI Peptide ID NO. 562839
  misc_feature (719)..(799): Pfam Id: PF08240 Pfam Desc: Alcohol dehydrogenase GroES-like domain
  misc_feature (832)..(976): Pfam Id: PF00107 Pfam Desc: Zinc-binding dehydrogenase
  misc_feature (37)..(534): Pfam Id: PF00118 Pfam Desc: TCP-1/cpn60 chaperonin family
  misc_feature (1)..(534): NCBI GI: 39951879 Blast Desc: conserved [Magnaporthe grisea 70-15] gi|58257427|gb|AAW69335.1| T-complex protein-like protein [Magnaporthe grisea] gi|145020574|gb|EDK04703.1| conserved grisea
  misc_feature (6)..(534): NCBI GI: 116181622 Blast Desc: conserved [Chaetomium globosum CBS 148.51] gi|88185736|gb|EAQ93204.1| conserved [Chaetomium globosum CBS 148.51]
  misc_feature (9)..(534): NCBI GI: 46107350 Blast Desc: FG00558.1 [Gibberella zeae PH-1]
  misc_feature (1)..(534): NCBI GI: 261356367 Blast Desc: T-complex protein 1 subunit delta [Verticillium albo-atrum VaMs.102]
  misc_feature (24)..(534): NCBI GI: 256734508 Blast Desc: [Nectria haematococca mpVI 77-13-4]
  misc_feature (1)..(534): NCBI GI: 156063416 Blast Desc: SS1G_01826 [Sclerotinia sclerotiorum 1980] gi|154697160|gb|EDN96898.1| SS1G_01826 [Sclerotinia sclerotiorum 1980]
  misc_feature (1)..(534): NCBI GI: 154319209 Blast Desc: BC1G_02556 [Botryotinia fuckeliana B05.10] gi|150856987|gb|EDN32179.1| BC1G_02556 [Botryotinia fuckeliana B05.10]
  misc_feature (13)..(534): NCBI GI: 85111840 Blast Desc: T-complex protein 1 [Neurospora crassa OR74A] gi|28925897|gb|EAA34893.1| T-complex protein 1 [Neurospora crassa OR74A] gi|38566936|emb|CAE76239.1| chaperonin CCT4, cytosolic
  misc_feature (13)..(534): NCBI GI: 11277145 Blast Desc: T-complex protein 1 [Neurospora crassa OR74A] gi|28925897|gb|EAA34893.1| T-complex protein 1 [Neurospora crassa OR74A] gi|38566936|emb|CAE76239.1| chaperonin CCT4, cytosolic
  misc_feature (2)..(534): NCBI GI: 242822809 Blast Desc: t-complex protein 1, delta subunit, [Talaromyces stipitatus ATCC 10500] gi|218712884|gb|EED12309.1| t-complex protein 1, delta subunit, [Talaromyces stipitatus ATCC 10500]
MATTAPSGGNTHSNASFRDKEKPLAVRSSNIVAARAVADAIRTSLGPRGMDKMIRSGKGETIITNDGNTMLKSMSVLHPTAKMLVNLSSAQDVEAGDGTTSVVVICGALLGAADRLLSKGIHPSVISESFQRAAAAAVQILHDMSQPVSLSDNATLLQAANTSLSSKIVSQYSGLLGTMAVNAVTKTIDIKSADNVDLKNIRIIKKVGGTIEDSELVNGLVLTQPVIKAAGGPIRMEKAKIGLIQFQLSPPKPDMENTIAVNDYRQMDKIVKEERLYLLDLVKKIKKAKCNVLLIQKSILRDAVNDLSLHFLAKLNILAVKDIERDEVEFICKSTGCKPIADIDSFTEDKLGTADLVEEAQSNGARMVKVTGTKSTGKTVSVVCRGANSLILDEAERSLHDALCVIRCLVKKKALIAGGGAPEIEIAAQLSKQARSLTGTEAICWKAFADALEVIPTTLAENAGLNSIKVVTDLRHRHEMGEKNAGVSIRSGGVNSNIAKENVLQPLLVSTSAIELAAETVKMILRIDDIALTRFGVYPGVTMRSTTFDFRLVAPEEWGPDAGLGIIVMYKAFVDLRDGHYIPRSDTGSLQMKLRRLVFSNSLVNSNKLVILSRLTIISDLTTIINHPSIAYLGGMSLRIASHRATHRVSALASQFARSSSPNFYFPATRLQASLSISNNFIRTMASVPKEMKAVLINKTGGPEVLEHRSDIPVPTPIDGNLLIKNEFLGVNFIDTYFRTGLYPAPQLPYILGREAEGTVVSTGPGDTHGLKVGDRVVYLAEGSYAEYNSVPSAKVVAIPSSPAFKPGVAAAALLQGLTALTLVREAHAVKKGDWVLVHAAAGGTGLLLVQLLKAIGANTIGTASTEEKCKLARDNGATHTINYSVEDVKTKVMELTSGAGCTAVYDGVGKSTFDLSLECVARKGSLLSFGNASGAPAPLTIARLSAKNARLMRPTLFNYLVTREELVGYVEDLWKFIEGGLSVKVHEVYPLSEVKRAHEDLEGRKSTGKLLLDPTK

SEQ ID NO: 9128 - DNA, 1882 bp, Muscodor strobelii; identical to SEQ ID NO: 9122
  misc_feature: SGI EST ID NO. CUFF.21859.0
  misc_feature: Variant of the nucleotide sequence at SEQ ID NO 9126

SEQ ID NO: 9129 - DNA, 2739 bp, Muscodor strobelii
  misc_feature: SGI cDNA ID NO. 562840
  misc_feature: Reduced expression when VOC is produced
  misc_feature: Encodes the peptide sequence at SEQ ID NO 9130
atgagattaatccaaccgttatggggtgctgaatctaacgctggtgttctctgccgtgaagaacaccgcagaaggagccacacgcgtgtgagcggtccttgcccgtctctcgactgcactaatacccaatcagccatcacatgcgcagaagaggcaagccaacctgattttcttttgccctcccacaacacacaagtccccctcccctccatcttcttccacatctccatcccccttctctgccacctcaagctcaccaccaacaccaacacaatctggtgccccttttggcccttcttgctcagttttgaagctgctttcaaccctttcttgcgtgtctctcacgcggctctcccttttggtgccatggagtaccatgcaaagggcagtggtggccaaggtgccaccaccaaccaggccaaccaggccaacggaggcagtgcgcagttgcaaggtggacgcgcctcgaccagttctctgagctctctttccgtctcgccaaccccaccacctggtttcgtcccccgcgcgtcgtacttcaacggtctccaactcgctgaggatcaccgagtcaacaacagccgcaacgattcctaccttgcggacgacctcaccccacgcggcaagcgtgcgttcaaacgagacttcgtgcgcgagcaggaggaacgagagcgccaggaggcacgagaccgcgaagaccccaacatgtcgggcaacacgggcaagtggcgcgaggagcaggtgctcatcatctgccccggcagccacaccaccatggcccagctcggcgtcggcgagctgaccctgcccacccatcgcattcccacccgaatgttcaaggatcccgacagcaacgacttcgtcccctaccgcacctacaagcgcaagaagagcgctactactactaccaccccggctaccgcccagacggctgcctctgccaatgacgctgctactgctactgctactactaccaaggatagtgctgtcggcggcgacgacgacgagtgggagtatgtcgaggaccgcgacagtgtcgagggcgccatcttgcccatgatcagtggcagtatcgtcaacatgcgcgctttcctcgccttcctcgagcacgtccacagcctgctcaccaccacctaccacaacacccccatcgtcctcatggcctcccctatctggtcccgaggccagatcgagatcatcacccgctacatcttcgagaagactaagactccctccttgtgtctcatgaacagcgccgccgccacccagtacggtgccaagcatccccacatgactgtcgtcgacattggcttcgagaaggttgacgtcacctgtctgcacgagtactacatcgtaaaccacaactccatcggatgcaacccctccctctgcgagatctcgggcggcgaagtcttcacccagaagctgcactctctgctcaaggacaagggcttcacctacgacatggccgagcagctcaagaaaagccccatctgcgaggtcctccccttcgtgccctcgaaggagcacggcatggacctccctaccgaggatcctgcccacagccacggtgccgaagccaccagtacctccgagccggccaagcctgccttcgccgctgacgccgacatgtccaatggcgatggtaaggataccgacgagggcgttctcgacgtggccaatatcgttactagcggtaatacgcgtgagttcctcgccaagcgcgaaaaggagaaggaagcgaaagcgaaggccaaggctaagggcaagggccaggatgccgaaggcgctgctaaggctcaacgcgttcccaattcccagcgcaagaccaatactttccactacgaagacctggagcacgaggacgtcgaagttcctgtctccaacggccatactggagctactgcttcggccaacggcgagacgcaagctgcggcaggtggcgcggctaaagcaggagaaaaaccagaggctgagcctactgcaaccgacggcacggctggcgcttcttcagattcgggcccaaccgcaacggagcgtcgaaccaagcgtgtacgcaaggacgtcgaggtcggcctagagcgattcctctttgccgaacgtctccagatcgaccgcatcgtcgactgcatctaccgaactgtacaacagatccccgagatgggcatgcgcccgcattgttgggaatgcattgccatcgtcggcaatggtagccgcatcaaaggcttgaaggagaacattatggagaccttggagaaacgctacaaaatctcccccagcaccgccactatgttcgtgtctgaactcccctctaacatggctacgcccagtggaaccggctcccagaccccgactggctcgttcacaggccaactgcccacatcaagctctgtcaacccgctgctgcaggctgcgactacagcctcacttggtgttcctggtcatgcacaggcacctggctctcaggctggcggaagcagccatcaccaccacggtcagacgccaatgcacattaaaccagtcacttggcctacttatctcgcagagtggactaagagtggctttgaggaggccatgtttctcggctgttgcatcgctggccgcttagtctatgtcatccatcagtcggaccctagattggccgaagattaccgcatgagtcaattcagtcgcgtcgactacaacgagcttggtccccggggaatccatcatcagagtatgcttgccggaggcacctga

SEQ ID NO: 9130 - protein, 912 aa, Muscodor strobelii
  misc_feature: SGI Peptide ID NO. 562840
  misc_feature (243)..(907): Pfam Id: PF00022 Pfam Desc: Actin
  misc_feature (236)..(908): NCBI GI: 171683563 Blast Desc: protein product [Podospora anserina] gi|170941741|emb|CAP67395.1| protein product [Podospora anserina]
  misc_feature (236)..(895): NCBI GI: 145603436 Blast Desc: MGG_06054 [Magnaporthe grisea 70-15] gi|145011666|gb|EDJ96322.1| MGG_06054 [Magnaporthe grisea 70-15]
  misc_feature (236)..(909): NCBI GI: 116194478 Blast Desc: CHGG_03837 [Chaetomium globosum CBS 148.51] gi|88179750|gb|EAQ87218.1| CHGG_03837 [Chaetomium globosum CBS 148.51]
  misc_feature (236)..(909): NCBI GI: 256727448 Blast Desc: NECHADRAFT_32425 [Nectria haematococca mpVI 77-13-4]
  misc_feature (215)..(906): NCBI GI: 46123589 Blast Desc: FG06172.1 [Gibberella zeae PH-1]
  misc_feature (236)..(908): NCBI GI: 261355838 Blast Desc: conserved [Verticillium albo-atrum VaMs.102]
  misc_feature (243)..(908): NCBI GI: 156057199 Blast Desc: SS1G_04330 [Sclerotinia sclerotiorum 1980] gi|154702116|gb|EDO01855.1| SS1G_04330 [Sclerotinia sclerotiorum 1980]
  misc_feature (236)..(625): NCBI GI: 85105848 Blast Desc: NCU08840 [Neurospora crassa OR74A] gi|28923644|gb|EAA32815.1| conserved [Neurospora crassa OR74A]
  misc_feature (243)..(907): NCBI GI: 169610253 Blast Desc: SNOG_08223 [Phaeosphaeria nodorum SN15] gi|111063379|gb|EAT84499.1| SNOG_08223 [Phaeosphaeria nodorum SN15]
  misc_feature (243)..(907): NCBI GI: 121712090 Blast Desc: chromatin remodeling complex subunit (Arp9), [Aspergillus clavatus NRRL 1] gi|119401812|gb|EAW12234.1| chromatin remodeling complex subunit (Arp9), [Aspergillus NRRL 1]
  misc_feature: Useful for introducing or modulating the production of volatile compounds
MRLIQPLWGAESNAGVLCREEHRRRSHTRVSGPCPSLDCTNTQSAITCAEEASQPDFLLPSHNTQVPLPSIFFHISIPLLCHLKLTTNTNTIWCPFWPFLLSFEAAFNPFLRVSHAALPFGAMEYHAKGSGGQGATTNQANQANGGSAQLQGGRASTSSLSSLSVSPTPPPGFVPRASYFNGLQLAEDHRVNNSRNDSYLADDLTPRGKRAFKRDFVREQEERERQEARDREDPNMSGNTGKWREEQVLIICPGSHTTMAQLGVGELTLPTHRIPTRMFKDPDSNDFVPYRTYKRKKSATTTTTPATAQTAASANDAATATATTTKDSAVGGDDDEWEYVEDRDSVEGAILPMISGSIVNMRAFLAFLEHVHSLLTTTYHNTPIVLMASPIWSRGQIEIITRYIFEKTKTPSLCLMNSAAATQYGAKHPHMTVVDIGFEKVDVTCLHEYYIVNHNSIGCNPSLCEISGGEVFTQKLHSLLKDKGFTYDMAEQLKKSPICEVLPFVPSKEHGMDLPTEDPAHSHGAEATSTSEPAKPAFAADADMSNGDGKDTDEGVLDVANIVTSGNTREFLAKREKEKEAKAKAKAKGKGQDAEGAAKAQRVPNSQRKTNTFHYEDLEHEDVEVPVSNGHTGATASANGETQAAAGGAAKAGEKPEAEPTATDGTAGASSDSGPTATERRTKRVRKDVEVGLERFLFAERLQIDRIVDCIYRTVQQIPEMGMRPHCWECIAIVGNGSRIKGLKENIMETLEKRYKISPSTATMFVSELPSNMATPSGTGSQTPTGSFTGQLPTSSSVNPLLQAATTASLGVPGHAQAPGSQAGGSSHHHHGQTPMHIKPVTWPTYLAEWTKSGFEEAMFLGCCIAGRLVYVIHQSDPRLAEDYRMSQFSRVDYNELGPRGIHHQSMLAGGT

SEQ ID NO: 9131 - DNA, 2798 bp, Muscodor strobelii
  misc_feature: SGI EST ID NO. CUFF.21739.1
  misc_feature: Variant of the nucleotide sequence at SEQ ID NO 9129
aggaactacccaggaagaagactgggagctgggagcttgaggcaagagctctaggatcgcgactaacaacaattctagcagtgcgcagttgcaaggtggacgcgcctcgaccagttctctgagctctctttccgtctcgccaaccccaccacctggtttcgtcccccgcgcgtcgtacttcaacggtctccaactcgctgaggatcaccgagtcaacaacagccgcaacgattcctaccttgcggacgacctcaccccacgcggcaagcgtgcgttcaaacgagacttcgtgcgcgagcaggaggaacgagagcgccaggaggcacgagaccgcgaagaccccaacatgtcgggcaacacgggcaagtggcgcgaggagcaggtgctcatcatctgccccggcagccacaccaccatggcccagctcggcgtcggcgagctgaccctgcccacccatcgcattcccacccgaatgttcaaggatcccgacagcaacgacttcgtcccctaccgcacctacaagcgcaagaagagcgctactactactaccaccccggctaccgcccagacggctgcctctgccaatgacgctgctactgctactgctactactaccaaggatagtgctgtcggcggcgacgacgacgagtgggagtatgtcgaggaccgcgacagtgtcgagggcgccatcttgcccatgatcagtggcagtatcgtcaacatgcgcgctttcctcgccttcctcgagcacgtccacagcctgctcaccaccacctaccacaacacccccatcgtcctcatggcctcccctatctggtcccgaggccagatcgagatcatcacccgctacatcttcgagaagactaagactccctccttgtgtctcatgaacagcgccgccgccacccagtacggtgccaagcatccccacatgactgtcgtcgacattggcttcgagaaggttgacgtcacctgtctgcacgagtactacatcgtaaaccacaactccatcggatgcaacccctccctctgcgagatctcgggcggcgaagtcttcacccagaagctgcactctctgctcaaggacaagggcttcacctacgacatggccgagcagctcaagaaaagccccatctgcgaggtcctccccttcgtgccctcgaaggagcacggcatggacctccctaccgaggatcctgcccacagccacggtgccgaagccaccagtacctccgagccggccaagcctgccttcgccgctgacgccgacatgtccaatggcgatggtaaggataccgacgagggcgttctcgacgtggccaatatcgttactagcggtaatacgcgtgagttcctcgccaagcgcgaaaaggagaaggaagcgaaagcgaaggccaaggctaagggcaagggccaggatgccgaaggcgctgctaaggctcaacgcgttcccaattcccagcgcaagaccaatactttccactacgaagacctggagcacgaggacgtcgaagttcctgtctccaacggccatactggagctactgcttcggccaacggcgagacgcaagctgcggcaggtggcgcggctaaagcaggagaaaaaccagaggctgagcctactgcaaccgacggcacggctggcgcttcttcagattcgggcccaaccgcaacggagcgtcgaaccaagcgtgtacgcaaggacgtcgaggtcggcctagagcgattcctctttgccgaacgtctccagatcgaccgcatcgtcgactgcatctaccgaactgtacaacagatccccgagatgggcatgcgcccgcattgttgggaatgcattgccatcgtcggcaatggtagccgcatcaaaggcttgaaggagaacattatggagaccttggagaaacgctacaaaatctcccccagcaccgccactatgttcgtgtctgaactcccctctaacatggctacgcccagtggaaccggctcccagaccccgactggctcgttcacaggccaactgcccacatcaagctctgtcaacccgctgctgcaggctgcgactacagcctcacttggtgttcctggtcatgcacaggcacctggctctcaggctggcggaagcagccatcaccaccacggtcagacgccaatgcacattaaaccagtcacttggcctacttatctcgcagagtggactaagagtggctttgaggaggccatgtttctcggctgttgcatcgctggccgcttagtctatgtcatccatcagtcggaccctagattggccgaagattaccgcatgagtcaattcagtcgcgtcgactacaacgagcttggtccccggggaatccatcatcagagtatgcttgccggaggcacctgaacgatactcttttctgttagattcggtaatttggagtttgaggagtcaagacacaaaaatctcgaggaatgagaatttcgacacggcagctgtttggaacagcatgaagatttctggtagcgtatgcatcgggcttttgatgatacgccatgataccttgtatgagttgtactaacacaagaactggatgatgatacgggtttgtgcaatgattctgatgtcagagaatcttgagcaaaaatggcgacacagtttgcgtaaatgatctcgatgttagggatttgtgaggcgcgcaccaaaacgaatgacggcaggattcgccaccattgatctgagagaaccagcacgggctttggcacgttaagagatgctagattaatccctagtctatagatagtggataattgagtgcataaac

SEQ ID NO: 9132 - DNA, 2106 bp, Muscodor strobelii
  misc_feature: SGI cDNA ID NO. 562841
  misc_feature: Reduced expression when VOC is produced
  misc_feature: Encodes the peptide sequence at SEQ ID NO 9133
atgcagcgtgtctcgtctttgctccctagctgggaccgcaaccgctccagcgccagcagcttcggcagcaaccacacacgcaagcacagcatcgacaaggtgcgcggctgggccgacaagatccctaacagccgtctcagcacctcgtcgcgcctcggcaaggaggcattctggccggccactctcgacaaagagtgcgaaaaggccgctcgcatcatcaagtcattctgcagcgatggcttcacgcttcccgacgaccggcctgggagcccgatgacccattccagcacgcactcatccaacagaatactcaagaagatacctccgaggataatacagaatgctgtaggcctagcaatcttcacatcgatgcgatcgggactatggacttccggatctggaggcagtggtattctcctcgcgcgcaagacagatggcacgtggtcgccgccctcggggttggtgttgcagacaccaagtctaggattcatcattggtgttgatatctacgattgtatccttgtcatcaacaacttcaccgtcctcgaagctttcgctcggcccaaactcatgctcggcaccgatgttgttctatctaaaggtccccttgtatcactcggtcttctcgagaacgatgtcagctgggcggatcttagcgacagtgccattacctacatcaaggccaagggccagttctcggatgccaagttggaaggcaccatcattcaggagcgaggtgacgaaaatgagagattctacgggatgaagctcaacgtggccaagatcatggctggcgatatcaaccaaagcctaccccagttgaggcccttgacagaagtattgaaggccgcagagggcagagtagactacgacatggctctggtcgaagcactgtcgtcacaacctgcacccggggatatgctaatagaaccgtctcagaccccactgctgtcacctgccttcggtatgcccaacattagtgacccagacccatttggagtgttggcacttgagatggctggcatgtccattcgggaagctggtagtcacttacggccagatagcagccagtttgaataccatcccagtccgaccagcccagtctttcctaggacagcgcgtggaagtgttgacacggggatttcgcgaagcaacaggggcagctacatgtccacaaaaacagtcgctactgaaaagagtcatatgacagatgctcagacccagacttttcccgcaacgcccgagacaactcccagtcatagccagagtcaaagtgaagatggcaaccaggcgcacgcttccgacgatgctccgcaatcacgagagccagttgaggttgactacacgaagattgatatcagttcgttacgtatgctctcgaatttcccagatctagaggatccattgccagagacccattccaagccaagcgatgtagccgagactgggaccagcgcacaaaaagatattgcagatgatacggagagttcccacacaccgagcatttctatcagctacgacaacgaggatgaagcagatcatgaggatcataaggaccattctgtttccagtttagatgatgaggatatagatgacgacgaggaatatgatttcgatgatgacgacgaactcgacggtgatgacgaagctgttgtttacgaggtcgccaccgcccaggcacccccaaggatggcaatggctggctcgcaggttgtacagatcaagggagcagtcgtcaacatcccgaagagagtccccccaccactcccggtgcggaatgctgcacgtacctcacgcagaagaagccagatgcccgatgttagtaagctagtgagcagtcctcttcggcaagagttcgaaccttcggagaaatctggagatgttgccactcctagaacatctcaagttctagagtctacaagcgaagccaccgaaggagagcctccagttagtccgattgtagcatcgcaagatgtcgacaccccgattgtcaagcatgactcaatgttatctgagaaacaaacaccaactgagcaggcttcacatattccaaagccacagctcgacattgcaaccggtaatgaggtacctgttcttgttgcatga

SEQ ID NO: 9133 - protein, 701 aa, Muscodor strobelii
  misc_feature: SGI Peptide ID NO. 562841
  misc_feature (1)..(619): NCBI GI: 171683565 Blast Desc: protein product [Podospora anserina] gi|170941742|emb|CAP67396.1| protein product [Podospora anserina]
  misc_feature (1)..(653): NCBI GI: 256727449 Blast Desc: NECHADRAFT_66301 [Nectria haematococca mpVI 77-13-4]
  misc_feature (1)..(618): NCBI GI: 46123587 Blast Desc: FG06171.1 [Gibberella zeae PH-1]
  misc_feature (1)..(428): NCBI GI: 261355837 Blast Desc: LAS seventeen-binding protein [Verticillium albo-atrum VaMs.102]
  misc_feature (1)..(460): NCBI GI: 145603290 Blast Desc: MGG_06145 [Magnaporthe grisea 70-15] gi|145011552|gb|EDJ96208.1| MGG_06145 [Magnaporthe grisea 70-15]
  misc_feature (1)..(598): NCBI GI: 85105864 Blast Desc: NCU08844 [Neurospora crassa OR74A] gi|28923648|gb|EAA32819.1| conserved [Neurospora crassa OR74A]
  misc_feature (1)..(459): NCBI GI: 116194470 Blast Desc: CHGG_03833 [Chaetomium globosum CBS 148.51] gi|88179746|gb|EAQ87214.1| CHGG_03833 [Chaetomium globosum CBS 148.51]
  misc_feature (1)..(461): NCBI GI: 154313579 Blast Desc: BC1G_05639 [Botryotinia fuckeliana B05.10] gi|150849221|gb|EDN24414.1| BC1G_05639 [Botryotinia fuckeliana B05.10]
  misc_feature (1)..(448): NCBI GI: 256728407 Blast Desc: NECHADRAFT_102170 [Nectria haematococca mpVI 77-13-4]
  misc_feature (1)..(411): NCBI GI: 46115442 Blast Desc: FG03563.1 [Gibberella zeae PH-1]
  misc_feature: Useful for introducing or modulating the production of volatile compounds
MQRVSSLLPSWDRNRSSASSFGSNHTRKHSIDKVRGWADKIPNSRLSTSSRLGKEAFWPATLDKECEKAARIIKSFCSDGFTLPDDRPGSPMTHSSTHSSNRILKKIPPRIIQNAVGLAIFTSMRSGLWTSGSGGSGILLARKTDGTWSPPSGLVLQTPSLGFIIGVDIYDCILVINNFTVLEAFARPKLMLGTDVVLSKGPLVSLGLLENDVSWADLSDSAITYIKAKGQFSDAKLEGTIIQERGDENERFYGMKLNVAKIMAGDINQSLPQLRPLTEVLKAAEGRVDYDMALVEALSSQPAPGDMLIEPSQTPLLSPAFGMPNISDPDPFGVLALEMAGMSIREAGSHLRPDSSQFEYHPSPTSPVFPRTARGSVDTGISRSNRGSYMSTKTVATEKSHMTDAQTQTFPATPETTPSHSQSQSEDGNQAHASDDAPQSREPVEVDYTKIDISSLRMLSNFPDLEDPLPETHSKPSDVAETGTSAQKDIADDTESSHTPSISISYDNEDEADHEDHKDHSVSSLDDEDIDDDEEYDFDDDDELDGDDEAVVYEVATAQAPPRMAMAGSQVVQIKGAVVNIPKRVPPPLPVRNAARTSRRRSQMPDVSKLVSSPLRQEFEPSEKSGDVATPRTSQVLESTSEATEGEPPVSPIVASQDVDTPIVKHDSMLSEKQTPTEQASHIPKPQLDIATGNEVPVLVA

SEQ ID NO: 9134 - DNA, 3174 bp, Muscodor strobelii
  misc_feature: SGI EST ID NO. CUFF.21718.0
  misc_feature: Variant of the nucleotide sequence at SEQ ID NO 9132
cctgaaccttgaaccaaccccgaaccccaaaaacgtcactaccgccgaacagaaaaccgcctgcctcacttcctgccgtttatccttacccatctcatacctgctgccgaccgtcccctctcacgtcaggtggtcatacattcatacatcacacgattgattttctctatactctctatactctctacacctgtaattcagaggttcatgtcacgatattcttcaccttctccatccctcaattgcttgttgccgtgcctgccgtcatccgtactttctgccccggcttctctcgacgcactctaaccaagagcattgcagaaccccggccaacttaaattccgtccggtgatcgtgctagcctcgaaccaacaattagctaacaaatactcgtcgataccagccttctggaattgtcccgccttgagaccatcctcttctccggtcgccccctgggagcgacgatctcgcgttttgcttgcacctgtgccggcgcactggcgtgacagccatgcagcgtgtctcgtctttgctccctagctgggaccgcaaccgctccagcgccagcagcttcggcagcaaccacacacgcaagcacagcatcgacaaggtgcgcggctgggccgacaagatccctaacagccgtctcagcacctcgtcgcgcctcggcaaggaggcattctggccggccactctcgacaaagagtgcgaaaaggccgctcgcatcatcaagtcattctgcagcgatggcttcacgcttcccgacgaccggcctgggagcccgatgacccattccagcacgcactcatccaacagaatactcaagaagatacctccgaggataatacagaatgctgtaggcctagcaatcttcacatcgatgcgatcgggactatggacttccggatctggaggcagtggtattctcctcgcgcgcaagacagatggcacgtggtcgccgccctcggggttggtgttgcagacaccaagtctaggattcatcattggtgttgatatctacgattgtatccttgtcatcaacaacttcaccgtcctcgaagctttcgctcggcccaaactcatgctcggcaccgatgttgttctatctaaaggtccccttgtatcactcggtcttctcgagaacgatgtcagctgggcggatcttagcgacagtgccattacctacatcaaggccaagggccagttctcggatgccaagttggaaggcaccatcattcaggagcgaggtgacgaaaatgagagattctacgggatgaagctcaacgtggccaagatcatggctggcgatatcaaccaaagcctaccccagttgaggcccttgacagaagtattgaaggccgcagagggcagagtagactacgacatggctctggtcgaagcactgtcgtcacaacctgcacccggggatatgctaatagaaccgtctcagaccccactgctgtcacctgccttcggtatgcccaacattagtgacccagacccatttggagtgttggcacttgagatggctggcatgtccattcgggaagctggtagtcacttacggccagatagcagccagtttgaataccatcccagtccgaccagcccagtctttcctaggacagcgcgtggaagtgttgacacggggatttcgcgaagcaacaggggcagctacatgtccacaaaaacagtcgctactgaaaagagtcatatgacagatgctcagacccagacttttcccgcaacgcccgagacaactcccagtcatagccagagtcaaagtgaagatggcaaccaggcgcacgcttccgacgatgctccgcaatcacgagagccagttgaggttgactacacgaagattgatatcagttcgttacgtatgctctcgaatttcccagatctagaggatccattgccagagacccattccaagccaagcgatgtagccgagactgggaccagcgcacaaaaagatattgcagatgatacggagagttcccacacaccgagcatttctatcagctacgacaacgaggatgaagcagatcatgaggatcataaggaccattctgtttccagtttagatgatgaggatatagatgacgacgaggaatatgatttcgatgatgacgacgaactcgacggtgatgacgaagctgttgtttacgaggtcgccaccgcccaggcacccccaaggatggcaatggctggctcgcaggttgtacagatcaagggagcagtcgtcaacatcccgaagagagtccccccaccactcccggtgcggaatgctgcacgtacctcacgcagaagaagccagatgcccgatgttagtaagctagtgagcagtcctcttcggcaagagttcgaaccttcggagaaatctggagatgttgccactcctagaacatctcaagttctagagtctacaagcgaagccaccgaaggagagcctccagttagtccgattgtagcatcgcaagatgtcgacaccccgattgtcaagcatgactcaatgttatctgagaaacaaacaccaactgagcaggcttcacatattccaaagccacagctcgacattgcaaccggtaatgaggtacctgttcttgttgcatgaaccaccactgacgctatcacctatcactcccgagacgatttaatcacgacacaaggatcaattttctttcagacttaattatcatttggcggcgaagcatggagcgagtgacattttacggattacggacaatggaaaagactatcattcatgaatttgcatgcagcccaggatcgatgtacgataaatgagggccacagacgtcatgttcagggcctggttactgggatcgtgatttttaccagaggtgttcatgagcggggcggaagcaaggctgcatgggcaaaaatacccgattcatgagtttgaatcgctgtacatataaaagctaatctcgagagaaacaccaaagagcagtgttctacgcacgcacttgacaaatcaactattggtagcccggaactgaccctcatgaagcactgttgttgatgttgctcactgtcatattgtatgagtggtgtgtaaatgtggtgaagggatataagaagggaatagagtaggtatggatctgtgataaacccgatgtctcaagcttctttacgttacaaggagtgtca

SEQ ID NO: 9135 - DNA, 1188 bp, Muscodor strobelii
  misc_feature: SGI cDNA ID NO. 562842
  misc_feature: Reduced expression when VOC is produced
  misc_feature: Encodes the peptide sequence at SEQ ID NO 9136
atgctaatagaaccgtctcagaccccactgctgtcacctgccttcggtatgcccaacattagtgacccagacccatttggagtgttggcacttgagatggctggcatgtccattcgggaagctggtagtcacttacggccagatagcagccagtttgaataccatcccagtccgaccagcccagtctttcctaggacagcgcgtggaagtgttgacacggggatttcgcgaagcaacaggggcagctacatgtccacaaaaacagtcgctactgaaaagagtcatatgacagatgctcagacccagacttttcccgcaacgcccgagacaactcccagtcatagccagagtcaaagtgaagatggcaaccaggcgcacgcttccgacgatgctccgcaatcacgagagccagttgaggttgactacacgaagattgatatcagttcgttacgtatgctctcgaatttcccagatctagaggatccattgccagagacccattccaagccaagcgatgtagccgagactgggaccagcgcacaaaaagatattgcagatgatacggagagttcccacacaccgagcatttctatcagctacgacaacgaggatgaagcagatcatgaggatcataaggaccattctgtttccagtttagatgatgaggatatagatgacgacgaggaatatgatttcgatgatgacgacgaactcgacggtgatgacgaagctgttgtttacgaggtcgccaccgcccaggcacccccaaggatggcaatggctggctcgcaggttgtacagatcaagggagcagtcgtcaacatcccgaagagagtccccccaccactcccggtgcggaatgctgcacgtacctcacgcagaagaagccagatgcccgatgttagtaagctagtgagcagtcctcttcggcaagagttcgaaccttcggagaaatctggagatgttgccactcctagaacatctcaagttctagagtctacaagcgaagccaccgaaggagagcctccagttagtccgattgtagcatcgcaagatgtcgacaccccgattgtcaagcatgactcaatgttatctgagaaacaaacaccaactgagcaggcttcacatattccaaagccacagctcgacattgcaaccggtaatgaggtacctgttcttgttgcatga

SEQ ID NO: 9136 - protein, 395 aa, Muscodor strobelii
  misc_feature: SGI Peptide ID NO. 562842
  misc_feature (1)..(312): NCBI GI: 46123587 Blast Desc: FG06171.1 [Gibberella zeae PH-1]
  misc_feature (15)..(329): NCBI GI: 256727449 Blast Desc: NECHADRAFT_66301 [Nectria haematococca mpVI 77-13-4]
  misc_feature (14)..(313): NCBI GI: 171683565 Blast Desc: protein product [Podospora anserina] gi|170941742|emb|CAP67396.1| protein product [Podospora anserina]
  misc_feature (15)..(310): NCBI GI: 85105864 Blast Desc: NCU08844 [Neurospora crassa OR74A] gi|28923648|gb|EAA32819.1| conserved [Neurospora crassa OR74A]
  misc_feature (1)..(123): NCBI GI: 261355837 Blast Desc: LAS seventeen-binding protein [Verticillium albo-atrum VaMs.102]
  misc_feature (14)..(153): NCBI GI: 116194470 Blast Desc: CHGG_03833 [Chaetomium globosum CBS 148.51] gi|88179746|gb|EAQ87214.1| CHGG_03833 [Chaetomium globosum CBS 148.51]
  misc_feature (5)..(154): NCBI GI: 145603290 Blast Desc: MGG_06145 [Magnaporthe grisea 70-15] gi|145011552|gb|EDJ96208.1| MGG_06145 [Magnaporthe grisea 70-15]
  misc_feature (11)..(314): NCBI GI: 154313579 Blast Desc: BC1G_05639 [Botryotinia fuckeliana B05.10] gi|150849221|gb|EDN24414.1| BC1G_05639 [Botryotinia fuckeliana B05.10]
  misc_feature (15)..(105): NCBI GI: 256728407 Blast Desc: NECHADRAFT_102170 [Nectria haematococca mpVI 77-13-4]
  misc_feature (15)..(105): NCBI GI: 46115442 Blast Desc: FG03563.1 [Gibberella zeae PH-1]
  misc_feature: Useful for introducing or modulating the production of volatile compounds
MLIEPSQTPLLSPAFGMPNISDPDPFGVLALEMAGMSIREAGSHLRPDSSQFEYHPSPTSPVFPRTARGSVDTGISRSNRGSYMSTKTVATEKSHMTDAQTQTFPATPETTPSHSQSQSEDGNQAHASDDAPQSREPVEVDYTKIDISSLRMLSNFPDLEDPLPETHSKPSDVAETGTSAQKDIADDTESSHTPSISISYDNEDEADHEDHKDHSVSSLDDEDIDDDEEYDFDDDDELDGDDEAVVYEVATAQAPPRMAMAGSQVVQIKGAVVNIPKRVPPPLPVRNAARTSRRRSQMPDVSKLVSSPLRQEFEPSEKSGDVATPRTSQVLESTSEATEGEPPVSPIVASQDVDTPIVKHDSMLSEKQTPTEQASHIPKPQLDIATGNEVPVLVA

SEQ ID NO: 9137 - DNA, 3174 bp, Muscodor strobelii; identical to SEQ ID NO: 9134
  misc_feature: SGI EST ID NO. CUFF.21718.0
  misc_feature: Variant of the nucleotide sequence at SEQ ID NO 9135

SEQ ID NO: 9138 - DNA, 1308 bp, Muscodor strobelii
  misc_feature: SGI cDNA ID NO. 562843
  misc_feature: Encodes the peptide sequence at SEQ ID NO 9139
atggacactctacccgttgaactcctcaggctgatctacactcattgtgatcccgagtccgtcagaactctccgagcagttaccccaacgctagcagatgttggctatgaatacctgttgtcgccacacttcactgcggtcaactggcggaacgacatcgatcggctgcactgcatcgccctacacgaccggctgagaggcagcgtcaagtcaatcaatctttttcttggagagctttcattttatgatgcatggagcacatcatgggcgcagcactttgtggcaccgcctgaagaacgtgcagagttgatgggaaatgctcgagaagagttcgacagaatagcacagggtcgtaagaaggttggacccctgcacttgagggctgacgatcttcgcgaggcatgctcggccctacccaatttgcaggagcttgaggtgtctttcgcgcaatgtccctctacgcttgataacatgttcctacgggaagtgttcgactggcccaattgcagaaaattggaccgccaagaaacctacagtaacctcgatgctatcattttcgcgttgcacggtattaagctccgttcgttcaaagtcgatcgactaccactagaactttttcgcatgagcaatcatcgatcccactggttcactcatgctcaatcgtttaattccctgaccaacctggacttaacacttgatccatccggactgcaggggccatcgtcggcattcagggctgtgaacggattaggcaggatacttcacctcgcatcgaacctcaagcgcttgagacttgcctttcacccttatacgagcgagcactcgaagttcgcattgtcgtttcgagagcttctcttcaacttcacgtacacgcaactcacagatctagttttagaaggagtctcgtgcgatgaggaagatatcaaagactttttagctcgtcacggggctactttggagcgactgagactcggcggccgtggactggcgaaaccgttcgaaccgtcgcatggaggaattcatctttacgaaggcacgtttaggtctttgtttaccggccttaaggggaaactgccgagactagctcgtctgagcctcgagggtcttttcgagtgcgaacaccgcgatctaccatcccacgagacctataactttttccccctcacagacgaaaattggcaggagattcctaagcctcgatgggctcgattgtcgacccaaacgattagctgcctgcctttcgaacaatacgtcctccatggtggcgcctatccgagcggaaacgcattaacgcaacacaatcagtga

SEQ ID NO: 9139 - protein, 435 aa, Muscodor strobelii
  misc_feature: SGI Peptide ID NO. 562843
  misc_feature (1)..(425): NCBI GI: 85105856 Blast Desc: NCU08842 [Neurospora crassa OR74A] gi|28923646|gb|EAA32817.1| [Neurospora crassa OR74A]
  misc_feature (1)..(396): NCBI GI: 116194474 Blast Desc: CHGG_03835 [Chaetomium globosum CBS 148.51] gi|88179748|gb|EAQ87216.1| CHGG_03835 [Chaetomium globosum CBS 148.51]
  misc_feature (1)..(435): NCBI GI: 145603284 Blast Desc: MGG_06146 [Magnaporthe grisea 70-15] gi|145011549|gb|EDJ96205.1| MGG_06146 [Magnaporthe grisea 70-15]
  misc_feature (1)..(425): NCBI GI: 171683567 Blast Desc: protein product [Podospora anserina] gi|170941743|emb|CAP67397.1| protein product [Podospora anserina]
  misc_feature (3)..(355): NCBI GI: 156045171 Blast Desc: SS1G_09774 [Sclerotinia sclerotiorum 1980] gi|154694169|gb|EDN93907.1| SS1G_09774 [Sclerotinia sclerotiorum 1980]
  misc_feature (1)..(425): NCBI GI: 46123585 Blast Desc: FG06170.1 [Gibberella zeae PH-1]
MDTLPVELLRLIYTHCDPESVRTLRAVTPTLADVGYEYLLSPHFTAVNWRNDIDRLHCIALHDRLRGSVKSINLFLGELSFYDAWSTSWAQHFVAPPEERAELMGNAREEFDRIAQGRKKVGPLHLRADDLREACSALPNLQELEVSFAQCPSTLDNMFLREVFDWPNCRKLDRQETYSNLDAIIFALHGIKLRSFKVDRLPLELFRMSNHRSHWFTHAQSFNSLTNLDLTLDPSGLQGPSSAFRAVNGLGRILHLASNLKRLRLAFHPYTSEHSKFALSFRELLFNFTYTQLTDLVLEGVSCDEEDIKDFLARHGATLERLRLGGRGLAKPFEPSHGGIHLYEGTFRSLFTGLKGKLPRLARLSLEGLFECEHRDLPSHETYNFFPLTDENWQEIPKPRWARLSTQTISCLPFEQYVLHGGAYPSGNALTQHNQ

SEQ ID NO: 9140 - DNA, 2460 bp, Muscodor strobelii
  misc_feature: SGI EST ID NO. CUFF.21736.0
  misc_feature: Variant of the nucleotide sequence at SEQ ID NO 9138
attcgtctctcgtcttcgtccgccgcggtgttgttgggcaagatgatcaaatccatccgacaagacccgttcttgccgttttgctagtcattccagagaaaaaaactctttgacgccgctgcccgtcagatagaagtccgtgtctacgtgtgtctcactctcaccgatctttctggtcgctggcccgttcatcctaaatcggagaggcttgctgcagaattcaaaaaatgcgccagttgaacgcctctccgcctcgccattaagtacgctgcacaaccccttttgcccgttctcttgggtcttatacaaatttccaatcttagaaattgattgtagcgaggatcggaaacgttttttcttctttcttttcctatatcatcgctccaccatcgatctctggcgtttcgtgcttctttcgtgtcatcttactcatctggcggagttttggcgggctgcagcaattctcttccgtcttatgaaaaccagacatcccgccctttcgtgtggacattcaacccggccttcatcttcatcttagcctcccccaatggacactctacccgttgaactcctcaggctgatctacactcattgtgatcccgagtccgtcagaactctccgagcagttaccccaacgctagcagatgttggctatgaatacctgttgtcgccacacttcactgcggtcaactggcggaacgacatcgatcggctgcactgcatcgccctacacgaccggctgagaggcagcgtcaagtcaatcaatctttttcttggagagctttcattttatgatgcatggagcacatcatgggcgcagcactttgtggcaccgcctgaagaacgtgcagagttgatgggaaatgctcgagaagagttcgacagaatagcacagggtcgtaagaaggttggacccctgcacttgagggctgacgatcttcgcgaggcatgctcggccctacccaatttgcaggagcttgaggtgtctttcgcgcaatgtccctctacgcttgataacatgttcctacgggaagtgttcgactggcccaattgcagaaaattggaccgccaagaaacctacagtaacctcgatgctatcattttcgcgttgcacggtattaagctccgttcgttcaaagtcgatcgactaccactagaactttttcgcatgagcaatcatcgatcccactggttcactcatgctcaatcgtttaattccctgaccaacctggacttaacacttgatccatccggactgcaggggccatcgtcggcattcagggctgtgaacggattaggcaggatacttcacctcgcatcgaacctcaagcgcttgagacttgcctttcacccttatacgagcgagcactcgaagttcgcattgtcgtttcgagagcttctcttcaacttcacgtacacgcaactcacagatctagttttagaaggagtctcgtgcgatgaggaagatatcaaagactttttagctcgtcacggggctactttggagcgactgagactcggcggccgtggactggcgaaaccgttcgaaccgtcgcatggaggaattcatctttacgaaggcacgtttaggtctttgtttaccggccttaaggggaaactgccgagactagctcgtctgagcctcgagggtcttttcgagtgcgaacaccgcgatctaccatcccacgagacctataactttttccccctcacagacgaaaattggcaggagattcctaagcctcgatgggctcgattgtcgacccaaacgattagctgcctgcctttcgaacaatacgtcctccatggtggcgcctatccgagcggaaacgcattaacgcaacacaatcagtgattgctctttcgacctttggaccatttttttggccgttcttttttgggtcagccgcattgttgtcatacggagatgttttcaatcattctcgacttgcgctgcgaggatatcctacgatttctgttattgctgcagcaaccttctacattactgggacggaatccttgaacaaccggcattgatgaccttttctacgaaactaaaagcaacttttcttgctgaacgacgatgatgtcccacatctttcgtgtccggagcgccacgagatatacaatatgagtaacggccgcatgcatcatattttggattttatagacgcgactccctcaggggaatctttgctttgggacatgctttggggtatgggcgtctaagaaaatagcacagaatgtccatgtttttacttctattcatcctcatgactatagtaacgattgtacctggaatcttctgcctacatgtagtttgggcatgttattggacggacatgaagattgaagatatccgatgttatcatctagattgttttagagttttctacgggcgtttaggtattcgcgtactccggtacagaaatgaagaccgtgtttctacgttaaagctta

SEQ ID NO: 9141 - DNA, 2514 bp, Muscodor strobelii
  misc_feature: SGI cDNA ID NO. 562844
  misc_feature: Elevated expression when VOC is produced
  misc_feature: Encodes the peptide sequence at SEQ ID NO 9142
atggctggtacagcttcaagcaaccctccaggaccagggggattcacgactccagcgcggcctcgcccaacgacggacgagagtatccagacacagttgaaatcttccgtcgcagatagctcccggcatcctcaggccactgctttgatcgatgtcatggaggaaaagggaaatttccgagagtgggagcgtatcaagagcagggaaggcccactggaattgttggatcttcccgttgatgtgttgaggctcatagtagcagagttagccatatcgaatgacttgatcgcgctggctttaactaattctgcactttacgagctcaccatgccccggttgtatgctcggttcgatatagtgtggccagatgcatcgactgtgtctaaccaaccaaacacaggcgttgacgccctctcatacggtctggcgactatgtgtttcccaagcagattcgcggagaaggcaacgatgtcgcgcagacaacacggcgccaacaccccatccctttaccgactcaagcgaaacttggcgcagcacattcggaagttcgctatgggtgatggtccttccgagtggatcgacgaatacatagtcgacaaagaaatgggtaagatgctgggcacgctggtagccatcgcaatcgagaagatgccaaatttggagatcttcaaatgggatatgccaacaggtgtctcgtcagatactttcacagcgcttgcttcgttgcagaatgaggatggccgttctcagctggaaacgttatggatccggtggcatgacaactcccagtctgctcgcaatccttcgtctcgagccttagccgacggaaacgctccaacaaatcctgtgtttccaccacagcttcctgccgtgtccgttttccctagtgcgacaatggatggctctctgaatcagcacaccaaattcaccgctgttggcaaatatctaccctcccatcaacagaagccaccgccggaaccaatcacttacgccgcgtgccgtgttgaatacccaactttcagcattgtgtcccctctaaggagtttgaccgtactaaatatcgacgaactcttctacctagatgagatggctattctgattgagagatctgctacccgcctgcaagagctccgcattggaatgtccaaaagggcgtcaccgttagaaaagtttcaagcttgggatggcccgaatctgcaacaggttgatcacgaagcacggtggcccggtgaatgtcgcatccctgatacgaggctaggaggagtgctgggcgttctggtgggccgaatttacgacattcgcaaaacaccttctctcaaagttaccgagaaagcagattcacaaggcaccacatctggtgataacagacaaccacctatttctggctcgactgcccaagagaatgacaaaaacgtgccgggtaggaagcgtctggagggcaaacttaggcttcgaacattagcactcgaaagagtagccttatcgattcacgtctgcacgaaggccattgattggtcatgcctgacgaagttgacgattctgaattgccctaactacgaggctctgtggaaggctcttaagcggcagttcaaacccacaatcacaccaggctcgtctcagagcacacctcaatatcacctgtcgttaaagtatattcatgcagatagagcctgtccgtcccttatcaacttcattaaagagacactagcccccaattcgcttgaagttttctttttacaggacggaccacgtacggcacagcctctggtcacagcagaacagattttcaaaaatatcgttaaacagcacagagacagtctatgtaaactactcatcgacagctctaggtcagcgaacgcgccattccttaagagatcaagtcggggaagacactgggctataagagatgaatttctctccttcatcatgaaaggtagagttccgaacctgagagagctgggtatggtaatctacatgaatgactggcacaaatttcttcagcatctacctcagatgcaggaattgcggacgctatatattccgcacatggcattgaaacagcaggacaaaccaaaagtagaggatgcatcagaattcgccctccaaattattgacgccatcagcctgaggagagaaattccacttgctcgtctaggtctcggtcctaattgttacgacatctgggaagagacaagtgatggtgcggccaacacttcacacattcccgaagatgatcatggaactgctacttctggcgatgaggatgatatgactagcagtagtgagattggcaatgataccgaagacgatgatgacgatgacgatggaggagttgctttccccattgatatccaggaagagcaagcggaggatattcctgatgatgtcgagtctgagcctgattcgttccaggaatccgaaacgaatcagcccctaccacagatacagcttcaccaaacggaatggaatgatgaaaaggtggagttgttccatgcacggcatggaaagctctga

SEQ ID NO: 9142 - protein, 837 aa, Muscodor strobelii
  misc_feature: SGI Peptide ID NO. 562844
  misc_feature (49)..(729): NCBI GI: 171684877 Blast Desc: protein product [Podospora anserina] gi|170942399|emb|CAP68051.1| protein product [Podospora anserina]
  misc_feature (71)..(837): NCBI GI: 145243934 Blast Desc: An11g04880 [Aspergillus niger] gi|134079164|emb|CAK40692.1| protein product [Aspergillus niger]
  misc_feature (5)..(837): NCBI GI: 67523299 Blast Desc: AN2106.2 [Aspergillus nidulans FGSC A4] gi|40745782|gb|EAA64938.1| AN2106.2 [Aspergillus nidulans FGSC A4] gi|259487478|tpe|CBF86189.1| TPA: conserved [Aspergillus FGSC
  misc_feature (85)..(837): NCBI GI: 255948436 Blast Desc: Pc22g09760 [Penicillium chrysogenum Wisconsin 54-1255] gi|211592002|emb|CAP98264.1| Pc22g09760 [Penicillium chrysogenum Wisconsin 54-1255]
  misc_feature (83)..(837): NCBI GI: 121710140 Blast Desc: F-box domain protein [Aspergillus clavatus NRRL 1] gi|119400836|gb|EAW11260.1| F-box domain protein [Aspergillus clavatus NRRL 1]
  misc_feature (83)..(729): NCBI GI: 212528974 Blast Desc: PMAA_029470 [Penicillium marneffei ATCC 18224] gi|210074042|gb|EEA28129.1| PMAA_029470 [Penicillium marneffei ATCC 18224]
  misc_feature (45)..(437): NCBI GI: 39945514 Blast Desc: MGG_04739 [Magnaporthe grisea 70-15] gi|145021375|gb|EDK05504.1| MGG_04739 [Magnaporthe grisea 70-15]
  misc_feature (81)..(729): NCBI GI: 242764893 Blast Desc: conserved [Talaromyces stipitatus ATCC 10500] gi|218724059|gb|EED23476.1| conserved [Talaromyces stipitatus ATCC 10500]
  misc_feature (56)..(471): NCBI GI: 156036010 Blast Desc: SS1G_12691 [Sclerotinia sclerotiorum 1980] gi|154698099|gb|EDN97837.1| SS1G_12691 [Sclerotinia sclerotiorum 1980]
  misc_feature (56)..(386): NCBI GI: 261355923 Blast Desc: F-box domain-containing protein [Verticillium albo-atrum VaMs.102]
  misc_feature: Useful for introducing or modulating the production of volatile compounds
MAGTASSNPPGPGGFTTPARPRPTTDESIQTQLKSSVADSSRHPQATALIDVMEEKGNFREWERIKSREGPLELLDLPVDVLRLIVAELAISNDLIALALTNSALYELTMPRLYARFDIVWPDASTVSNQPNTGVDALSYGLATMCFPSRFAEKATMSRRQHGANTPSLYRLKRNLAQHIRKFAMGDGPSEWIDEYIVDKEMGKMLGTLVAIAIEKMPNLEIFKWDMPTGVSSDTFTALASLQNEDGRSQLETLWIRWHDNSQSARNPSSRALADGNAPTNPVFPPQLPAVSVFPSATMDGSLNQHTKFTAVGKYLPSHQQKPPPEPITYAACRVEYPTFSIVSPLRSLTVLNIDELFYLDEMAILIERSATRLQELRIGMSKRASPLEKFQAWDGPNLQQVDHEARWPGECRIPDTRLGGVLGVLVGRIYDIRKTPSLKVTEKADSQGTTSGDNRQPPISGSTAQENDKNVPGRKRLEGKLRLRTLALERVALSIHVCTKAIDWSCLTKLTILNCPNYEALWKALKRQFKPTITPGSSQSTPQYHLSLKYIHADRACPSLINFIKETLAPNSLEVFFLQDGPRTAQPLVTAEQIFKNIVKQHRDSLCKLLIDSSRSANAPFLKRSSRGRHWAIRDEFLSFIMKGRVPNLRELGMVIYMNDWHKFLQHLPQMQELRTLYIPHMALKQQDKPKVEDASEFALQIIDAISLRREIPLARLGLGPNCYDIWEETSDGAANTSHIPEDDHGTATSGDEDDMTSSSEIGNDTEDDDDDDDGGVAFPIDIQEEQAEDIPDDVESEPDSFQESETNQPLPQIQLHQTEWNDEKVELFHARHGKL

SEQ ID NO: 9143 - DNA, 3179 bp, Muscodor strobelii
  misc_feature: SGI EST ID NO. CUFF.21868.1
  misc_feature: Variant of the nucleotide sequence at SEQ ID NO 9141
cctgcattaccttcggcatggggaatcttcaatgtgcattgggggctgcattgtgattgaatcactgccgccttaggtacctctttcccctcattgcagctgaagctgcagcaacctgcagacctctcaacctgcccagaaataactgcaaacagcccaaaattgcgcccagtcaagcaagcagaatcagccttgtgccagtatctaaggtgccttggtgaaacaatcgctcgtgactgctcaccaaagtggatagtgatcttgcacctcaacgaaatacatcggagcctcgtgcccaccccatggatatgagactctgagcgtctacactatctacactatacgtaaatgtatcattcgaggtccatcaattcagtaccataagtgtgagactccgcaatacagatggctggtacagcttcaagcaaccctccaggaccagggggattcacgactccagcgcggcctcgcccaacgacggacgagagtatccagacacagttgaaatcttccgtcgcagatagctcccggcatcctcaggccactgctttgatcgatgtcatggaggaaaagggaaatttccgagagtgggagcgtatcaagagcagggaaggcccactggaattgttggatcttcccgttgatgtgttgaggctcatagtagcagagttagccatatcgaatgacttgatcgcgctggctttaactaattctgcactttacgagctcaccatgccccggttgtatgctcggttcgatatagtgtggccagatgcatcgactgtgtctaaccaaccaaacacaggcgttgacgccctctcatacggtctggcgactatgtgtttcccaagcagattcgcggagaaggcaacgatgtcgcgcagacaacacggcgccaacaccccatccctttaccgactcaagcgaaacttggcgcagcacattcggaagttcgctatgggtgatggtccttccgagtggatcgacgaatacatagtcgacaaagaaatgggtaagatgctgggcacgctggtagccatcgcaatcgagaagatgccaaatttggagatcttcaaatgggatatgccaacaggtgtctcgtcagatactttcacagcgcttgcttcgttgcagaatgaggatggccgttctcagctggaaacgttatggatccggtggcatgacaactcccagtctgctcgcaatccttcgtctcgagccttagccgacggaaacgctccaacaaatcctgtgtttccaccacagcttcctgccgtgtccgttttccctagtgcgacaatggatggctctctgaatcagcacaccaaattcaccgctgttggcaaatatctaccctcccatcaacagaagccaccgccggaaccaatcacttacgccgcgtgccgtgttgaatacccaactttcagcattgtgtcccctctaaggagtttgaccgtactaaatatcgacgaactcttctacctagatgagatggctattctgattgagagatctgctacccgcctgcaagagctccgcattggaatgtccaaaagggcgtcaccgttagaaaagtttcaagcttgggatggcccgaatctgcaacaggttgatcacgaagcacggtggcccggtgaatgtcgcatccctgatacgaggctaggaggagtgctgggcgttctggtgggccgaatttacgacattcgcaaaacaccttctctcaaagttaccgagaaagcagattcacaaggcaccacatctggtgataacagacaaccacctatttctggctcgactgcccaagagaatgacaaaaacgtgccgggtaggaagcgtctggagggcaaacttaggcttcgaacattagcactcgaaagagtagccttatcgattcacgtctgcacgaaggccattgattggtcatgcctgacgaagttgacgattctgaattgccctaactacgaggctctgtggaaggctcttaagcggcagttcaaacccacaatcacaccaggctcgtctcagagcacacctcaatatcacctgtcgttaaagtatattcatgcagatagagcctgtccgtcccttatcaacttcattaaagagacactagcccccaattcgcttgaagttttctttttacaggacggaccacgtacggcacagcctctggtcacagcagaacagattttcaaaaatatcgttaaacagcacagagacagtctatgtaaactactcatcgacagctctaggtcagcgaacgcgccattccttaagagatcaagtcggggaagacactgggctataagagatgaatttctctccttcatcatgaaaggtagagttccgaacctgagagagctgggtatggtaatctacatgaatgactggcacaaatttcttcagcatctacctcagatgcaggaattgcggacgctatatattccgcacatggcattgaaacagcaggacaaaccaaaagtagaggatgcatcagaattcgccctccaaattattgacgccatcagcctgaggagagaaattccacttgctcgtctaggtctcggtcctaattgttacgacatctgggaagagacaagtgatggtgcggccaacacttcacacattcccgaagatgatcatggaactgctacttctggcgatgaggatgatatgactagcagtagtgagattggcaatgataccgaagacgatgatgacgatgacgatggaggagttgctttccccattgatatccaggaagagcaagcggaggatattcctgatgatgtcgagtctgagcctgattcgttccaggaatccgaaacgaatcagcccctaccacagatacagcttcaccaaacggaatggaatgatgaaaaggtggagttgttccatgcacggcatggaaagctctgaatggtgccagtatgcagagcagaagtatcaatgttacggtctgggtttgctttgcattaaaagtatactgacgtgttggattcacttggcaacaagcttgacggtacccaggatccggtcgcgtggcatggccagcatccacggcggtttttagccgtcgtctattttgtaccaataccaataaataataccttgttaatggatgcgcagaactttgtaattcccaatgggtcagatactatgcaagggacccatttctc

SEQ ID NO: 9144 - DNA, 894 bp, Muscodor strobelii
  misc_feature: SGI cDNA ID NO. 562845
  misc_feature: Encodes the peptide sequence at SEQ ID NO 9145
atggcgtcctctgggcgtactgtcctcatcactggctgctcagatcacagtctcgggtctgcactggccatcgcgttccacaaggccggttggcgtgtcttcgcgtcggcgcggaaccctgccaaactgcgcgtcgtcgaagccgccgggatcactacggtccagctcgacgtcgcttccgaggaatccatagcagcggccgttaccaagattcagaccttcacgggcggttcgctcgatgtgcttctcaataatgctggggccgcgtactcgatgcctctgatggatatcgacatcgataaagcgcgtgagctatttgacctcaatgtcttctccgtcctaagagtatcgcgcgcgttcctgccacttctacttaagtccaatgataaccctataataatcaacaatacgtcggtagcgtcgcagacggcgggttcagttccctggcaatccgtctataacgcgtctaaagcagcagccgcaagctttaccgagggcctgcgcctcgagcttggcccttttggcatcacagtcatcaatttgcttacgggcagcgtgaaatcggcctttttcgacaacgctcctgccgctattctcccgtctacgtctatttataaaatcgccaaagaagatattgagatggctatgactggcaaggacacggctgtcaacggcaccgaggcggcaaagtgggctaacgacgtagtcaaagacgttagccagcgaaacccgccactctgggtctggcgcggccggcacgcaacgaaggttcggctggcgtcactccttccggttggcacgttggacagcgtcatcaaaggtctctcaaagctggatgtagtagagcagaagatcaaggagaagtgcggtgtgtcaaaactagaaataccatga

SEQ ID NO: 9145 - protein, 297 aa, Muscodor strobelii
  misc_feature: SGI Peptide ID NO. 562845
  misc_feature (6)..(172): Pfam Id: PF00106 Pfam Desc: short chain dehydrogenase
  misc_feature (3)..(295): NCBI GI: 256723333 Blast Desc: NECHADRAFT_72692 [Nectria haematococca mpVI 77-13-4]
  misc_feature (6)..(293): NCBI GI: 46115124 Blast Desc: FG03404.1 [Gibberella zeae PH-1]
  misc_feature (1)..(284): NCBI GI: 242820004 Blast Desc: short-chain dehydrogenases/reductase, [Talaromyces stipitatus ATCC 10500] gi|218713894|gb|EED13318.1| short-chain dehydrogenases/reductase, [Talaromyces stipitatus ATCC 10500]
  misc_feature (7)..(230): NCBI GI: 242814001 Blast Desc: IBR finger domain protein [Talaromyces stipitatus ATCC 10500] gi|218714621|gb|EED14044.1| IBR finger domain protein [Talaromyces stipitatus ATCC 10500]
  misc_feature (2)..(287): NCBI GI: 212538923 Blast Desc: short-chain dehydrogenase, [Penicillium marneffei ATCC 18224] gi|210069359|gb|EEA23450.1| short-chain dehydrogenase, [Penicillium marneffei ATCC 18224]
  misc_feature (2)..(283): NCBI GI: 256723231 Blast Desc: NECHADRAFT_86494 [Nectria haematococca mpVI 77-13-4]
  misc_feature (6)..(286): NCBI GI: 119467458 Blast Desc: short-chain dehydrogenase/reductase, [Neosartorya fischeri NRRL 181] gi|119405687|gb|EAW15638.1| short-chain dehydrogenase/reductase, [Neosartorya fischeri NRRL 181]
  misc_feature (1)..(287): NCBI GI: 242769409 Blast Desc: estradiol 17 beta-dehydrogenase, [Talaromyces stipitatus ATCC 10500] gi|218724958|gb|EED24375.1| estradiol 17 beta-dehydrogenase, [Talaromyces stipitatus ATCC 10500]
  misc_feature (4)..(286): NCBI GI: 146324313 Blast Desc: short-chain dehydrogenase/reductase [Aspergillus fumigatus Af293] gi|129556254|gb|EAL85701.2| short-chain dehydrogenase/reductase, [Aspergillus fumigatus Af293] fumigatus
  misc_feature (6)..(261): NCBI GI: 145254010 Blast Desc: An18g00230 [Aspergillus niger] gi|134084069|emb|CAK43099.1| protein product [Aspergillus niger]
  misc_feature (6)..(288): SWISSPROT Homolog: EC 1.1.1.101 Acylglycerone-phosphate reductase
MASSGRTVLITGCSDHSLGSALAIAFHKAGWRVFASARNPAKLRVVEAAGITTVQLDVASEESIAAAVTKIQTFTGGSLDVLLNNAGAAYSMPLMDIDIDKARELFDLNVFSVLRVSRAFLPLLLKSNDNPIIINNTSVASQTAGSVPWQSVYNASKAAAASFTEGLRLELGPFGITVINLLTGSVKSAFFDNAPAAILPSTSIYKIAKEDIEMAMTGKDTAVNGTEAAKWANDVVKDVSQRNPPLWVWRGRHATKVRLASLLPVGTLDSVIKGLSKLDVVEQKIKEKCGVSKLEIP

SEQ ID NO: 9146 - DNA, 509 bp, Muscodor strobelii
  misc_feature: SGI EST ID NO. CUFF.21750.0
  misc_feature: Variant of the nucleotide sequence at SEQ ID NO 9144
cactacggtccagctcgacgtcgcttccgaggaatccatagcagcggccgttaccaagattcagaccttcacgggcggttcgctcgatgtgcttctcaataatgctggggccgcgtactcgatgcctctgatggatatcgacatcgataaagcgcgtgagctatttgacctcaatgtcttctccgtcctaagagtatcgcgcgcgttcctgccacttctacttaagtccaatgataaccctataataatcaacaatacgtcggtagcgtcgcagacggcgggttcagttccctggcaatccgtctataacgcgtctaaagcagcagccgcaagctttaccgagggcctgcgcctcgagcttggcccttttggcatcacagtcatcaatttgcttacgggcagcgtgaaatcggcctttttcgacaacgctcctgccgctattctcccgtctacgtctatttataaaatcgccaaagaagatattgagatggctatgactggcaaggaca

SEQ ID NO: 9147 - DNA, 1011 bp, Muscodor strobelii
  misc_feature: SGI cDNA ID NO. 562846
  misc_feature: Encodes the peptide sequence at SEQ ID NO 9148
atgaaatatttcacgactctatctatagctttgtcggtttgtgctgcgaaccctttggcccagttacacacgatacacgatgtcgctacccaaaagagtcggatcggaagagttgctgaagctcctacgtatccagtcaggacggagtgcccaaacaaagaaatgagagtagaatgggggaacatgacagacaccgacagattatcgttcgtcaactcgatcaagtgcctcatggaagcaccgcctaaatccattacaaatttgacaagcagatacgacgaactagccttcctccacaactcgatgagtgcaatagtacatcagtatggtgtatttttgccgtggcaccgctactttgtaaatggcttcaaatcgctacttcgcgacgaatgccactatcaagccccattcccttggtggtacgagatccgtgataatggtaatttctccggatcgagcatattcacacccgaatacttcggctccttgcaggtgtctcatcagccggaggatcatgagcccgacagcttctgcgttatcgacggggcatttgcgaaccggacagtgaccgtcggtgtatccgagcagcaatgcttatcacgaggcgaagatcagacactcagcaatttgaccacattggaaaggctaaatgcatgccagtccaatgtcacgaaattctccgaccacgaagaatgtgttgcagacggcattcatgtcagcacacatgctgctgtaggtaagatcatgggtaatgtgccagcttctgttaacgatcctgtcttcttcatgcaccacggatttatcgattgggaatggcaacgctggcaacgcgtagacgaacctcggtattctgatatatcaggctgctactacgtcggcgacggcgaagattgcgtagccgtgacattggataccgtgctgtcttctgacggagttttccccaatatgacgatccgggaggtttcaaaccccacgactagcccattgtgctatgagtatgacttttactga

SEQ ID NO: 9148 - protein, 336 aa, Muscodor strobelii
  misc_feature: SGI Peptide ID NO. 562846
  misc_feature (9)..(322): Pfam Id: PF00264 Pfam Desc: Common central domain of tyrosinase
  misc_feature (249)..(287): Pfam Id: PF00264 Pfam Desc: Common central domain of tyrosinase
  misc_feature (50)..(335): NCBI GI: 145603725 Blast Desc: MGG_05862 [Magnaporthe grisea 70-15] gi|145011893|gb|EDJ96549.1| MGG_05862 [Magnaporthe grisea 70-15]
  misc_feature (4)..(335): NCBI GI: 261205108 Blast Desc: tyrosinase [Ajellomyces dermatitidis SLH14081] gi|239592350|gb|EEQ74931.1| tyrosinase [Ajellomyces dermatitidis SLH14081] gi|239611493|gb|EEQ88480.1| tyrosinase [Ajellomyces
  misc_feature (24)..(335): NCBI GI: 225680996 Blast Desc: conserved [Paracoccidioides brasiliensis Pb03] gi|226292709|gb|EEH48129.1| conserved [Paracoccidioides brasiliensis Pb18]
  misc_feature (1)..(335): NCBI GI: 226283985 Blast Desc: conserved [Paracoccidioides brasiliensis Pb01]
  misc_feature (55)..(335): NCBI GI: 154279366 Blast Desc: [Ajellomyces capsulatus NAm1] gi|150412439|gb|EDN07826.1| [Ajellomyces capsulatus NAm1]
  misc_feature (55)..(335): NCBI GI: 225562498 Blast Desc: conserved [Ajellomyces capsulatus G186AR]
  misc_feature (55)..(335): NCBI GI: 240281068 Blast Desc: tyrosinase [Ajellomyces capsulatus H143]
  misc_feature (1)..(334): NCBI GI: 238507087 Blast Desc: tyrosinase, [Aspergillus flavus NRRL3357] gi|220689458|gb|EED45809.1| tyrosinase, [Aspergillus flavus NRRL3357]
  misc_feature (50)..(334): NCBI GI: 169786145 Blast Desc: [Aspergillus oryzae RIB40] gi|83776281|dbj|BAE66400.1| protein product [Aspergillus oryzae]
  misc_feature (46)..(335): NCBI GI: 39962362 Blast Desc: MGG_09614 [Magnaporthe grisea 70-15] gi|145021841|gb|EDK05918.1| MGG_09614 [Magnaporthe grisea 70-15]
  misc_feature (89)..(277): SWISSPROT Homolog: EC 1.14.18.1 Monophenol monooxygenase
MKYFTTLSIALSVCAANPLAQLHTIHDVATQKSRIGRVAEAPTYPVRTECPNKEMRVEWGNMTDTDRLSFVNSIKCLMEAPPKSITNLTSRYDELAFLHNSMSAIVHQYGVFLPWHRYFVNGFKSLLRDECHYQAPFPWWYEIRDNGNFSGSSIFTPEYFGSLQVSHQPEDHEPDSFCVIDGAFANRTVTVGVSEQQCLSRGEDQTLSNLTTLERLNACQSNVTKFSDHEECVADGIHVSTHAAVGKIMGNVPASVNDPVFFMHHGFIDWEWQRWQRVDEPRYSDISGCYYVGDGEDCVAVTLDTVLSSDGVFPNMTIREVSNPTTSPLCYEYDFY

SEQ ID NO: 9149 - DNA, 1581 bp, Muscodor strobelii
  misc_feature: SGI EST ID NO. CUFF.21757.0
  misc_feature: Variant of the nucleotide sequence at SEQ ID NO 9147
tcggtccgtacaaacgtgaattcgtttcatttgcgaggaattgttgcctgattgccacatcgggaatcgtatattcctacgaaatgaatgcggcatacagtgacggtaggtccggcaaatatgcatccatgcgtgatgacctacacgccgcagaccttcatgtggtatcctcaccccgacaaccgctcattcggaaccggcgccaattgctagacatagattatttccgagttaggggctatgattatgtttagctgcgatctgcgcggtcttcgctctttcaaataaactcgtcggttatgatatatgtgtatagtggctggtcttcgatccaccactctcatttcaagtaaagcgcatatcttcaggattaagaaacaattgcagtatctgcattcacaatgaaatatttcacgactctatctatagctttgtcggtttgtgctgcgaaccctttggcccagttacacacgatacacgatgtcgctacccaaaagagtcggatcggaagagttgctgaagctcctacgtatccagtcaggacggagtgcccaaacaaagaaatgagagtagaatgggggaacatgacagacaccgacagattatcgttcgtcaactcgatcaagtgcctcatggaagcaccgcctaaatccattacaaatttgacaagcagatacgacgaactagccttcctccacaactcgatgagtgcaatagtacatcagtatggtgtatttttgccgtggcaccgctactttgtaaatggcttcaaatcgctacttcgcgacgaatgccactatcaagccccattcccttggtggtacgagatccgtgataatggtaatttctccggatcgagcatattcacacccgaatacttcggctccttgcaggtgtctcatcagccggaggatcatgagcccgacagcttctgcgttatcgacggggcatttgcgaaccggacagtgaccgtcggtgtatccgagcagcaatgcttatcacgaggcgaagatcagacactcagcaatttgaccacattggaaaggctaaatgcatgccagtccaatgtcacgaaattctccgaccacgaagaatgtgttgcagacggcattcatgtcagcacacatgctgctgtaggtaagatcatgggtaatgtgccagcttctgttaacgatcctgtcttcttcatgcaccacggatttatcgattgggaatggcaacgctggcaacgcgtagacgaacctcggtattctgatatatcaggctgctactacgtcggcgacggcgaagattgcgtagccgtgacattggataccgtgctgtcttctgacggagttttccccaatatgacgatccgggaggtttcaaaccccacgactagcccattgtgctatgagtatgacttttactgatcgacagacgttgcatgctctgggtagtgctatggcgccgtgcatagatctcacagaggtgagactggtgatcgtggaaccttacggaaggtctgtcgaggctctgcgggaagacaaacaataggatgaccttctaccaaacttccacataaacctccgaataacgttg

SEQ ID NO: 9150 - DNA, 7818 bp, Muscodor strobelii
  misc_feature: SGI cDNA ID NO. 562847
  misc_feature: Encodes the peptide sequence at SEQ ID NO 9151
atggtggtcagtcacgatgattgtatgagcggcggcgttggcggaccgagtaaatcgagcagtaatcctgatatatatgagccaatggccattataggcttttcaatacgtttcccacaagaagcaacatctcctgctgggttctggaatatcatgaacgaggggagatgtgttatgacagaggtgcctccagatcggttcaatatcaacggcttttaccacgaagaccctacacgtcccgatactataaactccaagggtggacactttctgtcagaagatatacgtaccttcgatgcaccgttcttctcaataaactcatcagaggccgagtgcatggatcctcagcacagattaatgttggagacatcgtatcatgcccttgaaaatgcgggtattcccattcaaaaagtagcaggcacaaagacgtcagtctacgcaggctcagttgggtctctctacagcatgttcttcgatgcggacgaagagataaaccctacctacaaatcaacggggacaggagacccgctcctgtctaaccgcatcagctacttcttcgacttgcgagggcccagtatgacaattgagacagcttgctctagcagtatggtggctctgcatctggcttgccaaagtctacgcacacgcgaatcgaccatgagtctggtctgtgggtcccagctctttcttgagccactttcaacagcgattggcctgtctactatgaagtttcaatcacccgatagccggtgtttcagtttcgacgaacgagcaaatggctattcaaaaggggaggggttcggggtactggtcattaagccattggcagatgccatcgctgcaggagacactatccgtgccgttattcgcgcaacgtcaatgaatcaagatggcaagacacccggtcttacacaaccaagccaagacgcgcaagaggacctaatccgagaagcatatcgtcttgcaggcctcagtctccgcgatactcgattatttgagacacatggtcctggtacgtcactgggtgacgtaatcgaagcgaatgccatcaaagctgcgtttgacgtcaagtcatgtggagatgatccgatttacgtaggcgcagtcaaagccaacattggacatctggaagcaactgctgggattgcaggtatagtcaaggccattctctgcctcgaaaagggaatcattccccctatagccggatttgagaacttgaaccctacaatcaaggaagacattggtcgtcttcgcttccctactgaatctttgcagtggccatcaagcggcgtacgtcgcgcatctgtgaactcatttggctatggcggctcaaacgcacacgctgttctggacgatgcccacagctatttgactgaaaggggtatgaatggactgcattgcacgtcggcttcacaacccttaacaatcgcttacacgaatgggactgctggcaccaatggacatggcaaaaatggctacgaaaatggcctcgagccggttgatcgtatgtacgtcttcgtgctgtcagcagccgatgctgctggtgttcaacggattgccactgtgtatagttctccctcgttccaagaatctctcaatggcgacaacattgggacgctgaaaaatcttgcatttacactatctgaaaagaggactgtcctaccttggaagtcctactttcttgcctcgtctcttgataagttcaaagagcacttgaaagcagtgcccaagcccctacggtcgtcggcacccccacggcttcacttcatattcaccggccaaggcgcccaatgggcgagaatgggcacaagccttacagtgtttcctgtatttcaagagagtctcgttgcagccgatcgacatatgaagctgttgggcagcacttggtcaatcctggaagaaatcggtagaccagtccagagctcaagactggatgaccccttcctcgcgcagcctatatgcactgcgctacaggtagccttagtcgagctgctcagtagctggaacgtacgcccttgcggtgttgccggtcactcgtcgggagaaatagcggcagccttttgtgcacgaggaatatcgagagaatctgcctggactatcgcttattatcgcggtctgtttgcggctagactcgtcacgtccgatgtcaacctccgtggcgctatgatggctgttcaactatcagtagacgaggtgcaagaacacattgatcagctacctcgcgagcatgaacaccaacccttgtcaatcggatgtagcaatagccccaacaacactacggtaacgggcaatgaaaaacttatcgattgtcttaaacaaaagcttgagaaggaagaaatcttcgctaggaaactgagggttccagttgcatatcactcgcaccatatgcttgctattgcggatgactatctcaaatcaataggcgcaattgaggccccagaactggctggtcaagatgagcaataccccatttttgcctcgtccgttactggtaaagtgactcctgccaaggcactacgaaagccagagtattgggtgacgaacctagtgtctcaagtgcgtttctgtgcagcagtccaagccctacagacaagcacgtcgcaaggtcagacgggtagccagaaggagtactacgtggaagttggcccgcatgccgcgcttcaaatcccgatcaaagaatctctgtatcagaagacggacgtattgtatgattccacgttgcgccggaatttcgactctttggaaacaatgttgaatcttgccggaaaattgttcacattgggcttccccgtagctatggaacatgtgaacaattacggctcaaatgcaaagatggtcgccgacttgccgcagtatcctttcaatcattctcagtcatactggatcgagagtagactctttcgaaactacttacagcgaaatcaaacgcgtcatgagctccttggagtaccaagtaccgactggaatgcgctcaagcctaggtggaggaatactatccggctctcggagctgccatggctcgaagaccatcaggtgaacggcacaactctgtatccagcatcggctatgttagtgatggtgatcgaagcagcaagatccatcgcgacccctggcgcagcagtatcaggatatcgatttcgcgacgtcacaatgtcttcgggaattaccatacctcctagaacagaagggaccgaagtacagctttatatgcagagctccaagaactctcaaacaacgagcgtatcgtctatcgtgtctagagagttttggctgaactcgtattccaatgacgagtggaaagaagtctgcgccggcactatcatcaccgagtatacgcaagagtccagcggtattttcaatgcacaggcagagtctgggcaattcaatagcgagatgcttagtaagtttgaagacattaacagaaaatgcgacgagaggaacaccgaagagcacctataccggatcaaccgccaacggggctacgagttcggccctacattccagacgttccatgaaatcgcttaccaccggcatggcagtttcgtatccggcagtatcatcttagacgaatggatgaagaaactgccaccaaccgcaatggtgcaggatcatgtcattcatccgacttcgcttgacggagtcctccaggtcgcgaatgcactgacgacgtgcgggggtacagtgatcagtccgttgcgtgtaccaacacagttcaaggagatatggatatcgcacaaactcctgtcgcgaggctcagaggaaacccttcgtgtcgcctcaaagacattaaaggctacatctcgtcacgtcgattctttcatcgttgcgctactttcgagcacaaacgagcccgctctaactatagacggctatagagaaacggcgctgatggaccgacaagcagattcggatcatcattctggcttattttacgcactcgagtggaagccagacgttgacttgactaatttggcggagaaggaggagtattgcctacaaatagccccggcagccgagagctgggatcccgcgagggaaatcgtatgcctttactatctcaaaaaggctctcgatgcaatagagaaagacaatttccaaagtccgaaaccgcatttgcagaagtatatcagctggatagggcgtcacctacgtgaagtggaacgtcagagtttacttgaggcatcgccctggaaagagatgatagccaccggacaattcgaggactatctttcccagttctctaagataggaagggttgagaaggctttagtggaattctgttctcagttgaatgagatcattagagaagaacaagatcctcttgatctcctcttcaatcgaggactcgcatttgacctgtacaccgacgagatgtttcaagtatccggctcccaagctgcggccttcgtcggcctcgcagcccacaagaacccgaatatgcaaatactggagatcggtgccgggaccggcagtgtgacggagccagttctggcagcattatcacagcaacacggcgcgacgcgtgttctttccaaagtcggcagctacacattcacagacatctcgccgagcttcttcgagaaggcgagaaataagttctcgtcatacacagatcggatgagtttttcgacgctagatattgaacaagaccccgttgctcagggctttgaagcgggacaatatgatttggtgcttgctgcttttgttcttcatgccactgctagcattgaagaaacccttcgaaatgtaaaaactcttctcaagccaggcggctatctagtgttgtgtgaggtcacagacaaaaaccatactacgggccatggggtctgggggactctttcgggatggtggaggtcaattgaacccgatcggcaaattggcccgatctatacttcagtagaatgggaatcgcgcctcatgcagcaagggttttcgtcgcttgaaatgatagtccctgaccatgcggaccctgagcaccagacactgaacgttctcgtgtcgagatcgctgccagagagcccgaaagcaccaaaggcgacccagtggcagcgagctgttattatcgcagacgacacgaccattcagcgcagtaaagccgtcgaaattgcgtcgtatctgaacatagaaggagtttctagctgcaacatcgagagtttgagcactctgcattttagcgagaaggacgttgatttgtgtgtttcgatcgttgatatcgaacgtccatcgctctcgtttctccgggaagacgaattcgatgctctgaagcgaatcatgtcacaagcaagaagtatcttctggctgacaagtgggggcggtgcgaaagcgctgagaccggagacaacaatggcctccgggttgggtcgagcattgatgcgagaacagccggggttacgattcacaactgtcaacgtggaggacccggggaccacagtccgcacattcaagaggctcttcagactatccgtccgtgagcacgaggcagccgactttgaatccgattatatcgttggtgacggacccatctccatcccaaggatagtggaggcagatgactcaaactttccaggccaggcgcaagtcaatggcccagggctggtgaagaaatcgctcggagaagacattaccgagcctttggagttacaattcaacttcggtcaactggatagcttccgcttcgctcaagacatgtcagctcgtttgcgattgcaggatgacgaggtcgaagtacagacgaaagccacgggcgtcaattacgcggacgtcctagctgtacttggtcgcgtagatctagcggtcctcggctatgagtgcagcggtgtggtgctgcgggtgggcgcatctgtgagcacagtagccgtgggtgatcgcgtctgttgtttaactcccgggtccttcaagacaattgtgcgaagtaaagagttctcgacggtgaggatcccggagtcactacctttcaccgaggcattccccggcgtctttgctaccgccatctatggcatcaatcatcttggacgtcttcgccgcggtgaatgcatcctgatccacgcagcggcaggcgccgtgggacaaacagcaatccagatcgcgcaaagtataggagccaacatatttgtcaccgtcagttcggaagagaagaggactctgatcattgagcgatacggtatcccacatgaccacatcttttatagtcgcaatctttccttcgggcacaagatcatgagtgctaccaatggtcgcggtgttgatgtgattctaaactcgctctccggcgagagtcttgcggagtcttggagaattgtagcaccgctcggtcgttttgtagaaattggcaaggcggacattcaatcgttccagaatctctcaatgcagccattctccaagaacgtctcgtatcactcgttggacttggtgactttggcagagcatagtcccggtctcatcagcacgctgatgcatgagatggtcgacatgctctcggctggtgtcattactgcccctcaaccactagctgtctatacgagggcggagttcgagccggctatccgctacctccagaccggacatcacatagggaaagcagtaatcgattgggaagcggaagcggaagcgactgtagtcttgaagccggaaaccgcatatcagttcgacccggacggaagctatgttatcgtcggagggctgggcgggcttggaaaaagtatcgcgtcttggtttgcgaagcgcggcgcaaagcatctgatattgctgtcacggtcgggcgcagtcacgagtaatgcgcttaagctattagaggatcttgctagcagcggtgtaaatgtcgccgctcctaagtgcgatgtcagcgacagtaccgccgtgcagaaggtactcaatgagatcgcggggacgatgccgccgatcaagggatgtgttcaagggtcgatggttcttagggaccgtatattccagaacatgtcatatgatgaatttcaggacgttctccgtcccaagatcgcggggacgtggaatctccataatttcttgccaccaaagatggatttcttcgtgattctttcgtcattgggtggcatgatcggctggaagggacaagcgcaatacgatgcagcttctaccttccaagacgccttcgctcggtacagatggcatctaggggagcgctgcatatctattgacattggcttcgtcatgggggtaggctatgcagcagaacagagcgacgttgcacagaagtgggatgatgtaggaggtgaggttctccgtgacatggatctccatagggtggtagattgggcctgcgaccctgctcatcaacccgctacaccatggctaacgcaggttatcaccgctgccggagtaacgtcaaaggcatcaaaggagatacagcaagaaggctcatttgcccatttgaaaagaccgctgtttagtcacatccttcacagaaattcaaagtccgacgtcgatgcttcgctaggagaatctaaagagaaggttgactatggcgcattgatcggcagcgcagaaaccgtggagcaggcgggcggggtcatcgctgcggcattcactgagaggctttccaaggctctgtcaatgtcaattgaagacatcgacactatgcgaccggcttcttcttatggggttgactctctggtcgcagcagagttgcgcttctggttcaccaatgagatgaaggctgaaatatcagtcttcgatatcttggcgaacgagagcatcgaactcttaggactacgagcagcgaaaaagagcgagcatttcagccagaagaaagcacctgaggctgatggccatttcgactcatga

SEQ ID NO: 9151 - protein, 2605 aa, Muscodor strobelii
  misc_feature: SGI Peptide ID NO. 562847
  misc_feature (588)..(931): Pfam Id: PF00698 Pfam Desc: Acyl transferase domain
  misc_feature (1904)..(1979): Pfam Id: PF08240 Pfam Desc: Alcohol dehydrogenase GroES-like domain
  misc_feature (2219)..(2385): Pfam Id: PF00106 Pfam Desc: short chain dehydrogenase
  misc_feature (2008)..(2156): Pfam Id: PF00107 Pfam Desc: Zinc-binding dehydrogenase
  misc_feature (27)..(278): Pfam Id: PF00109 Pfam Desc: Beta-ketoacyl synthase, N-terminal domain
  misc_feature (286)..(404): Pfam Id: PF02801 Pfam Desc: Beta-ketoacyl synthase, C-terminal domain
  misc_feature (2219)..(2398): Pfam Id: PF08659 Pfam Desc: KR domain
  misc_feature (1483)..(1595): Pfam Id: PF08241 Pfam Desc: Methyltransferase domain
  misc_feature (1483)..(1593): Pfam Id: PF08242 Pfam Desc: Methyltransferase domain
  misc_feature (1904)..(1958): Pfam Id: PF08240 Pfam Desc: Alcohol dehydrogenase GroES-like domain
  misc_feature (14)..(2595): NCBI GI: 145250871 Blast Desc: An15g04140 [Aspergillus niger] gi|134082473|emb|CAK97281.1| protein product [Aspergillus niger]
  misc_feature (24)..(2590): NCBI GI: 189195356 Blast Desc: phenolpthiocerol synthesis polyketide synthase ppsA [Pyrenophora tritici-repentis Pt-1C-BFP] gi|187979895|gb|EDU46521.1| phenolpthiocerol synthesis polyketide
  misc_feature (21)..(2590): NCBI GI: 146322741 Blast Desc: polyketide synthase [Aspergillus fumigatus Af293] gi|129556779|gb|EAL87227.2| polyketide synthase, [Aspergillus fumigatus Af293]
  misc_feature (28)..(2590): NCBI GI: 159128679 Blast Desc: polyketide synthase, [Aspergillus fumigatus A1163]
  misc_feature (28)..(2589): NCBI GI: 238501530 Blast Desc: polyketide synthase, [Aspergillus flavus NRRL3357] gi|220692236|gb|EED48583.1| polyketide synthase, [Aspergillus flavus NRRL3357]
  misc_feature (20)..(2590): NCBI GI: 119497865 Blast Desc: polyketide synthase, [Neosartorya fischeri NRRL 181] gi|119413854|gb|EAW23793.1| polyketide synthase, [Neosartorya fischeri NRRL 181]
  misc_feature (89)..(2598): NCBI GI: 40806905 Blast Desc: polyketide synthase [Gibberella moniliformis]
  misc_feature (16)..(2589): NCBI GI: 169769096 Blast Desc: [Aspergillus oryzae RIB40] gi|83766876|dbj|BAE57016.1| protein product [Aspergillus oryzae]
  misc_feature (19)..(2590): NCBI GI: 121711140 Blast Desc: polyketide synthase, [Aspergillus clavatus NRRL 1] gi|119401336|gb|EAW11760.1| polyketide synthase, [Aspergillus clavatus NRRL 1]
  misc_feature (28)..(2600): NCBI GI: 258578469 Blast Desc: UREG_02932 [Uncinocarpus reesii 1704] gi|237903682|gb|EEP78083.1| UREG_02932 [Uncinocarpus reesii 1704]
  misc_feature (27)..(1825): SWISSPROT Homolog: EC 2.3.1.161 Lovastatin nonaketide synthase
  misc_feature: Useful for fungicidal and/or biocontrol applications
MVVSHDDCMSGGVGGPSKSSSNPDIYEPMAIIGFSIRFPQEATSPAGFWNIMNEGRCVMTEVPPDRFNINGFYHEDPTRPDTINSKGGHFLSEDIRTFDAPFFSINSSEAECMDPQHRLMLETSYHALENAGIPIQKVAGTKTSVYAGSVGSLYSMFFDADEEINPTYKSTGTGDPLLSNRISYFFDLRGPSMTIETACSSSMVALHLACQSLRTRESTMSLVCGSQLFLEPLSTAIGLSTMKFQSPDSRCFSFDERANGYSKGEGFGVLVIKPLADAIAAGDTIRAVIRATSMNQDGKTPGLTQPSQDAQEDLIREAYRLAGLSLRDTRLFETHGPGTSLGDVIEANAIKAAFDVKSCGDDPIYVGAVKANIGHLEATAGIAGIVKAILCLEKGIIPPIAGFENLNPTIKEDIGRLRFPTESLQWPSSGVRRASVNSFGYGGSNAHAVLDDAHSYLTERGMNGLHCTSASQPLTIAYTNGTAGTNGHGKNGYENGLEPVDRMYVFVLSAADAAGVQRIATVYSSPSFQESLNGDNIGTLKNLAFTLSEKRTVLPWKSYFLASSLDKFKEHLKAVPKPLRSSAPPRLHFIFTGQGAQWARMGTSLTVFPVFQESLVAADRHMKLLGSTWSILEEIGRPVQSSRLDDPFLAQPICTALQVALVELLSSWNVRPCGVAGHSSGEIAAAFCARGISRESAWTIAYYRGLFAARLVTSDVNLRGAMMAVQLSVDEVQEHIDQLPREHEHQPLSIGCSNSPNNTTVTGNEKLIDCLKQKLEKEEIFARKLRVPVAYHSHHMLAIADDYLKSIGAIEAPELAGQDEQYPIFASSVTGKVTPAKALRKPEYWVTNLVSQVRFCAAVQALQTSTSQGQTGSQKEYYVEVGPHAALQIPIKESLYQKTDVLYDSTLRRNFDSLETMLNLAGKLFTLGFPVAMEHVNNYGSNAKMVADLPQYPFNHSQSYWIESRLFRNYLQRNQTRHELLGVPSTDWNALKPRWRNTIRLSELPWLEDHQVNGTTLYPASAMLVMVIEAARSIATPGAAVSGYRFRDVTMSSGITIPPRTEGTEVQLYMQSSKNSQTTSVSSIVSREFWLNSYSNDEWKEVCAGTIITEYTQESSGIFNAQAESGQFNSEMLSKFEDINRKCDERNTEEHLYRINRQRGYEFGPTFQTFHEIAYHRHGSFVSGSIILDEWMKKLPPTAMVQDHVIHPTSLDGVLQVANALTTCGGTVISPLRVPTQFKEIWISHKLLSRGSEETLRVASKTLKATSRHVDSFIVALLSSTNEPALTIDGYRETALMDRQADSDHHSGLFYALEWKPDVDLTNLAEKEEYCLQIAPAAESWDPAREIVCLYYLKKALDAIEKDNFQSPKPHLQKYISWIGRHLREVERQSLLEASPWKEMIATGQFEDYLSQFSKIGRVEKALVEFCSQLNEIIREEQDPLDLLFNRGLAFDLYTDEMFQVSGSQAAAFVGLAAHKNPNMQILEIGAGTGSVTEPVLAALSQQHGATRVLSKVGSYTFTDISPSFFEKARNKFSSYTDRMSFSTLDIEQDPVAQGFEAGQYDLVLAAFVLHATASIEETLRNVKTLLKPGGYLVLCEVTDKNHTTGHGVWGTLSGWWRSIEPDRQIGPIYTSVEWESRLMQQGFSSLEMIVPDHADPEHQTLNVLVSRSLPESPKAPKATQWQRAVIIADDTTIQRSKAVEIASYLNIEGVSSCNIESLSTLHFSEKDVDLCVSIVDIERPSLSFLREDEFDALKRIMSQARSIFWLTSGGGAKALRPETTMASGLGRALMREQPGLRFTTVNVEDPGTTVRTFKRLFRLSVREHEAADFESDYIVGDGPISIPRIVEADDSNFPGQAQVNGPGLVKKSLGEDITEPLELQFNFGQLDSFRFAQDMSARLRLQDDEVEVQTKATGVNYADVLAVLGRVDLAVLGYECSGVVLRVGASVSTVAVGDRVCCLTPGSFKTIVRSKEFSTVRIPESLPFTEAFPGVFATAIYGINHLGRLRRGECILIHAAAGAVGQTAIQIAQSIGANIFVTVSSEEKRTLIIERYGIPHDHIFYSRNLSFGHKIMSATNGRGVDVILNSLSGESLAESWRIVAPLGRFVEIGKADIQSFQNLSMQPFSKNVSYHSLDLVTLAEHSPGLISTLMHEMVDMLSAGVITAPQPLAVYTRAEFEPAIRYLQTGHHIGKAVIDWEAEAEATVVLKPETAYQFDPDGSYVIVGGLGGLGKSIASWFAKRGAKHLILLSRSGAVTSNALKLLEDLASSGVNVAAPKCDVSDSTAVQKVLNEIAGTMPPIKGCVQGSMVLRDRIFQNMSYDEFQDVLRPKIAGTWNLHNFLPPKMDFFVILSSLGGMIGWKGQAQYDAASTFQDAFARYRWHLGERCISIDIGFVMGVGYAAEQSDVAQKWDDVGGEVLRDMDLHRVVDWACDPAHQPATPWLTQVITAAGVTSKASKEIQQEGSFAHLKRPLFSHILHRNSKSDVDASLGESKEKVDYGALIGSAETVEQAGGVIAAAFTERLSKALSMSIEDIDTMRPASSYGVDSLVAAELRFWFTNEMKAEISVFDILANESIELLGLRAAKKSEHFSQKKAPEADGHFDS

SEQ ID NO: 9152 - DNA, 1113 bp, Muscodor strobelii
  misc_feature: SGI cDNA ID NO. 562848
  misc_feature: Elevated expression when VOC is produced
  misc_feature: Encodes the peptide sequence at SEQ ID NO 9153
atgcggttcggtctgtttattctctcatcaagatctctggaagacgagttgaagatgagtttgaacgaacttaccccgagcgccaggcttaacttcgatgccagtgtcgggtttttggcgctgtcaaccgtggcagtgatcgctcggtttggcggcaagctatcgatcagacagcatctaacaggacccgattggctttgtttgctctcgctcgtattcttctatgggtattgtatcgtcatttacaactttatatggaatgtatctgatttccacgcgcttgatttcaatccaatatttcctctgagtgaagtcaagaactttctgattgcagtcttcatcgtcgaaatcttctttacacttctcgtcacttcagtgaaacttagcattctatggttctactaccaaattttcggtgttagccgtgttgtcagcaaggttatctacggattggtcgggatttgtattgtctggttcttcgttgcccttttcccactgatcatctttcaatgccaccctgtcgacgcattatggaatcagttcgacgctcctcctgcttgtcttccgtcgcagaagatcttgttgggatacgaactgagcaatttctttattgacattgctattttggcggttccggtagcaaccgttgggaaactacagctctctcgaacaaagaaaatcggtgtttcagctacctttcttctcggcagcttcgtctgcatagcaagtattgttcgactgacaactatctatgacgtcttgcatcccaatcagccagtgagatcgtcgcaatctctcctgtggtcaaccattcaagcaggcactgcaatactctgtagctgtataccgacatacgggcctctcttcgccggcgtttccagacctctttgttctatcttcagccgttatggctcgcgcggatctcgaacagacaaatcaagagagaatggcggatcatctcaaggacgcagcgctggcgataagacctggaccaaagtgggttcctcaggtgatcgtagcttctacccttcgtccaacaaaagcaacgagcttattctgcagcccttgcctcctagaagcaaagatggacaacgccaatacgaggacgtttaa

SEQ ID NO: 9153 - protein, 370 aa, Muscodor strobelii
  misc_feature: SGI Peptide ID NO. 562848
  misc_feature (19)..(340): NCBI GI: 156040850 Blast Desc: SS1G_11403 [Sclerotinia sclerotiorum 1980] gi|154695787|gb|EDN95525.1| SS1G_11403 [Sclerotinia sclerotiorum 1980]
  misc_feature (106)..(327): NCBI GI: 145250869 Blast Desc: An15g04130 [Aspergillus niger] gi|134082472|emb|CAK97280.1| protein product [Aspergillus niger]
  misc_feature (24)..(368): NCBI GI: 189195358 Blast Desc: [Pyrenophora tritici-repentis Pt-1C-BFP] gi|187979896|gb|EDU46522.1| [Pyrenophora tritici-repentis Pt-1C-BFP]
  misc_feature (32)..(363): NCBI GI: 261198116 Blast Desc: integral membrane protein [Ajellomyces dermatitidis SLH14081] gi|239595423|gb|EEQ78004.1| integral membrane protein [Ajellomyces dermatitidis SLH14081]
  misc_feature (38)..(322): NCBI GI: 238502239 Blast Desc: conserved [Aspergillus flavus NRRL3357] gi|220691163|gb|EED47511.1| conserved [Aspergillus flavus NRRL3357]
  misc_feature (8)..(350): NCBI GI: 156059168 Blast Desc: SS1G_03596 [Sclerotinia sclerotiorum 1980] gi|154701383|gb|EDO01122.1| SS1G_03596 [Sclerotinia sclerotiorum 1980]
  misc_feature (4)..(333): NCBI GI: 145236936 Blast Desc: An07g00220 [Aspergillus niger] gi|134075580|emb|CAK39246.1| protein product [Aspergillus niger]
  misc_feature (34)..(364): NCBI GI: 116197042 Blast Desc: CHGG_05119 [Chaetomium globosum CBS 148.51] gi|88181032|gb|EAQ88500.1| CHGG_05119 [Chaetomium globosum CBS 148.51]
  misc_feature (23)..(332): NCBI GI: 145254394 Blast Desc: An18g01530 [Aspergillus niger] gi|134084193|emb|CAK47226.1| protein product [Aspergillus niger]
  misc_feature (24)..(366): NCBI GI: 238503281 Blast Desc: integral membrane protein, [Aspergillus flavus NRRL3357] gi|220691684|gb|EED48032.1| integral membrane protein, [Aspergillus flavus NRRL3357]
  misc_feature: Useful for introducing or modulating the production of volatile compounds
MRFGLFILSSRSLEDELKMSLNELTPSARLNFDASVGFLALSTVAVIARFGGKLSIRQHLTGPDWLCLLSLVFFYGYCIVIYNFIWNVSDFHALDFNPIFPLSEVKNFLIAVFIVEIFFTLLVTSVKLSILWFYYQIFGVSRVVSKVIYGLVGICIVWFFVALFPLIIFQCHPVDALWNQFDAPPACLPSQKILLGYELSNFFIDIAILAVPVATVGKLQLSRTKKIGVSATFLLGSFVCIASIVRLTTIYDVLHPNQPVRSSQSLLWSTIQAGTAILCSCIPTYGPLFAGVSRPLCSIFSRYGSRGSRTDKSRENGGSSQGRSAGDKTWTKVGSSGDRSFYPSSNKSNELILQPLPPRSKDGQRQYEDV

SEQ ID NO: 9154 - DNA, 1090 bp, Muscodor strobelii
  misc_feature: SGI EST ID NO. CUFF.21775.0
  misc_feature: Variant of the nucleotide sequence at SEQ ID NO 9152
atatggaatgtatctgatttccacgcgcttgatttcaatccaatatttcctctgagtgaagtcaagaactttctgattgcagtcttcatcgtcgaaatcttctttacacttctcgtcacttcagtgaaacttagcattctatggttctactaccaaattttcggtgttagccgtgttgtcagcaaggttatctacggattggtcgggatttgtattgtctggttcttcgttgcccttttcccactgatcatctttcaatgccaccctgtcgacgcattatggaatcagttcgacgctcctcctgcttgtcttccgtcgcagaagatcttgttgggatacgaactgagcaatttctttattgacattgctattttggcggttccggtagcaaccgttgggaaactacagctctctcgaacaaagaaaatcggtgtttcagctacctttcttctcggcagcttcgtctgcatagcaagtattgttcgactgacaactatctatgacgtcttgcatcccaatcagccagtgagatcgtcgcaatctctcctgtggtcaaccattcaagcaggcactgcaatactctgtagctgtataccgacatacgggcctctcttcgccggcgtttccagacctctttgttctatcttcagccgttatggctcgcgcggatctcgaacagacaaatcaagagagaatggcggatcatctcaaggacgcagcgctggcgataagacctggaccaaagtgggttcctcaggtgatcgtagcttctacccttcgtccaacaaaagcaacgagcttattctgcagcccttgcctcctagaagcaaagatggacaacgccaatacgaggacgtttaagatgtacgatagatgagtgtatagtgcgtgttttgggttgaggctatcccttcgggtctgattagcttacaaaaaaaaaaaacttaatcaagtgtatagtgtcggggtactagccatgtccgatacagcgacggctaagatgatatgttctaagtgctcagcgaggcgtattggccaagttactataacgagtatatgatgtaaacgtaatgtagccacacaaataaat

SEQ ID NO: 9155 - DNA, 1116 bp, Muscodor strobelii
  misc_feature: SGI cDNA ID NO. 562849
  misc_feature: Encodes the peptide sequence at SEQ ID NO 9156
atggctccaatctggtcacgacagcctttcaaaacactttacaccacatctttgatattgaagaccttaactactctgccatggttcatagctcgttacagccttaagtctgcccgcccttatccagaatggagcttgaaattcagcgttttagcccccgtgctccggaacttgttcagatggtatacctcaacgagatataacgggatatctggtgtggtctcagaccaccaaaaggcgtcgcagcgccatgctctcgcagcaccggcagatgcaggttattactccggtgtcttggctcccggcgcagcagttccagcaccggtcgggggtttgtggtacccgactcctctattcgcgacatctcccgatatagaaaacatgaaggtggtgctgcactttcctggtggcgccttcgtccttgccttaggtcaggagatatggggcaaagtagttgcaggcccactgttgaagtattcgaaagcatctcatgttttctatgcgcaatatcgtgtcgcatccgatgattcgtcccggtttcctgccgggatacaagatattttgactgcgtacaactatatcctctcaataggcatcagtccgaagaatgtcatattgggaggagactccgctggaggaaatctagtactgggtctattgcgacacatggagacctcaccagcatccaatcttccacctccgagcgccgtcatgctctggtcgccttgggtgcatgtaacctccaaggccggtgcagacttcaagtcacaaccgacttcagcaaacgatacaataacctccgacctgcttcagtggggcgccgatgcgtaccttcctaagcatgagcctagtgatatggagcggacttacatctcacctctgaaccatcctttctacacaaaggtgcccctctatattcatgcaggcacagcggaaggattttacctttgggtcaaggaattcgcagacgaaatggctcaagtagatggcaatcgtgtaaagtactcctcgacaccaggttcgacgcacgatctcatattcgcatacgacggagctggtcgagaggaagacgtaaaacttgccatcgaggaggctatcaacttttttggggtatga

SEQ ID NO: 9156 - protein, 371 aa, Muscodor strobelii
  misc_feature: SGI Peptide ID NO. 562849
  misc_feature (131)..(347): Pfam Id: PF07859 Pfam Desc: alpha/beta hydrolase fold
  misc_feature (179)..(347): Pfam Id: PF07859 Pfam Desc: alpha/beta hydrolase fold
  misc_feature (6)..(346): NCBI GI: 189201383 Blast Desc: alpha/beta hydrolase fold-3 domain containing protein [Pyrenophora tritici-repentis Pt-1C-BFP] gi|187984127|gb|EDU49615.1| alpha/beta hydrolase fold-3 domain
  misc_feature (6)..(369): NCBI GI: 154299871 Blast Desc: BC1G_10826 [Botryotinia fuckeliana B05.10] gi|150857106|gb|EDN32298.1| BC1G_10826 [Botryotinia fuckeliana B05.10]
  misc_feature (9)..(368): NCBI GI: 156042101 Blast Desc: SS1G_11601 [Sclerotinia sclerotiorum 1980] gi|154695984|gb|EDN95722.1| SS1G_11601 [Sclerotinia sclerotiorum 1980]
  misc_feature (4)..(346): NCBI GI: 169619948 Blast Desc: SNOG_13174 [Phaeosphaeria nodorum SN15] gi|111058381|gb|EAT79501.1| SNOG_13174 [Phaeosphaeria nodorum SN15]
  misc_feature (6)..(368): NCBI GI: 156040848 Blast Desc: SS1G_11402 [Sclerotinia sclerotiorum 1980] gi|154695786|gb|EDN95524.1| SS1G_11402 [Sclerotinia sclerotiorum 1980]
  misc_feature (9)..(369): NCBI GI: 154299472 Blast Desc: BC1G_10998 [Botryotinia fuckeliana B05.10] gi|150857340|gb|EDN32532.1| BC1G_10998 [Botryotinia fuckeliana B05.10]
  misc_feature (6)..(347): NCBI GI: 256721227 Blast Desc: NECHADRAFT_34839 [Nectria haematococca mpVI 77-13-4]
  misc_feature (3)..(357): NCBI GI: 242789662 Blast Desc: acetyl-hydrolase, [Talaromyces stipitatus ATCC 10500] gi|218717997|gb|EED17417.1| acetyl-hydrolase, [Talaromyces stipitatus ATCC 10500]
  misc_feature (4)..(363): NCBI GI: 67537732 Blast Desc: AN5036.2 [Aspergillus nidulans FGSC A4] gi|40741924|gb|EAA61114.1| AN5036.2 [Aspergillus nidulans FGSC A4] gi|259482088|tpe|CBF76233.1| TPA: conserved [Aspergillus FGSC
  misc_feature (39)..(353): NCBI GI: 46139569 Blast Desc: FG11299.1 [Gibberella zeae PH-1]
MAPIWSRQPFKTLYTTSLILKTLTTLPWFIARYSLKSARPYPEWSLKFSVLAPVLRNLFRWYTSTRYNGISGVVSDHQKASQRHALAAPADAGYYSGVLAPGAAVPAPVGGLWYPTPLFATSPDIENMKVVLHFPGGAFVLALGQEIWGKVVAGPLLKYSKASHVFYAQYRVASDDSSRFPAGIQDILTAYNYILSIGISPKNVILGGDSAGGNLVLGLLRHMETSPASNLPPPSAVMLWSPWVHVTSKAGADFKSQPTSANDTITSDLLQWGADAYLPKHEPSDMERTYISPLNHPFYTKVPLYIHAGTAEGFYLWVKEFADEMAQVDGNRVKYSSTPGSTHDLIFAYDGAGREEDVKLAIEEAINFFGV

SEQ ID NO: 9157 - DNA, 731 bp, Muscodor strobelii
  misc_feature: SGI EST ID NO. CUFF.21780.0
  misc_feature: Variant of the nucleotide sequence at SEQ ID NO 9155
cgaagaatgtcatattgggaggagactccgctggaggaaatctagtactgggtctattgcgacacatggagacctcaccagcatccaatcttccacctccgagcgccgtcatgctctggtcgccttgggtgcatgtaacctccaaggccggtgcagacttcaagtcacaaccgacttcagcaaacgatacaataacctccgacctgcttcagtggggcgccgatgcgtaccttcctaagcatgagcctagtgatatggagcggacttacatctcacctctgaaccatcctttctacacaaaggtgcccctctatattcatgcaggcacagcggaaggattttacctttgggtcaaggaattcgcagacgaaatggctcaagtagatggcaatcgtgtaaagtactcctcgacaccaggttcgacgcacgatctcatattcgcatacgacggagctggtcgagaggaagacgtaaaacttgccatcgaggaggctatcaacttttttggggtatgatgaagcgagagttatgatcaatgtgatcgctgcccttgtattaatcagtttcattggaaacagctgagataataaaataatgcaaatctaaatggttggtctcattcgtgcggatgagaccggtctaagttcgagttcacgactgacgtcaggaaggactcaaaataaatggcaccatcgataccacagtatacacagccaaatcttaacagagac

SEQ ID NO: 9158 - DNA, 1161 bp, Muscodor strobelii
  misc_feature: SGI cDNA ID NO. 562850
  misc_feature: Encodes the peptide sequence at SEQ ID NO 9159
atgcatcactacgctagcttcctggcgtcctcctttctcctagccgcctccgtccgcgcaagtccagcggctccagccacaactcccgcgcctaatctggtagacgcagttgcaccgcgcgccgactcatgcacattcagcggatcgctaggctactcttccgcgagcgtaagcaagaaggcatgctcgacgattgtgctatcggatcttcaggttccgggtggtaagacgctgaatctcgagggtctcaacgatgggacgacggttatctttgaaggcacgacgactttcggatattcggagtgggaagggtccttgttctcagtgagtggggacaagatcaccgtgaagggaaatgcagggagcaagctagacggccagggtgccctgtattgggatggtctagggggtggtggcggcgtcaccaagcccaagttcttcaaagcgaatcacttgaacgattccgtgttggacggcatcactattctcaacgcgccgaagaatagcttcagcttgaactatgtttacaatctgactgtgacgggcatcacggtagatgatcgtgctggtgatgtggatagtctcggccataatacggatgctttcaacataaacaacgcagatggtgtaacaattcttggcgcaactgtttacaaccaagatgactgcgtagccattaacagcggaagcaatatctatttcggtaatggatactgctcaggcggacatggtctatcgatcggcagcatcggaagccagacgaccaatgttgtgacgaacgtaacatttgccgacagcacagtagccaaatcgcaacagtcggttcgcatcaagaccatatccggcaagactggcactgtttccggcataacgtacaaaaatatctatatcgacggcacaggtgttgatcctgattactcagattacggtatcattgtgacgcagtcttacgacggtacgactggatcgccgacgaacggcgtaacaatctcgaacttcgtgttacagaatgtcacagggactgttgggagtgaagccattaacgtctatattgaatgtggttccggcagttgcacgaattggtcctggagcggtgtcagcgtcactggcggtaaaaaggcttccaagtgttacaatgtaccttcggggatctcttgttaa

SEQ ID NO: 9159 - protein, 386 aa, Muscodor strobelii
  misc_feature: SGI Peptide ID NO. 562850
  misc_feature (62)..(386): Pfam Id: PF00295 Pfam Desc: Glycosyl hydrolases family 28
  misc_feature (7)..(386): NCBI GI: 3024382 Blast Desc: PGLR3_ASPNG RecName: Full=Polygalacturonase-3; AltName: Full=Polygalacturonase III; Short=PG-III; Short=PGC; AltName: Full=Pectinase-3; Flags: Precursor gi|283340|pir||S24156
  misc_feature (22)..(386): NCBI GI: 145236328 Blast Desc: PGLR3_ASPNG RecName: Full=Polygalacturonase-3; AltName: Full=Polygalacturonase III; Short=PG-III; Short=PGC; AltName: Full=Pectinase-3; Flags: Precursor gi|283340|pir||S24156
  misc_feature (1)..(386): NCBI GI: 212538341 Blast Desc: extracellular polygalacturonase, [Penicillium marneffei ATCC 18224] gi|210069068|gb|EEA23159.1| extracellular polygalacturonase, [Penicillium marneffei ATCC 18224]
  misc_feature (40)..(386): NCBI GI: 156056893 Blast Desc: polygalacturonase 5 [Sclerotinia sclerotiorum 1980] gi|40549122|gb|AAR87657.1| polygalacturonase 5 [Sclerotinia sclerotiorum] gi|154701963|gb|EDO01702.1| polygalacturonase 5
  misc_feature (21)..(386): NCBI GI: 34366094 Blast Desc: polygalacturonase 3 [Aspergillus aculeatus]
  misc_feature (13)..(386): NCBI GI: 145231182 Blast Desc: polygalacturonase 3 [Aspergillus aculeatus]
  misc_feature (41)..(386): NCBI GI: 40788061 Blast Desc: endopolygalacturonase PGa [Sclerotinia sclerotiorum]
  misc_feature (40)..(386): NCBI GI: 242806883 Blast Desc: extracellular polygalacturonase, [Talaromyces stipitatus ATCC 10500] gi|218715462|gb|EED14884.1| extracellular polygalacturonase, [Talaromyces stipitatus ATCC 10500]
  misc_feature (13)..(386): NCBI GI: 41017452 Blast Desc: PGLR4_ASPNG RecName: Full=Polygalacturonase-4; AltName: Full=Polygalacturonase IV; Short=PG-IV; AltName: Full=Pectinase-4; Flags: Precursor gi|2909341|emb|CAA74744.1|
  misc_feature (40)..(386): NCBI GI: 2196886 Blast Desc: endopolygalacturonase [Sclerotinia sclerotiorum]
  misc_feature (34)..(386): SWISSPROT Homolog: EC 3.2.1.15 Polygalacturonase
MHHYASFLASSFLLAASVRASPAAPATTPAPNLVDAVAPRADSCTFSGSLGYSSASVSKKACSTIVLSDLQVPGGKTLNLEGLNDGTTVIFEGTTTFGYSEWEGSLFSVSGDKITVKGNAGSKLDGQGALYWDGLGGGGGVTKPKFFKANHLNDSVLDGITILNAPKNSFSLNYVYNLTVTGITVDDRAGDVDSLGHNTDAFNINNADGVTILGATVYNQDDCVAINSGSNIYFGNGYCSGGHGLSIGSIGSQTTNVVTNVTFADSTVAKSQQSVRIKTISGKTGTVSGITYKNIYIDGTGVDPDYSDYGIIVTQSYDGTTGSPTNGVTISNFVLQNVTGTVGSEAINVYIECGSGSCTNWSWSGVSVTGGKKASKCYNVPSGISC

SEQ ID NO: 9160 - DNA, 1700 bp, Muscodor strobelii
  misc_feature: SGI EST ID NO. CUFF.21783.0
  misc_feature: Variant of the nucleotide sequence at SEQ ID NO 9158
aaactctccaggccagcgccaaggaaaaagcgagtcccaccaatcggttgggctgccgggccgcgatatctccatccggaagctaccactaggcttccctcgatgatgatggattgtaacagatatagggtcgaatcatattatatatagaggcaataatgcactcccgcgtctcgcgacgccgtcgcgactgctcttggagctcacgattgtcggcacataccgaaacgtatctacctagtggccacaatgcatcactacgctagcttcctggcgtcctcctttctcctagccgcctccgtccgcgcaagtccagcggctccagccacaactcccgcgcctaatctggtagacgcagttgcaccgcgcgccgactcatgcacattcagcggatcgctaggctactcttccgcgagcgtaagcaagaaggcatgctcgacgattgtgctatcggatcttcaggttccgggtggtaagacgctgaatctcgagggtctcaacgatgggacgacggttatctttgaaggcacgacgactttcggatattcggagtgggaagggtccttgttctcagtgagtggggacaagatcaccgtgaagggaaatgcagggagcaagctagacggccagggtgccctgtattgggatggtctagggggtggtggcggcgtcaccaagcccaagttcttcaaagcgaatcacttgaacgattccgtgttggacggcatcactattctcaacgcgccgaagaatagcttcagcttgaactatgtttacaatctgactgtgacgggcatcacggtagatgatcgtgctggtgatgtggatagtctcggccataatacggatgctttcaacataaacaacgcagatggtgtaacaattcttggcgcaactgtttacaaccaagatgactgcgtagccattaacagcggaagcaatatctatttcggtaatggatactgctcaggcggacatggtctatcgatcggcagcatcggaagccagacgaccaatgttgtgacgaacgtaacatttgccgacagcacagtagccaaatcgcaacagtcggttcgcatcaagaccatatccggcaagactggcactgtttccggcataacgtacaaaaatatctatatcgacggcacaggtgttgatcctgattactcagattacggtatcattgtgacgcagtcttacgacggtacgactggatcgccgacgaacggcgtaacaatctcgaacttcgtgttacagaatgtcacagggactgttgggagtgaagccattaacgtctatattgaatgtggttccggcagttgcacgaattggtcctggagcggtgtcagcgtcactggcggtaaaaaggcttccaagtgttacaatgtaccttcggggatctcttgttaagtcgtggtacctttacacgctttccgctcccatatagatcgtcacgactggttgtgtcatgatcactgtgttgtctaacttgaattcgccttgaatgtctctcagaacaagacaactttacacgcaagtatcccctcttgtgatggattgttctagtacgtccgggctcgtatgaaatgtgtcatgaaatggtccgcttattcgggataaccacccgaggtaatgtggtacgctccggggagcatgatacaggggcttatgtgtatatacatacgagtgttattcgtcgg

SEQ ID NO: 9161 - DNA, 795 bp, Muscodor strobelii
  misc_feature: SGI cDNA ID NO. 562851
  misc_feature: Encodes the peptide sequence at SEQ ID NO 9162
atggcgataacatccaaacccgtgactaatgcggaagtcgaagagcatcgtccaccctctgcgcctagcaagatcgctagtgtcgaggctgaatcgacacaccgtcactcaccccttacttcagctgggctgagtactgacctcgcaacgcacaagtacagtttaattatactcaccgctttgctcctcgtctttctctccctcgtcacaactgcagcgaccatatttaccatctcaatcctcggctatgatggtgttcgccgcccccactacccgcacactttccaccgtggcgacagcttcatgatcaccatggcgccggatagtgttatggtagaaatgtgtgtctgcgagcctggtcgcagttttgacactgtttcggttaatgacgacggaaagaagcatgatccaacgcccgagaacatcacgtcgacaactcttgatgatgctatgtctctaggcataaatgaattcaacaagtcagagaccggcatcaaggccgattgccaagtgaacttcacttcaactcctccttacaacgaccccgagcccgaaaagataccaaataaggctgctaaatccccacgccctgatggacagcccaggaggatatttgatgagtactccgagctcaaaagactaatggtccaaattatctatgtgtttcacaagtatgttttaaatgccgtatcactcccctttaggattgtatatgtcgcccttcatctggtcaacgtctttcttgatatatttcgcatcttaactccggctgaggctaagatcgaagttgtataa

SEQ ID NO: 9162 - protein, 264 aa, Muscodor strobelii
  misc_feature: SGI Peptide ID NO. 562851
MAITSKPVTNAEVEEHRPPSAPSKIASVEAESTHRHSPLTSAGLSTDLATHKYSLIILTALLLVFLSLVTTAATIFTISILGYDGVRRPHYPHTFHRGDSFMITMAPDSVMVEMCVCEPGRSFDTVSVNDDGKKHDPTPENITSTTLDDAMSLGINEFNKSETGIKADCQVNFTSTPPYNDPEPEKIPNKAAKSPRPDGQPRRIFDEYSELKRLMVQIIYVFHKYVLNAVSLPFRIVYVALHLVNVFLDIFRILTPAEAKIEVV

SEQ ID NO: 9163 - DNA, 1596 bp, Muscodor strobelii
  misc_feature: SGI cDNA ID NO. 562852
  misc_feature: Encodes the peptide sequence at SEQ ID NO 9164
atgccggcgaccccgtcatcacaaggattttcacaatactcaacgcaaagcgcacccatgggactaaagctggctttaccgcggaccaatgtagatgaaattcgtagttatcaattcttcctagaggtcgcagcgccgtcacttgcgggggtcttcgacggcgatttctggttatccgagattccccgtgcttgtttcattgatcgggccatatggcatgcagtcgttggccttggcgctgtgtacgagacgtatcttgctcgcagcctgccacattccgggaataaacaatgtcgacagatcaatgacaatttcgttttgcaccagtgcaactttgctatcagatcattaacaggcacagccgacgtgggaatcgataggtggcggactctgactgcgtgtgtacttttcacgtatctgtgtagcctacaaaacctacaggagcaggctttcatgcatgttgcatctggtcataagatcatacaggcattgttacaagatgatcgttacaaaagtttgatctctgcgcatccaaactcgcccgacccaagtacagaccaggggccagatactctgagtacctcgccgggtcttcctgtgtccttgggtacgttacagacgatattaaacaaccttgagtcacatcgccaagctcttaatcatggaggattaacatacgagaacacgacaaatcatactgtcaatttgtggctctcatatagaacaccatctatgtcagatctggctggctcttcgccatcattggcgagcgaaaagctcgcttcatcaggaaatattatggatgcgaatcgtgcagcggagtctcttatatacggtttagtactctactcacagagaaactccgaccgccttgcagccgttgtcggcaagggtgacatggcgagcctgacggcactcatatcaggacaggaaccctacatacgatgtttcataaagcttcatacctttctgaagtcttgcagtcccgaagaacacaagaagattgatggagttagcaggaacctgtcgattcataaagggcttctgtgtcttcgcctactcctcaacacagcacgcctcttgcttttacgcaatcctgacaagccttctcaactgatcaacgagacatatcttagcgcgttgttcgaggatattgtcagcatagctgaagaatttctcgagctcgacttcgacaaatcattgtacatgccaatgccgtctacgacgcaatcgctctttctagttgcgcatagtggcttcccacagtcgactcgaaagcgagctattcaactgcttcgcgcgcacccgaggtgcgacggggtgtgggatacactttttagcgccgcgttggcggatatgatgatgggacacgagaaggcagtcgcaagggaaaggagtaacaccggaagctcggaggtcaaaaccgcaaaccaggtagacgatccggatagtgatggatacgttgttcattcactggatcgcacctatagatacagagtttctttccaaggcgtaaggcgtgcaatgataacgtatcgtacatggaatgaattccttaggggcttgccggaaacaaatactctcttaacttggtag

SEQ ID NO: 9164 - protein, 531 aa, Muscodor strobelii
  misc_feature: SGI Peptide ID NO. 562852
  misc_feature (16)..(531): NCBI GI: 261352900 Blast Desc: C6 zinc finger domain-containing protein [Verticillium albo-atrum VaMs.102]
  misc_feature (1)..(531): NCBI GI: 256726400 Blast Desc: NECHADRAFT_100289 [Nectria haematococca mpVI 77-13-4]
  misc_feature (38)..(531): NCBI GI: 256722395 Blast Desc: NECHADRAFT_44351 [Nectria haematococca mpVI 77-13-4]
  misc_feature (144)..(531): NCBI GI: 46117784 Blast Desc: FG04655.1 [Gibberella zeae PH-1]
  misc_feature (35)..(162): NCBI GI: 212536256 Blast Desc: dynamin GTPase, [Penicillium marneffei ATCC 18224] gi|210070683|gb|EEA24773.1| dynamin GTPase, [Penicillium marneffei ATCC 18224]
  misc_feature (35)..(161): NCBI GI: 242795267 Blast Desc: conserved [Talaromyces stipitatus ATCC 10500] gi|218719136|gb|EED18556.1| conserved [Talaromyces stipitatus ATCC 10500]
  misc_feature (5)..(182): NCBI GI: 169597647 Blast Desc: SNOG_01611 [Phaeosphaeria nodorum SN15] gi|111070140|gb|EAT91260.1| SNOG_01611 [Phaeosphaeria nodorum SN15]
  misc_feature (32)..(180): NCBI GI: 154293867 Blast Desc: BC1G_14005 [Botryotinia fuckeliana B05.10] gi|150845160|gb|EDN20353.1| BC1G_14005 [Botryotinia fuckeliana B05.10]
  misc_feature (33)..(172): NCBI GI: 145250215 Blast Desc: An15g00810 [Aspergillus niger] gi|134082137|emb|CAK42251.1| protein product [Aspergillus niger]
  misc_feature (6)..(161): NCBI GI: 189195480 Blast Desc: conserved [Pyrenophora tritici-repentis Pt-1C-BFP] gi|187979957|gb|EDU46583.1| conserved [Pyrenophora tritici-repentis Pt-1C-BFP]
MPATPSSQGFSQYSTQSAPMGLKLALPRTNVDEIRSYQFFLEVAAPSLAGVFDGDFWLSEIPRACFIDRAIWHAVVGLGAVYETYLARSLPHSGNKQCRQINDNFVLHQCNFAIRSLTGTADVGIDRWRTLTACVLFTYLCSLQNLQEQAFMHVASGHKIIQALLQDDRYKSLISAHPNSPDPSTDQGPDTLSTSPGLPVSLGTLQTILNNLESHRQALNHGGLTYENTTNHTVNLWLSYRTPSMSDLAGSSPSLASEKLASSGNIMDANRAAESLIYGLVLYSQRNSDRLAAVVGKGDMASLTALISGQEPYIRCFIKLHTFLKSCSPEEHKKIDGVSRNLSIHKGLLCLRLLLNTARLLLLRNPDKPSQLINETYLSALFEDIVSIAEEFLELDFDKSLYMPMPSTTQSLFLVAHSGFPQSTRKRAIQLLRAHPRCDGVWDTLFSAALADMMMGHEKAVARERSNTGSSEVKTANQVDDPDSDGYVVHSLDRTYRYRVSFQGVRRAMITYRTWNEFLRGLPETNTLLTW

SEQ ID NO: 9165 - DNA, 1776 bp, Muscodor strobelii
  misc_feature: SGI cDNA ID NO. 562853
  misc_feature: Encodes the peptide sequence at SEQ ID NO 9166
atgagggccttccttacttcatatgcgtctctcgcaactctctcgattttgcagtttccaattctaagcactgcacaatacagtcccaattgtcctcttcaaggcgcagtcttcccagcgccgaagaacaccaaaggatcagcagcagtccaacaaggcttatctaagctagaagctagtatcaagtcaatcatcgaagatacagatatctttaagaacacgagcaccagcttccagctgagtcttttttctaagcatgacaatttgttcagcttcaatcatgcggcaagcagtctagatcaagcttcgcttccgtccggaagtctcaacgagaacaccatcttccgtatcggtagcgtgtcaaagttgctcactgtttatgctctcctagcagcgactggtttggaccatatcaacgaccctgtgacggcatgggtgccagagcttgcaggttacgcggcccaagataccggcgatgtcgtcaggcagacgaaatgggatgaagttacaatcggggctctagctagccactcagccggcttggaccgtgattactctttgtctgacttaggaaatctgatcaatgcaacgatagcggcagaagcagccctaccgcctctggatgcaaaagatatcccgacatgcggcactaccgatttcttgcttccagcatgctcacgagcagagtttctcaaagaggtcaacaacctccatcccgtaacttcgaccttccacacacccatatactcgaacctcgctttccaaatcctagcgtacgcactcgaaggcataacgaacaagtccttcgcagaagtcttccaatctgctctggtcgggtctctcggtctagaacgaacatcgctacaaccgccgaacagcaccaaagacggtatcgtcccaggtgatgagatctcaagctggtggagcgtagccctaggcgacgcaagtccattgggcggtatgttctcaaccggctccgacctctccaagctcggacgctccatcctctcctccactctcctcccatcctcgacaacccgccaatggctccggccagtgactcacacagcagatctccacgtcgccgttggcatgccctgggaaattcaccgtctgctccagcccctcacaccaacatcaaatcacacacgcgttgtcgatctatataccaagaacggcgacctaggcggttacgccgcgctcttcgtcctctcacctgagcacgacttcggcttctcgctactactcgccggtcccacgacagccgtagagactactgctcgatcacaggctatgcccatcatcggggatgtggtaacgagtaccatggtctctgcgtttgaacaagcagcacgcgacgaagctacatcgcgcttctgcggcatctacagcaatgccaacacgagtctgaccatctcactcacagacggacatcctggtctgaaaatcagcaactggactagtgacggtaaagatgtcttagagctgttcactggcgtctccaacgcagacgctcggatgtatcctatgagccttgagagtaaagaccagatcgcgttcagagccgtgtatgaagcgacgagagaagcgtcttatactagttcgcctggtgtggtgttctcgcaggggtgtttgacttggggtggggttgctgcgctgcattatgggaaggttgcttatgatgattttgtgtttgatgttgatggggaaggaatggcgacggcgattacgccgagagttatgagggagaggttggttaggaagggcgagtgttga

SEQ ID NO: 9166 - protein, 591 aa, Muscodor strobelii
  misc_feature: SGI Peptide ID NO. 562853
  misc_feature (92)..(437): Pfam Id: PF00144 Pfam Desc: Beta-lactamase
  misc_feature (102)..(437): Pfam Id: PF00144 Pfam Desc: Beta-lactamase
  misc_feature (10)..(587): NCBI GI: 256722357 Blast Desc: NECHADRAFT_44385 [Nectria haematococca mpVI 77-13-4]
  misc_feature (31)..(587): NCBI GI: 46117792 Blast Desc: FG04656.1 [Gibberella zeae PH-1]
  misc_feature (14)..(588): NCBI GI: 256726534 Blast Desc: NECHADRAFT_39479 [Nectria haematococca mpVI 77-13-4]
  misc_feature (31)..(587): NCBI GI: 169765968 Blast Desc: [Aspergillus oryzae RIB40] gi|83765310|dbj|BAE55453.1| protein product [Aspergillus oryzae]
  misc_feature (32)..(587): NCBI GI: 242799287 Blast Desc: beta-lactamase, [Talaromyces stipitatus ATCC 10500] gi|218716692|gb|EED16113.1| beta-lactamase, [Talaromyces stipitatus ATCC 10500]
  misc_feature (10)..(587): NCBI GI: 255948050 Blast Desc: Pc22g07760 [Penicillium chrysogenum Wisconsin 54-1255] gi|211591809|emb|CAP98064.1| Pc22g07760 [Penicillium chrysogenum Wisconsin 54-1255]
  misc_feature (30)..(585): NCBI GI: 240110103 Blast Desc: penicillin-binding protein, [Coccidioides posadasii C735 delta SOWgp]
  misc_feature (31)..(587): NCBI GI: 67904662 Blast Desc: AN9318.2 [Aspergillus nidulans FGSC A4] gi|40747229|gb|EAA66385.1| AN9318.2 [Aspergillus nidulans FGSC A4] gi|259488153|tpe|CBF87393.1| TPA: conserved [Aspergillus FGSC
  misc_feature (16)..(588): NCBI GI: 261195506 Blast Desc: conserved [Ajellomyces dermatitidis SLH14081] gi|239588029|gb|EEQ70672.1| conserved [Ajellomyces dermatitidis SLH14081]
  misc_feature (21)..(588): NCBI GI: 226286817 Blast Desc: conserved [Paracoccidioides brasiliensis Pb18]
MRAFLTSYASLATLSILQFPILSTAQYSPNCPLQGAVFPAPKNTKGSAAVQQGLSKLEASIKSIIEDTDIFKNTSTSFQLSLFSKHDNLFSFNHAASSLDQASLPSGSLNENTIFRIGSVSKLLTVYALLAATGLDHINDPVTAWVPELAGYAAQDTGDVVRQTKWDEVTIGALASHSAGLDRDYSLSDLGNLINATIAAEAALPPLDAKDIPTCGTTDFLLPACSRAEFLKEVNNLHPVTSTFHTPIYSNLAFQILAYALEGITNKSFAEVFQSALVGSLGLERTSLQPPNSTKDGIVPGDEISSWWSVALGDASPLGGMFSTGSDLSKLGRSILSSTLLPSSTTRQWLRPVTHTADLHVAVGMPWEIHRLLQPLTPTSNHTRVVDLYTKNGDLGGYAALFVLSPEHDFGFSLLLAGPTTAVETTARSQAMPIIGDVVTSTMVSAFEQAARDEATSRFCGIYSNANTSLTISLTDGHPGLKISNWTSDGKDVLELFTGVSNADARMYPMSLESKDQIAFRAVYEATREASYTSSPGVVFSQGCLTWGGVAALHYGKVAYDDFVFDVDGEGMATAITPRVMRERLVRKGEC

SEQ ID NO: 9167 - DNA, 1383 bp, Muscodor strobelii
  misc_feature: SGI EST ID NO. CUFF.21805.0
  misc_feature: Variant of the nucleotide sequence at SEQ ID NO 9165
cttgtatcaatcaagcaaactagttcgtcattattgctgacgtccgactaacgatgctgtaagatgagcgattcacaaacgaacctccggcacataagaacatggaatcccgcgctttattcgcgacaaacatcatgcatgtcaataagcctccttgacgcatttggactccgatatccttcttcggctgcaagatgagggccttccttacttcatatgcgtctctcgcaactctctcgattttgcagtttccaattctaagcactgcacaatacagtcccaattgtcctcttcaaggcgcagtcttcccagcgccgaagaacaccaaaggatcagcagcagtccaacaaggcttatctaagctagaagctagtatcaagtcaatcatcgaagatacagatatctttaagaacacgagcaccagcttccagctgagtcttttttctaagcatgacaatttgttcagcttcaatcatgcggcaagcagtctagatcaagcttcgcttccgtccggaagtctcaacgagaacaccatcttccgtatcggtagcgtgtcaaagttgctcactgtttatgctctcctagcagcgactggtttggaccatatcaacgaccctgtgacggcatgggtgccagagcttgcaggttacgcggcccaagataccggcgatgtcgtcaggcagacgaaatgggatgaagttacaatcggggctctagctagccactcagccggcttggaccgtgattactctttgtctgacttaggaaatctgatcaatgcaacgatagcggcagaagcagccctaccgcctctggatgcaaaagatatcccgacatgcggcactaccgatttcttgcttccagcatgctcacgagcagagtttctcaaagaggtcaacaacctccatcccgtaacttcgaccttccacacacccatatactcgaacctcgctttccaaatcctagcgtacgcactcgaaggcataacgaacaagtccttcgcagaagtcttccaatctgctctggtcgggtctctcggtctagaacgaacatcgctacaaccgccgaacagcaccaaagacggtatcgtcccaggtgatgagatctcaagctggtggagcgtagccctaggcgacgcaagtccattgggcggtatgttctcaaccggctccgacctctccaagctcggacgctccatcctctcctccactctcctcccatcctcgacaacccgccaatggctccggccagtgactcacacagcagatctccacgtcgccgttggcatgccctgggaaattcaccgtctgctccagcccctcacaccaacatcaaatcacacacgcgttgtcgatctatataccaagaacggcgacctaggcg

SEQ ID NO: 9168 - DNA, 1785 bp, Muscodor strobelii
  misc_feature: SGI cDNA ID NO. 562854
  misc_feature: Encodes the peptide sequence at SEQ ID NO 9169
atgagggccttccttacttcatatgcgtctctcgcaactctctcgattttgcagtttccaattctaagcactgcacaatacagtcccaattgtcctcttcaaggcgcagtcttcccagcgccgaagaacaccaaaggatcagcagcagtccaacaaggcttatctaagctagaagctagtatcaagtcaatcatcgaagatacagatatctttaagaacacgagcaccagcttccagctgagtcttttttctaagcatgacaatttgttcagcttcaatcatgcggcaagcagtctagatcaagcttcgcttccgtccggaagtctcaacgagaacaccatcttccgtatcggtagcgtgtcaaagttgctcactgtttatgctctcctagcagcgactggtttggaccatatcaacgaccctgtgacggcatgggtgccagagcttgcaggttacgcggcccaagataccggcgatgtcgtcaggcagacgaaatgggatgaagttacaatcggggctctagctagccactcagccggcttggaccgtgattactctttgtctgacttaggaaatctgatcaatgcaacgatagcggcagaagcagccctaccgcctctggatgcaaaagatatcccgacatgcggcactaccgatttcttgcttccagcatgctcacgagcaggtaatgcagagtttctcaaagaggtcaacaacctccatcccgtaacttcgaccttccacacacccatatactcgaacctcgctttccaaatcctagcgtacgcactcgaaggcataacgaacaagtccttcgcagaagtcttccaatctgctctggtcgggtctctcggtctagaacgaacatcgctacaaccgccgaacagcaccaaagacggtatcgtcccaggtgatgagatctcaagctggtggagcgtagccctaggcgacgcaagtccattgggcggtatgttctcaaccggctccgacctctccaagctcggacgctccatcctctcctccactctcctcccatcctcgacaacccgccaatggctccggccagtgactcacacagcagatctccacgtcgccgttggcatgccctgggaaattcaccgtctgctccagcccctcacaccaacatcaaatcacacacgcgttgtcgatctatataccaagaacggcgacctaggcggttacgccgcgctcttcgtcctctcacctgagcacgacttcggcttctcgctactactcgccggtcccacgacagccgtagagactactgctcgatcacaggctatgcccatcatcggggatgtggtaacgagtaccatggtctctgcgtttgaacaagcagcacgcgacgaagctacatcgcgcttctgcggcatctacagcaatgccaacacgagtctgaccatctcactcacagacggacatcctggtctgaaaatcagcaactggactagtgacggtaaagatgtcttagagctgttcactggcgtctccaacgcagacgctcggatgtatcctatgagccttgagagtaaagaccagatcgcgttcagagccgtgtatgaagcgacgagagaagcgtcttatactagttcgcctggtgtggtgttctcgcaggggtgtttgacttggggtggggttgctgcgctgcattatgggaaggttgcttatgatgattttgtgtttgatgttgatggggaaggaatggcgacggcgattacgccgagagttatgagggagaggttggttaggaagggcgagtgttga

SEQ ID NO: 9169 - protein, 594 aa, Muscodor strobelii
  misc_feature: SGI Peptide ID NO. 562854
  misc_feature (92)..(440): Pfam Id: PF00144 Pfam Desc: Beta-lactamase
  misc_feature (102)..(440): Pfam Id: PF00144 Pfam Desc: Beta-lactamase
  misc_feature (10)..(590): NCBI GI: 256722357 Blast Desc: NECHADRAFT_44385 [Nectria haematococca mpVI 77-13-4]
  misc_feature (31)..(590): NCBI GI: 46117792 Blast Desc: FG04656.1 [Gibberella zeae PH-1]
  misc_feature (14)..(591): NCBI GI: 256726534 Blast Desc: NECHADRAFT_39479 [Nectria haematococca mpVI 77-13-4]
  misc_feature (31)..(590): NCBI GI: 169765968 Blast Desc: [Aspergillus oryzae RIB40] gi|83765310|dbj|BAE55453.1| protein product [Aspergillus oryzae]
  misc_feature (32)..(590): NCBI GI: 242799287 Blast Desc: beta-lactamase, [Talaromyces stipitatus ATCC 10500] gi|218716692|gb|EED16113.1| beta-lactamase, [Talaromyces stipitatus ATCC 10500]
  misc_feature (31)..(590): NCBI GI: 67904662 Blast Desc: AN9318.2 [Aspergillus nidulans FGSC A4] gi|40747229|gb|EAA66385.1| AN9318.2 [Aspergillus nidulans FGSC A4] gi|259488153|tpe|CBF87393.1| TPA: conserved [Aspergillus FGSC
  misc_feature (10)..(590): NCBI GI: 255948050 Blast Desc: Pc22g07760 [Penicillium chrysogenum Wisconsin 54-1255] gi|211591809|emb|CAP98064.1| Pc22g07760 [Penicillium chrysogenum Wisconsin 54-1255]
  misc_feature (30)..(588): NCBI GI: 240110103 Blast Desc: penicillin-binding protein, [Coccidioides posadasii C735 delta SOWgp]
  misc_feature (16)..(591): NCBI GI: 261195506 Blast Desc: conserved [Ajellomyces dermatitidis SLH14081] gi|239588029|gb|EEQ70672.1| conserved [Ajellomyces dermatitidis SLH14081]
  misc_feature (21)..(591): NCBI GI: 226286817 Blast Desc: conserved [Paracoccidioides brasiliensis Pb18]
MRAFLTSYASLATLSILQFPILSTAQYSPNCPLQGAVFPAPKNTKGSAAVQQGLSKLEASIKSIIEDTDIFKNTSTSFQLSLFSKHDNLFSFNHAASSLDQASLPSGSLNENTIFRIGSVSKLLTVYALLAATGLDHINDPVTAWVPELAGYAAQDTGDVVRQTKWDEVTIGALASHSAGLDRDYSLSDLGNLINATIAAEAALPPLDAKDIPTCGTTDFLLPACSRAGNAEFLKEVNNLHPVTSTFHTPIYSNLAFQILAYALEGITNKSFAEVFQSALVGSLGLERTSLQPPNSTKDGIVPGDEISSWWSVALGDASPLGGMFSTGSDLSKLGRSILSSTLLPSSTTRQWLRPVTHTADLHVAVGMPWEIHRLLQPLTPTSNHTRVVDLYTKNGDLGGYAALFVLSPEHDFGFSLLLAGPTTAVETTARSQAMPIIGDVVTSTMVSAFEQAARDEATSRFCGIYSNANTSLTISLTDGHPGLKISNWTSDGKDVLELFTGVSNADARMYPMSLESKDQIAFRAVYEATREASYTSSPGVVFSQGCLTWGGVAALHYGKVAYDDFVFDVDGEGMATAITPRVMRERLVRKGEC

SEQ ID NO: 9170 - DNA, 1383 bp, Muscodor strobelii; identical to SEQ ID NO: 9167
  misc_feature: SGI EST ID NO. CUFF.21805.0
  misc_feature: Variant of the nucleotide sequence at SEQ ID NO 9168

SEQ ID NO: 9171 - DNA, 2223 bp, Muscodor strobelii
  misc_feature: SGI cDNA ID NO. 562855
  misc_feature: Encodes the peptide sequence at SEQ ID NO 9172
atgacgtatccctactactctgccgagcaggcctacaaggatggcgccgtgcctccttttgagccagctcctcagggccctatctacaacgccccgcctcccgtctatgacaatgtccctcagggcctgacaatcaatggcgtcccgggctatactgcctacgtcttgaacaatgagccgaacaagcagcagaatggccagactacccgcacccgctctgaggttgatgtcatcgtcgatgtcaacatcaagtctgacgagcgcaagcgtcgtcgtatttcacgctcagttcccggtgtcctgctctgtcttgcactcttcttcgtcgcctgtactttcatgggccttgtctattcctttgctaccaccagcactcgtcccacggtcatcaccattcttggcatgaaacctggatctgcccatgagggcaatggcgatgagaaggctgttgcggctgctcatcttggcaagcgtgctttgggtcagccctactcctatgggggtgtggagtcggtcacttctgtgatcaacgtcagctctacttcgggaactactactgtcacgtccacttcgactgatactactaccgcgactactacttctgccccttaccacgctaatgtctcggcttcatcagctgtcccgtccagttctagcctcttcttcatcactacggacatcactacgggaactattgacgctgtcaccggtaccatgactgagacggctagtccggctatgaacacgacgattgtttcggtcttcacgaacacgtctacgttcttagttcccaacacttacacgctggtctcaactttgtcaccctctgagagtaccatgtcggcctctactctcgtctcaactgccctgaacagctcagtcactgcaacgaacacgactatgtcgtcttttgtcccgactgctactgtcatgccctctgacgactgcacggagactgattctacacccagctcaagtgtactggtttcgcctgtcactggatcttcggccactggtactcctgcgaccactgatcttaccgactttcccactatcacgatgaccatgtcagttaactattcaagctcagccactgaagagtacactgatactactaccacgaccttcactcccttgactacggagactgatgccatcactgtcacttactcatcgactgagcagagtattgtggtggtcaccagcactgcaatcgtgtcgcctgttcccgtgtcgccagtctctgtcatgtctgtatcggtcagcactgcctctatctgtacaggcatggagccagttaccgtcactgtcaccgagactctcacaccttcctgcagcgcttcgtcttctgtcgtcggagttcctcctgtcgtacagtcgtctagttcgggtagcttgcttaccatcacgactaccaccgatactgtcgttctcagcacaagtatttcctcgaacgtcggaggtccgcctgtcacagagacccccactatggacaactcgctcactactatgacttcgacgtccactgtggttgtcagcatgcctggttctcctagctcctcagctgccactacggtcagcactaagacagctacaacctcaacctcgactctcacagccactccctccacttttgcttcctcattggtcagccctatcggcctcaccatgagtagcagcatggatgtccctcctacagccacgatcgttgtcacagactctgacttcatctcctcgtgggctaccacattcacgtcaactaacaccggaggaggccagcctagcactgtgatcatctctactacagtgaccaccactctgcagggtagcagtagctcggagtcctccagcacgagcactgacacgacctgcactgacaacgagagcggcagcgtcaccgccgttcaagcaacccacacccccatcccagtcagctcaagcacctactggggaatcccacccgtcaacgcgaccgccaacggaactgcccttggctcagcttccctcaccatgctcggcgccaccggtaccgacatgccccacgtcgtgactcatacaagcaccatgaccggcatgcccactgccaccgtcagctcggacggtagctcgcacgtcaagccccgtgctgcggatggttggggcggaggtaatggcagtggttctacttcttgcaccgttatgctcattgccatcatctcggttgtcatctctatgctgacttag

SEQ ID NO: 9172 - protein, 740 aa, Muscodor strobelii
  misc_feature: SGI Peptide ID NO. 562855
MTYPYYSAEQAYKDGAVPPFEPAPQGPIYNAPPPVYDNVPQGLTINGVPGYTAYVLNNEPNKQQNGQTTRTRSEVDVIVDVNIKSDERKRRRISRSVPGVLLCLALFFVACTFMGLVYSFATTSTRPTVITILGMKPGSAHEGNGDEKAVAAAHLGKRALGQPYSYGGVESVTSVINVSSTSGTTTVTSTSTDTTTATTTSAPYHANVSASSAVPSSSSLFFITTDITTGTIDAVTGTMTETASPAMNTTIVSVFTNTSTFLVPNTYTLVSTLSPSESTMSASTLVSTALNSSVTATNTTMSSFVPTATVMPSDDCTETDSTPSSSVLVSPVTGSSATGTPATTDLTDFPTITMTMSVNYSSSATEEYTDTTTTTFTPLTTETDAITVTYSSTEQSIVVVTSTAIVSPVPVSPVSVMSVSVSTASICTGMEPVTVTVTETLTPSCSASSSVVGVPPVVQSSSSGSLLTITTTTDTVVLSTSISSNVGGPPVTETPTMDNSLTTMTSTSTVVVSMPGSPSSSAATTVSTKTATTSTSTLTATPSTFASSLVSPIGLTMSSSMDVPPTATIVVTDSDFISSWATTFTSTNTGGGQPSTVIISTTVTTTLQGSSSSESSSTSTDTTCTDNESGSVTAVQATHTPIPVSSSTYWGIPPVNATANGTALGSASLTMLGATGTDMPHVVTHTSTMTGMPTATVSSDGSSHVKPRAADGWGGGNGSGSTSCTVMLIAIISVVISMLT

SEQ ID NO: 9173 - DNA, 4533 bp, Muscodor strobelii
  misc_feature: SGI cDNA ID NO. 562856
  misc_feature: Encodes the peptide sequence at SEQ ID NO 9174
atggcgcgacaccgggagcagcctgtcgaggaggaggaggatcaggacatggaggaggacccagtcagcctgcagtttaaagagccactgtcatggcgcgccgggaagccaattgccacgggtgagctgctgcgccggctggagacgctgtccaaggagctggcagacatggaccaggagacggtcgacaaggagtctctgcacggtgtcgccaaagagctcgccgcccacaatctactcgcgcacaaggaagctggagtcaaggcatacgtcgccgcctgtctcgtggacgttctaaagctttgcgcccccgaagcgccattcactgccaaacaactgaaggatatattcacactcttcgtcagagtcattctacctgccctgtggaacccatcccatgcatacaacacacagcacaagtacgtgctttcctcgctggccgatgtcaagagcatcctcttgatcaacgacatcggtaattccgaagaactgctcctcgagctcttctccacctttttcgacggcatctctggctcatacaagactgcgtccggcgagcagatagccaaggatgtcgagtttcacatgacagagaccatggtcacgctagtcgaagagagctcgtctttgcctccgccagtactggacgtcatcatggcccagttcttacgggcggctccacgcggcggccagagagaaaaggcagatccagatggaaaccagacgactctgctgcccaaggaggaaccagaagcctacgtcatggcaaaaaccgtatgcaatacgtgtcccgacaagatggctcgctatgttggccagtacttcagcgatgtcattctggacgtatcgaaaggcggccatacgaacggccataaggacgataatgattcggatgacgacgatggtcctagtggcccttctgagtcggacttcagagagctgcgcaaagcccatcagctcttgcgggaactttggcgtgccgcctcaaatgtcctctcgaatgtggtgccccaagtcgatgccgagctatctgccgacaacatctcgttacgcttattggccacggagacgttaggagacatgattgctggtataggtgccgctggtcctcccccggctcctgtcatggaccctgccgcctatcctccgctcaaaatgagcgacgaggttgtagagcatcccggtgctagcattctcaccacgcccatctcgcccctctctttcgcgcaaacacatccgcaagcattccacaatttcgtcagcaggaagaacgataagtcccccttgatccgagcctcgtggaccgctgctgtgggctacatagtgtccacttcagcaggtggcatcggcctttccagagaggacgagttagtcttcgttaccgggctgcgcgataagctcaatgacagtgacgaaaaagtacgcctggctgcggtcaaggcaatagagtcgttcagcttccgcgatattgtcacaaagttggccgctgtgggaggtgcctcaaaagagggttcggtcctgtacacactggccgatcgctgccgagacaaacgatcgtctgtccgtgtcgaggctatgaaactgctgggaaaactgtgggctgtagcagctggtgagatagctgccggccaagaggcggtgatatctgcgctgtcaggcatcccgtcgcggatcttcaacacgttctacgctaatgaccttgagctcaacgtcttgttggaacgcgtagtgtacgagtacctagtgccattgtcctttccgccacctccgaaagcaaagggccccaaggcatcaaatgggcagtcacaagtagagtccagctatgatcaagataagattcgagccgaaagaattttacttctgctcaaaggcttggataacagtgcgaggaaggctttccatgctttgcaaaaccgacaacctcagttctccagcgttatgaagaacctggtagtccagtgcgaattgtacaatggaggaaatcctgatgcgaacgcagacagagtcaagctgaatttgaagaagacggttcagtatctgggccaatttctcccagatcccgtcagggtagagggcgatctacacaattttgcgaacctgcatgatcgtcgcagctaccagctgatcaaattctcggtttctcccgaaagtgatttcaaaacaatgcatcgagccatcaaggaacttgtcaagagggtccaaggctcggcgaaacctcatattctcgacactctagtccctcttctctaccgttctgcctatataatgctcaataagagtcatctgcctacttttatggactgctccaagagtgataaggatggccttggaggagcagcgcaagagattactacggagatatcgcaacacaacccgaagctcttcaagacacacgtagggcagctgtgcaaggacgtaatggaaggggcgccaacagcaagcaaaacaaacgacatatccatggtcgaggccctcaaggcatgctcatcatactcgaggaagtaccccgccgaaattctcaacaatcgaaagttcacccaggcactaatcaactacgcactttatgggcagcctgcaaagtctgctaagtacgccgtaaatgtcatgatggcccggaaggacgaggacagtttggtgtctgctaccgatctcttgcaacgagtgatgaaagactggggttacggttcgcctcattttgtcaacaaacttgccgctgttagtcagctggaggtacttgcgcccaaagtagctgccgaggcgaacgacgagattgtcgatatggcacaagatatcctttttaaagtccgtaccaaagctaagagctctgatcctgcgtgggtcagcgatgcggacatggatgaagaatgtcaagcgaaatgctgggctctcaagctcgttgtgaaccgtcttcggggtgtccaagatgtaaaagaggccaaagagctgcatccaccggttttcaagcttctgcgatcgctcttgaagcaacaaggagaattgtgcaagacagaagactcgccaaagcatcacaaagcgcgtctccgattgctagctgggcagcagtggttgaaactgtgcacttctaagcatttcgaagatctcctcactccaacggattacaatcagctatcattcctgatccaggatgcaagcgagatggttcgtcgactgttcctacagaagctccagaagtacctcgttcagaacaagcttcgccctcgtttctacacgatggtatttcttacagcattcgaaccgatcccggaattcaagaaccaaattgagacttggatcaggtctcgcgcaaggctgtaccgcgaagccaataaggaagtcatggaagcgaccatatgccgactgatctctctcctagcgcatcatccagatttcgattctaatgttgaggacctgatggatacttcgcgatacatgctgcattacgtggccaacgtcactaatgaggctaattttgctataatcttcaagtatgccgaacgtgtcaagcagactcttgacagtatcaatcccgatgcaagtgaaaatatctatatcgtgagcgatcttactcaggccatccttcgaaaatggcaggagcgtaagaactggagcttccaagcctatgccggcaaggttggcttacctatggggttatacactgctcttcccaatcatcgtgcagcgcaagacattgccgagaagcaatatctgcctgatgaaatggacgaaagtttggatgagctaatgaaatcgttggacaggaaaaagaaacggaagagcatggcggatgatcgcggtgaaggccagcctgcacaaaagaaagctagagccattccccagaaggctgcgccgaagccgaagcctatcaaagctcccaagccgccaaaggctcccaccaccaaatccagtagcaaacccaagaggccgaagaagcccgcagcatcctcctcttctccagcaccagaggcagcagacagaaggcgcagtggtcgtgcgaaggcgaactcatcttacatagaacgggacgattcggacgacgacgacgatatgttgaatggcgttgccaagtggcagtactacgacaacgatgggaacctagttgaatctgaggaagaggaagacaactcagagctgtcagatgcctccgatgacaaagaagagacccagccagaggctgggcctgaacctgaacccgaacctggaattgaagaggaagaggaacaaccagagaagaacgaacccgaagcgattgcagaccaacatgactccgaacttagtgacgtcgaagacaacgagcaggttgaagaagagggggaggaggaacctgagtcgccacccaaagcgagtggacgcaaaggtcggtcagctgccaccaccgcctcgacgaaaaagagtctccctacccgaccggcagtgaaagagaaagtgaccaaggcgaaagccaagccagcacccaaggccagggtggcgagtacgagggctacgagagcaagaagaggggcggccgctgacgaggaagaagacgagtcggagtga

SEQ ID NO: 9174 - protein, 1510 aa, Muscodor strobelii
  misc_feature: SGI Peptide ID NO. 562856
  misc_feature (22)..(1358): NCBI GI: 40882155 Blast Desc: SPO76 protein [Neurospora crassa]
  misc_feature (22)..(1354): NCBI GI: 5679712 Blast Desc: Spo76 protein [Sordaria macrospora]
  misc_feature (24)..(1358): NCBI GI: 116208078 Blast Desc: CHGG_03332 [Chaetomium globosum CBS 148.51] gi|88183929|gb|EAQ91397.1| CHGG_03332 [Chaetomium globosum CBS 148.51]
  misc_feature (22)..(1358): NCBI GI: 164429091 Blast Desc: NCU00424 [Neurospora crassa OR74A] gi|157072406|gb|EAA27452.2| NCU00424 [Neurospora crassa OR74A]
  misc_feature (22)..(1391): NCBI GI: 171686550 Blast Desc: protein product [Podospora anserina] gi|170943236|emb|CAP68889.1| protein product [Podospora anserina]
  misc_feature (23)..(1358): NCBI GI: 39977125 Blast Desc: MGG_06465 [Magnaporthe grisea 70-15] gi|145016115|gb|EDK00605.1| MGG_06465 [Magnaporthe grisea 70-15]
  misc_feature (13)..(1366): NCBI GI: 156033211 Blast Desc: SS1G_13681 [Sclerotinia sclerotiorum 1980] gi|154699084|gb|EDN98822.1| SS1G_13681 [Sclerotinia sclerotiorum 1980]
  misc_feature (5)..(1362): NCBI GI: 46125151 Blast Desc: FG06953.1 [Gibberella zeae PH-1]
  misc_feature (13)..(1394): NCBI GI: 256732713 Blast Desc: NECHADRAFT_38431 [Nectria haematococca mpVI 77-13-4]
  misc_feature (2)..(1453): NCBI GI: 258566886 Blast Desc: bimD protein [Uncinocarpus reesii 1704] gi|237905633|gb|EEP80034.1| bimD protein [Uncinocarpus reesii 1704]
MARHREQPVEEEEDQDMEEDPVSLQFKEPLSWRAGKPIATGELLRRLETLSKELADMDQETVDKESLHGVAKELAAHNLLAHKEAGVKAYVAACLVDVLKLCAPEAPFTAKQLKDIFTLFVRVILPALWNPSHAYNTQHKYVLSSLADVKSILLINDIGNSEELLLELFSTFFDGISGSYKTASGEQIAKDVEFHMTETMVTLVEESSSLPPPVLDVIMAQFLRAAPRGGQREKADPDGNQTTLLPKEEPEAYVMAKTVCNTCPDKMARYVGQYFSDVILDVSKGGHTNGHKDDNDSDDDDGPSGPSESDFRELRKAHQLLRELWRAASNVLSNVVPQVDAELSADNISLRLLATETLGDMIAGIGAAGPPPAPVMDPAAYPPLKMSDEVVEHPGASILTTPISPLSFAQTHPQAFHNFVSRKNDKSPLIRASWTAAVGYIVSTSAGGIGLSREDELVFVTGLRDKLNDSDEKVRLAAVKAIESFSFRDIVTKLAAVGGASKEGSVLYTLADRCRDKRSSVRVEAMKLLGKLWAVAAGEIAAGQEAVISALSGIPSRIFNTFYANDLELNVLLERVVYEYLVPLSFPPPPKAKGPKASNGQSQVESSYDQDKIRAERILLLLKGLDNSARKAFHALQNRQPQFSSVMKNLVVQCELYNGGNPDANADRVKLNLKKTVQYLGQFLPDPVRVEGDLHNFANLHDRRSYQLIKFSVSPESDFKTMHRAIKELVKRVQGSAKPHILDTLVPLLYRSAYIMLNKSHLPTFMDCSKSDKDGLGGAAQEITTEISQHNPKLFKTHVGQLCKDVMEGAPTASKTNDISMVEALKACSSYSRKYPAEILNNRKFTQALINYALYGQPAKSAKYAVNVMMARKDEDSLVSATDLLQRVMKDWGYGSPHFVNKLAAVSQLEVLAPKVAAEANDEIVDMAQDILFKVRTKAKSSDPAWVSDADMDEECQAKCWALKLVVNRLRGVQDVKEAKELHPPVFKLLRSLLKQQGELCKTEDSPKHHKARLRLLAGQQWLKLCTSKHFEDLLTPTDYNQLSFLIQDASEMVRRLFLQKLQKYLVQNKLRPRFYTMVFLTAFEPIPEFKNQIETWIRSRARLYREANKEVMEATICRLISLLAHHPDFDSNVEDLMDTSRYMLHYVANVTNEANFAIIFKYAERVKQTLDSINPDASENIYIVSDLTQAILRKWQERKNWSFQAYAGKVGLPMGLYTALPNHRAAQDIAEKQYLPDEMDESLDELMKSLDRKKKRKSMADDRGEGQPAQKKARAIPQKAAPKPKPIKAPKPPKAPTTKSSSKPKRPKKPAASSSSPAPEAADRRRSGRAKANSSYIERDDSDDDDDMLNGVAKWQYYDNDGNLVESEEEEDNSELSDASDDKEETQPEAGPEPEPEPGIEEEEEQPEKNEPEAIADQHDSELSDVEDNEQVEEEGEEEPESPPKASGRKGRSAATTASTKKSLPTRPAVKEKVTKAKAKPAPKARVASTRATRARRGAAADEEEDESE

SEQ ID NO: 9175 - DNA, 7660 bp, Muscodor strobelii
  misc_feature: SGI EST ID NO. CUFF.22080.0
  misc_feature: Variant of the nucleotide sequence at SEQ ID NO 9173
ctggttgatgcccttctggacacccctagcccccaaattgtagccattggcagcgattcgcaacccaaacaacagcgggaagtgagagaaagtgagacgcccgtcgcgtaacacaaccttcccgaaaaagaagcccgccatctgccatttacgcttccccagcagttggcgatgcgtcgctcgggtctcaccacacgtcctcgtccactccaataaccacaccaccacttctctctttcgctgcaccgggccaattgtgacattgtaaatatcgtaggccttacccgtgcatttcctcttgtcgttaggcctcatacgatcgtcgcagcgcgtctgtttttgggttgtcgcattgtcatccgcacacgacgcacgccacaaacgtgacacttctcctcgacccctcgcgcccttgaccagcgtcgcggaaagaccgcccgagaaacccttccatcaacatatcaacatcgaagacacccgcatagacgtttcgttgaatagcagggcactgcgtctcgagccaatctctcgccgaccccgccatggcgcgacaccgggagcagcctgtcgaggaggaggaggatcaggacatggaggaggacccagtcagcctgcagtttaaagagccactgtcatggcgcgccgggaagccaattgccacgggtgagctgctgcgccggctggagacgctgtccaaggagctggcagacatggaccaggagacggtcgacaaggagtctctgcacggtgtcgccaaagagctcgccgcccacaatctactcgcgcacaaggaagctggagtcaaggcatacgtcgccgcctgtctcgtggacgttctaaagctttgcgcccccgaagcgccattcactgccaaacaactgaaggatatattcacactcttcgtcagagtcattctacctgccctgtggaacccatcccatgcatacaacacacagcacaagtacgtgctttcctcgctggccgatgtcaagagcatcctcttgatcaacgacatcggtaattccgaagaactgctcctcgagctcttctccacctttttcgacggcatctctggctcatacaagactgcgtccggcgagcagatagccaaggatgtcgagtttcacatgacagagaccatggtcacgctagtcgaagagagctcgtctttgcctccgccagtactggacgtcatcatggcccagttcttacgggcggctccacgcggcggccagagagaaaaggcagatccagatggaaaccagacgactctgctgcccaaggaggaaccagaagcctacgtcatggcaaaaaccgtatgcaatacgtgtcccgacaagatggctcgctatgttggccagtacttcagcgatgtcattctggacgtatcgaaaggcggccatacgaacggccataaggacgataatgattcggatgacgacgatggtcctagtggcccttctgagtcggacttcagagagctgcgcaaagcccatcagctcttgcgggaactttggcgtgccgcctcaaatgtcctctcgaatgtggtgccccaagtcgatgccgagctatctgccgacaacatctcgttacgcttattggccacggagacgttaggagacatgattgctggtataggtgccgctggtcctcccccggctcctgtcatggaccctgccgcctatcctccgctcaaaatgagcgacgaggttgtagagcatcccggtgctagcattctcaccacgcccatctcgcccctctctttcgcgcaaacacatccgcaagcattccacaatttcgtcagcaggaagaacgataagtcccccttgatccgagcctcgtggaccgctgctgtgggctacatagtgtccacttcagcaggtggcatcggcctttccagagaggacgagttagtcttcgttaccgggctgcgcgataagctcaatgacagtgacgaaaaagtacgcctggctgcggtcaaggcaatagagtcgttcagcttccgcgatattgtcacaaagttggccgctgtgggaggtgcctcaaaagagggttcggtcctgtacacactggccgatcgctgccgagacaaacgatcgtctgtccgtgtcgaggctatgaaactgctgggaaaactgtgggctgtagcagctggtgagatagctgccggccaagaggcggtgatatctgcgctgtcaggcatcccgtcgcggatcttcaacacgttctacgctaatgaccttgagctcaacgtcttgttggaacgcgtagtgtacgagtacctagtgccattgtcctttccgccacctccgaaagcaaagggccccaaggcatcaaatgggcagtcacaagtagagtccagctatgatcaagataagattcgagccgaaagaattttacttctgctcaaaggcttggataacagtgcgaggaaggctttccatgctttgcaaaaccgacaacctcagttctccagcgttatgaagaacctggtagtccagtgcgaattgtacaatggaggaaatcctgatgcgaacgcagacagagtcaagctgaatttgaagaagacggttcagtatctgggccaatttctcccagatcccgtcagggtagagggcgatctacacaattttgcgaacctgcatgatcgtcgcagctaccagctgatcaaattctcggtttctcccgaaagtgatttcaaaacaatgcatcgagccatcaaggaacttgtcaagagggtccaaggctcggcgaaacctcatattctcgacactctagtccctcttctctaccgttctgcctatataatgctcaataagagtcatctgcctacttttatggactgctccaagagtgataaggatggccttggaggagcagcgcaagagattactacggagatatcgcaacacaacccgaagctcttcaagacacacgtagggcagctgtgcaaggacgtaatggaaggggcgccaacagcaagcaaaacaaacgacatatccatggtcgaggccctcaaggcatgctcatcatactcgaggaagtaccccgccgaaattctcaacaatcgaaagttcacccaggcactaatcaactacgcactttatgggcagcctgcaaagtctgctaagtacgccgtaaatgtcatgatggcccggaaggacgaggacagtttggtgtctgctaccgatctcttgcaacgagtgatgaaagactggggttacggttcgcctcattttgtcaacaaacttgccgctgttagtcagctggaggtacttgcgcccaaagtagctgccgaggcgaacgacgagattgtcgatatggcacaagatatcctttttaaagtccgtaccaaagctaagagctctgatcctgcgtgggtcagcgatgcggacatggatgaagaatgtcaagcgaaatgctgggctctcaagctcgttgtgaaccgtcttcggggtgtccaagatgtaaaagaggccaaagagctgcatccaccggttttcaagcttctgcgatcgctcttgaagcaacaaggagaattgtgcaagacagaagactcgccaaagcatcacaaagcgcgtctccgattgctagctgggcagcagtggttgaaactgtgcacttctaagcatttcgaagatctcctcactccaacggattacaatcagctatcattcctgatccaggatgcaagcgagatggttcgtcgactgttcctacagaagctccagaagtacctcgttcagaacaagcttcgccctcgtttctacacgatggtatttcttacagcattcgaaccgatcccggaattcaagaaccaaattgagacttggatcaggtctcgcgcaaggctgtaccgcgaagccaataaggaagtcatggaagcgaccatatgccgactgatctctctcctagcgcatcatccagatttcgattctaatgttgaggacctgatggatacttcgcgatacatgctgcattacgtggccaacgtcactaatgaggctaattttgctataatcttcaagtatgccgaacgtgtcaagcagactcttgacagtatcaatcccgatgcaagtgaaaatatctatatcgtgagcgatcttactcaggccatccttcgaaaatggcaggagcgtaagaactggagcttccaagcctatgccggcaaggttggcttacctatggggttatacactgctcttcccaatcatcgtgcagcgcaagacattgccgagaagcaatatctgcctgatgaaatggacgaaagtttggatgagctaatgaaatcgttggacaggaaaaagaaacggaagagcatggcggatgatcgcggtgaaggccagcctgcacaaaagaaagctagagccattccccagaaggctgcgccgaagccgaagcctatcaaagctcccaagccgccaaaggctcccaccaccaaatccagtagcaaacccaagaggccgaagaagcccgcagcatcctcctcttctccagcaccagaggcagcagacagaaggcgcagtggtcgtgcgaaggcgaactcatcttacatagaacgggacgattcggacgacgacgacgatatgttgaatggcgttgccaagtggcagtactacgacaacgatgggaacctagttgaatctgaggaagaggaagacaactcagagctgtcagatgcctccgatgacaaagaagagacccagccagaggctgggcctgaacctgaacccgaacctggaattgaagaggaagaggaacaaccagagaagaacgaacccgaagcgattgcagaccaacatgactccgaacttagtgacgtcgaagacaacgagcaggttgaagaagagggggaggaggaacctgagtcgccacccaaagcgagtggacgcaaaggtcggtcagctgccaccaccgcctcgacgaaaaagagtctccctacccgaccggcagtgaaagagaaagtgaccaaggcgaaagccaagccagcacccaaggccagggtggcgagtacgagggctacgagagcaagaagaggggcggccgctgacgaggaagaagacgagtcggagtgaagtacgtctcgggattcctaatcttaacttgctacggctcttcaaatctgataagccaaggcaaggtaatgggcaatgtggcggatgatgtctttacgattgagcatccttgggctgaggggtaattaatggaatgactcatgtggattgctctttggttctcattttcgtctctgtatattgacattacctcttcttttgcgttgcgatgagtgcggatgtgttatatcgttataccctgattatactacgcagtacctctgcagatgggaactggagatggagatggagatggggggtttgtgtcaatacagtatggatatcaagatgaaatttgcgatcgaatctttgttttcgatgaccttgagagtttctttgattgtgttagttggtgatacggtatccagatggatgtttccatctcagttaaggattttgtaaaaatgggtgggattagaaatatgaggctatttgctatcgacgccgaacgccatctcttggtattgcattatcctacagcctagcccatgttcgcttctcgttctcgcagccaattttcatgcgcggactcatctcgtccacgtagtgtcaggtcctttcgacatcaccggattcctccaagatgctatctagtaagccagcaccgtcgcataacaccgtgccgaataacacaatgcttaagacatcgaatcccgcagcgtgctatcttccgataataattcgaataaccatttgaatttattcgtcagcgaacttccgaataagctcttagatacaaatttaattaagcattgtgtgttctgcgaattgaaccacttgttggctgttgttacgaatatctaccttatctgccctcactttctccaagacggcacgggtggcatccgatcctagcgagcctgtctgctcgccttcgcagccgcctcgcgggccttccaattatcccttatcgtcttagcactcgtaatcaattcatcctgcgtaacgccatccctgatactctcaatcacactattcaccacactgatatgattcccatccgtcttgtcatcgcggaacctgtagaatctccagcgtttcagctgatccatgtagcactccacgacacgctcatcaagcgggtcgtttaacgatttgaggatctcccattcggattcttcgagatggagatcggcgtagtatttatacccctctggatatgacccctcgtgtcgagcaaggagttcgatgtgcggcactgcttcgtagtctagatatggtgttgtggcggattgaggggatgtggacggtgagggggggagagggggaaatgtgaatttccagatgaaatctatcgtgttctcgtcggcgtctttccacttaagtatatgtggatcagtccctggacgatactcagtcctcagacaggtgaatatgagcccgtcgttgccgtgtcgtaggttttttatcacgtcttcgaacatcatcttgatgccgtatgcgagctgcatgttcttcgcgtcgacgaagaatggctggtatgcgcgctccgtgggatatttccgcatgagggattggtaggggcggaagatggcttcttggaagtagcctagtcttttgcttaagtcgcgtgacatgaggacttggccgtcgactgcgagacagtcgaatacgaggtagcgcggttcggatgtcccgtcgggtagggtgtcgattacgagttcgccgtcgaggagtgtggatgtgtggaatgattcttcggatgtggataaggggaagtgtaggttgccgcggtcgatgtaccagtagtcgtttttccggtcgatgaagtagtggacttcttgccccgtctcgcctgatgtcatgtagaggaggtagcgcatgccgtcggacttttcgcatacgtagtagctagatggagaaggggtattagcttgcgcgttctgcggattgttgctaggtgagaagagggagaggtggacatactcctcccgtcgcagctcatcgatatgcttcctcgaaaaggacacaggttgcgcgcctgggaaactggtctgtgttcggccgagcagcgatgcgacttctctgcgcatgttgaacaagagctcgcccgtggctctcgttcctggctcgtcgatggcctggatctgggccggggcttcggggccgtccatgtccatctttgctaggaattacaatgtatttgactcggactcggtcgttgaatgcgtcttgcaaggtaacgttgttgtgccgaggtaaggctattattgtctaggacaagcgtcgcaaacaaagaatgcgccgcgccttgttgcgacgagattaggggtgaaggagtgtgaggtgacagcgtgtattgtctaaaagtgaaatcatttctgaagtcgcaatgcgactcccgttcaagaaacacgacgtcccctgctggctgcccccgagattgaatgtttggtttgaattacggattagaaggttcgcacgatgcggattgacgcaatgcgcaatgccgaatggccttatctgttgatttccttatcgcgctgctgcaaaacagataagtagcctaccgtgtaatttcgcatatgtgagaacttagcgtttcc

SEQ ID NO: 9176 - DNA, 1194 bp, Muscodor strobelii
  misc_feature: SGI cDNA ID NO. 562857
  misc_feature: Reduced expression when VOC is produced
  misc_feature: Encodes the peptide sequence at SEQ ID NO 9177
atggacatggacggccccgaagccccggcccagatccaggccatcgacgagccaggaacgagagccacgggcgagctcttgttcaacatgcgcagagaagtcgcatcgctgctcggccgaacacagaccagtttcccaggcgcgcaacctgtgtccttttcgaggaagcatatcgatgagctgcgacgggaggactactacgtatgcgaaaagtccgacggcatgcgctacctcctctacatgacatcaggcgagacggggcaagaagtccactacttcatcgaccggaaaaacgactactggtacatcgaccgcggcaacctacacttccccttatccacatccgaagaatcattccacacatccacactcctcgacggcgaactcgtaatcgacaccctacccgacgggacatccgaaccgcgctacctcgtattcgactgtctcgcagtcgacggccaagtcctcatgtcacgcgacttaagcaaaagactaggctacttccaagaagccatcttccgcccctaccaatccctcatgcggaaatatcccacggagcgcgcataccagccattcttcgtcgacgcgaagaacatgcagctcgcatacggcatcaagatgatgttcgaagacgtgataaaaaacctacgacacggcaacgacgggctcatattcacctgtctgaggactgagtatcgtccagggactgatccacatatacttaagtggaaagacgccgacgagaacacgatagatttcatctggaaattcacatttccccctctccccccctcaccgtccacatcccctcaatccgccacaacaccatatctagactacgaagcagtgccgcacatcgaactccttgctcgacacgaggggtcatatccagaggggtataaatactacgccgatctccatctcgaagaatccgaatgggagatcctcaaatcgttaaacgacccgcttgatgagcgtgtcgtggagtgctacatggatcagctgaaacgctggagattctacaggttccgcgatgacaagacggatgggaatcatatcagtgtggtgaatagtgtgattgagagtatcagggatggcgttacgcaggatgaattgattacgagtgctaagacgataagggataattggaaggcccgcgaggcggctgcgaaggcgagcagacaggctcgctag

SEQ ID NO: 9177 - protein, 397 aa, Muscodor strobelii
  misc_feature: SGI Peptide ID NO. 562857
  misc_feature (247)..(374): Pfam Id: PF03919 Pfam Desc: mRNA capping enzyme, C-terminal domain
  misc_feature (49)..(244): Pfam Id: PF01331 Pfam Desc: mRNA capping enzyme, catalytic domain
  misc_feature (4)..(394): NCBI GI: 256733158 Blast Desc: NECHADRAFT_68506 [Nectria haematococca mpVI 77-13-4]
  misc_feature (3)..(392): NCBI GI: 156033245 Blast Desc: SS1G_13698 [Sclerotinia sclerotiorum 1980] gi|154699101|gb|EDN98839.1| SS1G_13698 [Sclerotinia sclerotiorum 1980]
  misc_feature (4)..(388): NCBI GI: 46125147 Blast Desc: FG06951.1 [Gibberella zeae PH-1]
  misc_feature (3)..(391): NCBI GI: 154294134 Blast Desc: BC1G_14137 [Botryotinia fuckeliana B05.10] gi|150845074|gb|EDN20267.1| BC1G_14137 [Botryotinia fuckeliana B05.10]
  misc_feature (12)..(390): NCBI GI: 171685624 Blast Desc: protein product [Podospora anserina] gi|170942773|emb|CAP68426.1| protein product [Podospora anserina]
  misc_feature (3)..(387): NCBI GI: 116208108 Blast Desc: CHGG_03347 [Chaetomium globosum CBS 148.51] gi|88183944|gb|EAQ91412.1| CHGG_03347 [Chaetomium globosum CBS 148.51]
  misc_feature (7)..(391): NCBI GI: 85109329 Blast Desc: NCU06260 [Neurospora crassa OR74A] gi|52783133|sp|Q7SB53.1|MCE1_NEUCR RecName: Full=mRNA-capping enzyme subunit alpha; AltName: Full=mRNA guanylyltransferase;
  misc_feature (13)..(386): NCBI GI: 145608672 Blast Desc: MGG_12831 [Magnaporthe grisea 70-15] gi|145016117|gb|EDK00607.1| MGG_12831 [Magnaporthe grisea 70-15]
  misc_feature (15)..(397): NCBI GI: 255948300 Blast Desc: Pc22g09050 [Penicillium chrysogenum Wisconsin 54-1255] gi|211591934|emb|CAP98193.1| Pc22g09050 [Penicillium chrysogenum Wisconsin 54-1255]
  misc_feature (19)..(395): NCBI GI: 67900972 Blast Desc: AN7473.2 [Aspergillus nidulans FGSC A4] gi|40742863|gb|EAA62053.1| AN7473.2 [Aspergillus nidulans FGSC A4] gi|259483779|tpe|CBF79449.1| TPA: mRNA capping enzyme alpha
  misc_feature (7)..(384): SWISSPROT Homolog: EC 2.7.7.50 mRNA guanylyltransferase
  misc_feature: Useful for introducing or modulating the production of volatile compounds
MDMDGPEAPAQIQAIDEPGTRATGELLFNMRREVASLLGRTQTSFPGAQPVSFSRKHIDELRREDYYVCEKSDGMRYLLYMTSGETGQEVHYFIDRKNDYWYIDRGNLHFPLSTSEESFHTSTLLDGELVIDTLPDGTSEPRYLVFDCLAVDGQVLMSRDLSKRLGYFQEAIFRPYQSLMRKYPTERAYQPFFVDAKNMQLAYGIKMMFEDVIKNLRHGNDGLIFTCLRTEYRPGTDPHILKWKDADENTIDFIWKFTFPPLPPSPSTSPQSATTPYLDYEAVPHIELLARHEGSYPEGYKYYADLHLEESEWEILKSLNDPLDERVVECYMDQLKRWRFYRFRDDKTDGNHISVVNSVIESIRDGVTQDELITSAKTIRDNWKAREAAAKASRQAR

SEQ ID NO: 9178 - DNA, 7733 bp, Muscodor strobelii
  misc_feature: SGI EST ID NO. CUFF.22081.1
  misc_feature: Variant of the nucleotide sequence at SEQ ID NO 9176
ggaaacgctaagttctcacatatgcgaaattacacggtaggctacttatctgttttgcagcagcgcgataaggaaatcaacagataaggccattcggcattgcgcattgcgtcaatccgcatcgtgcgaaccttctaatccgtaattcaaaccaaacattcaatctcgggggcagccagcaggggacgtcgtgtttcttgaacgggagtcgcattgcgacttcagaaatgatttcacttttagacaatacacgctgtcacctcacactccttcacccctaatctcgtcgcaacaaggcgcggcgcattctttgtttgcgacgcttgtcctagacaataatagccttacctcggcacaacaacgttaccttgcaagacgcattcaacgaccgagtccgagtcaaatacattgtaattcctagcaaagatggacatggacggccccgaagccccggcccagatccaggccatcgacgagccaggaacgagagccacgggcgagctcttgttcaacatgcgcagagaagtcgcatcgctgctcggccgaacacagaccagtttcccaggcgcgcaacctgtgtccttttcgaggaagcatatcgatgagctgcgacgggaggactactacgtatgcgaaaagtccgacggcatgcgctacctcctctacatgacatcaggcgagacggggcaagaagtccactacttcatcgaccggaaaaacgactactggtacatcgaccgcggcaacctacacttccccttatccacatccgaagaatcattccacacatccacactcctcgacggcgaactcgtaatcgacaccctacccgacgggacatccgaaccgcgctacctcgtattcgactgtctcgcagtcgacggccaagtcctcatgtcacgcgacttaagcaaaagactaggctacttccaagaagccatcttccgcccctaccaatccctcatgcggaaatatcccacggagcgcgcataccagccattcttcgtcgacgcgaagaacatgcagctcgcatacggcatcaagatgatgttcgaagacgtgataaaaaacctacgacacggcaacgacgggctcatattcacctgtctgaggactgagtatcgtccagggactgatccacatatacttaagtggaaagacgccgacgagaacacgatagatttcatctggaaattcacatttccccctctccccccctcaccgtccacatcccctcaatccgccacaacaccatatctagactacgaagcagtgccgcacatcgaactccttgctcgacacgaggggtcatatccagaggggtataaatactacgccgatctccatctcgaagaatccgaatgggagatcctcaaatcgttaaacgacccgcttgatgagcgtgtcgtggagtgctacatggatcagctgaaacgctggagattctacaggttccgcgatgacaagacggatgggaatcatatcagtgtggtgaatagtgtgattgagagtatcagggatggcgttacgcaggatgaattgattacgagtgctaagacgataagggataattggaaggcccgcgaggcggctgcgaaggcgagcagacaggctcgctaggatcggatgccacccgtgccgtcttggagaaagtgagggcagataaggtagatattcgtaacaacagccaacaagtggttcaattcgcagaacacacaatgcttaattaaatttgtatctaagagcttattcggaagttcgctgacgaataaattcaaatggttattcgaattattatcggaagatagcacgctgcgggattcgatgtcttaagcattgtgttattcggcacggtgttatgcgacggtgctggcttactagatagcatcttggaggaatccggtgatgtcgaaaggacctgacactacgtggacgagatgagtccgcgcatgaaaattggctgcgagaacgagaagcgaacatgggctaggctgtaggataatgcaataccaagagatggcgttcggcgtcgatagcaaatagcctcatatttctaatcccacccatttttacaaaatccttaactgagatggaaacatccatctggataccgtatcaccaactaacacaatcaaagaaactctcaaggtcatcgaaaacaaagattcgatcgcaaatttcatcttgatatccatactgtattgacacaaaccccccatctccatctccatctccagttcccatctgcagaggtactgcgtagtataatcagggtataacgatataacacatccgcactcatcgcaacgcaaaagaagaggtaatgtcaatatacagagacgaaaatgagaaccaaagagcaatccacatgagtcattccattaattacccctcagcccaaggatgctcaatcgtaaagacatcatccgccacattgcccattaccttgccttggcttatcagatttgaagagccgtagcaagttaagattaggaatcccgagacgtacttcactccgactcgtcttcttcctcgtcagcggccgcccctcttcttgctctcgtagccctcgtactcgccaccctggccttgggtgctggcttggctttcgccttggtcactttctctttcactgccggtcgggtagggagactctttttcgtcgaggcggtggtggcagctgaccgacctttgcgtccactcgctttgggtggcgactcaggttcctcctccccctcttcttcaacctgctcgttgtcttcgacgtcactaagttcggagtcatgttggtctgcaatcgcttcgggttcgttcttctctggttgttcctcttcctcttcaattccaggttcgggttcaggttcaggcccagcctctggctgggtctcttctttgtcatcggaggcatctgacagctctgagttgtcttcctcttcctcagattcaactaggttcccatcgttgtcgtagtactgccacttggcaacgccattcaacatatcgtcgtcgtcgtccgaatcgtcccgttctatgtaagatgagttcgccttcgcacgaccactgcgccttctgtctgctgcctctggtgctggagaagaggaggatgctgcgggcttcttcggcctcttgggtttgctactggatttggtggtgggagcctttggcggcttgggagctttgataggcttcggcttcggcgcagccttctggggaatggctctagctttcttttgtgcaggctggccttcaccgcgatcatccgccatgctcttccgtttctgggggcgggcaacgttagctcaaattacaatcaagattgcccagtaaggcacactgttggaaattgcgtacctttttcctgtccaacgatttcattagctcatccaaactttcgtccatttcatcaggcagatattgcttctcggcaatgtcttgcgctgcacgatgattgggaagagcagtgtataaccccataggtaagccaaccttgccggcataggcttggaagctccagttcttacgctcctgccattttcgaaggatggcctgagtaagatcgctcacgatatagatattttcacttgcatcgggattgatactgtcaagagtctgcttgacacgttcggcatacttgaagattatagcaaaattagcctcattagtgacgttggccacgtaatgcagcatgtatcgcgaagtatccatcaggtcctcaacattagaatcgaaatctggatgatgcgctaggagagagatcagtcggcatatggtcgcttccatgacttccttattggcttcgcggtacagccttgcgcgagacctgatccaagtctcaatttggttcttgaattccgggatcggttcgaatgctgtaagaaataccatcgtgtagaaacgagggcgaagcttgttctgaacgaggtacttctggagcttctgtaggaacagtcgacgaaccatctcgcttgcatcctggatcaggaatgatagctgattgtaatccgttggagtgaggagatcttcgaaatgcttagaagtgcacagtttcaaccactgctgcccagctagcaatcggagacgcgctttgtgatgctttggcgagtcttctgtcttgcacaattctccttgttgcttcaagagcgatcgcagaagcttgaaaaccggtggatgcagctctttggcctcttttacatcttggacaccccgaagacggttcacaacgagcttgagagcccagcatttcgcttgacattcttcatccatgtccgcatcgctgacccacgcaggatcagagctcttagctttggtacggactttaaaaaggatatcttgtgccatatcgacaatctcgtcgttcgcctcggcagctactttgggcgcaagtacctccagctgactaacagcggcaagtttgttgacaaaatgaggcgaaccgtaaccccagtctttcatcactcgttgcaagagatcggtagcagacaccaaactgtcctcgtccttccgggccatcatgacatttacggcgtacttagcagactttgcaggctgcccataaagtgcgtagttgattagtgcctgggtgaactttcgattgttgagaatttcggcggggtacttcctcgagtatgatgagcatgccttgagggcctcgaccatggatatgtcgtttgttttgcttgctgttggcgccccttccattacgtccttgcacagctgccctacgtgtgtcttgaagagcttcgggttgtgttgcgatatctccgtagtaatctcttgcgctgctcctccaaggccatccttatcactcttggagcagtccataaaagtaggcagatgactcttattgagcattatataggcagaacggtagagaagagggactagagtgtcgagaatatgaggtttcgccgagccttggaccctcttgacaagttccttgatggctcgatgcattgttttgaaatcactttcgggagaaaccgagaatttgatcagctggtagctgcgacgatcatgcaggttcgcaaaattgtgtagatcgccctctaccctgacgggatctgggagaaattggcccagatactgaaccgtcttcttcaaattcagcttgactctgtctgcgttcgcatcaggatttcctccattgtacaattcgcactggactaccaggttcttcataacgctggagaactgaggttgtcggttttgcaaagcatggaaagccttcctcgcactgttatccaagcctttgagcagaagtaaaattctttcggctcgaatcttatcttgatcatagctggactctacttgtgactgcccatttgatgccttggggccctttgctttcggaggtggcggaaaggacaatggcactaggtactcgtacactacgcgttccaacaagacgttgagctcaaggtcattagcgtagaacgtgttgaagatccgcgacgggatgcctgacagcgcagatatcaccgcctcttggccggcagctatctcaccagctgctacagcccacagttttcccagcagtttcatagcctcgacacggacagacgatcgtttgtctcggcagcgatcggccagtgtgtacaggaccgaaccctcttttgaggcacctcccacagcggccaactttgtgacaatatcgcggaagctgaacgactctattgccttgaccgcagccaggcgtactttttcgtcactgtcattgagcttatcgcgcagcccggtaacgaagactaactcgtcctctctggaaaggccgatgccacctgctgaagtggacactatgtagcccacagcagcggtccacgaggctcggatcaagggggacttatcgttcttcctgctgacgaaattgtggaatgcttgcggatgtgtttgcgcgaaagagaggggcgagatgggcgtggtgagaatgctagcaccgggatgctctacaacctcgtcgctcattttgagcggaggataggcggcagggtccatgacaggagccgggggaggaccagcggcacctataccagcaatcatgtctcctaacgtctccgtggccaataagcgtaacgagatgttgtcggcagatagctcggcatcgacttggggcaccacattcgagaggacatttgaggcggcacgccaaagttcccgcaagagctgatgggctttgcgcagctctctgaagtccgactcagaagggccactaggaccatcgtcgtcatccgaatcattatcgtccttatggccgttcgtatggccgcctttcgatacgtccagaatgacatcgctgaagtactggccaacatagcgagccatcttgtcgggacacgtattgcatacggtttttgccatgacgtaggcttctggttcctccttgggcagcagagtcgtctggtttccatctggatctgccttttctctctggccgccgcgtggagccgcccgtaagaactgggccatgatgacgtccagtactggcggaggcaaagacgagctctcttcgactagcgtgaccatggtctctgtcatgtgaaactcgacatccttggctatctgctcgccggacgcagtcttgtatgagccagagatgccgtcgaaaaaggtggagaagagctcgaggagcagttcttcggaattaccgatgtcgttgatcaagaggatgctcttgacatcggccagcgaggaaagcacgtacttgtgctgtgtgttgtatgcatgggatgggttccacagggcaggtagaatgactctgacgaagagtgtgaatatatcctacattgagcagatgttagctgaggttcacgtgtgatatgatcgatcgtgttcgagcgaggtagttcaatgtaccttcagttgtttggcagtgaatggcgcttcgggggcgcaaagctttagaacgtccacgagacaggcggcgacgtatgccttgactccagcttccttgtgcgcgagtagattgtgggcggcgagctctttggcgacaccgtgcagagactccttgtcgaccgtctcctggtccatgtctgccagctccttggacagcgtctccagccggcgcagcagctcacccgtggcaattggcttcccggcgcgccatgacagtggctctttaaactgcaggctgactgggtcctcctccatgtcctgatcctcctcctcctcgacaggctgctcccggtgtcgcgccatggcggggtcggcgagagattggctcgagacgcagtgccctgctattcaacgaaacgtctatgcgggtgtcttcgatgttgatatgttgatggaagggtttctcgggcggtctttccgcgacgctggtcaagggcgcgaggggtcgaggagaagtgtcacgtttgtggcgtgcgtcgtgtgcggatgacaatgcgacaacccaaaaacagacgcgctgcgacgatcgtatgaggcctaacgacaagaggaaatgcacgggtaaggcctacgatatttacaatgtcacaattggcccggtgcagcgaaagagagaagtggtggtgtggttattggagtggacgaggacgtgtggtgagacccgagcgacgcatcgccaactgctggggaagcgtaaatggcagatggcgggcttctttttcgggaaggttgtgttacgcgacgggcgtctcactttctctcacttcccgctgttgtttgggttgcgaatcgctgccaatggctacaatttgggggctaggggtgtccagaagggcatcaaccag

SEQ ID NO: 9179 - DNA, 2046 bp, Muscodor strobelii
  misc_feature: SGI cDNA ID NO. 562858
  misc_feature: Encodes the peptide sequence at SEQ ID NO 9180
atggcaacagagacagcggacacgttgatgcgtcagatcctggacgaaatccgccagcttcgggttgaccagaagagttttatggaagccttgatgagaaaacgtactacaaatcccacggaagatgagtctaaagaaatcgatgagtctgaagaaactgctgggcccaaagaaaccgggtcttctcaaatgcaacagctcagcatacccgcaaaatttggtcataaggtttccaaaaatttctggaaactgaaaatcccgacagatcaaaatcgtggttctagtattgacgaattcaaaatgtggctgaagagatcagatccttcggcgtggccctatgctcctcaggctgaactgttgacggtgcaatatatagggcaagggggagccgtttcaacgtatatgccgtcaggagcaacaaatgctgattgggattcgatgaaaagcagaattgagaagagttggatggacgaggctctggccgaaagagatgagcaggagcagaatcattgtaaagtgaagatacgagataatttcattgtgcacgagttcgagtggtcggaaaatgggactggcggtctctggctccaacattcttgtccggtttccactgagctattcagggacaatgtggcgactgaaaggtcgaatgagtcgttcgcccgggccggcattgtatgtcaagtgtcacctgtttggcaggatgagtcgactggcctcctaggattcgaatctattgcaatcgtcttcatgcttcatcaccacgaacatcaagtttgcaacggcgttcatactttccactgtccctatgacttcctcgccaactatgctactgcatggccactaggtcagcttagatgctctagtgtgcaagtaactggtgcagcttcctttcttcagtttaaccaacgatcgctcagcatcggttccccgcgagaacagtcatcggaaaccgaagcctccgggttacgatgcgaacgacagagcaccaaattcgtcttgaatagaaacaccgagaacctaatgctgtcggagcgtcgttattgtgctactatcttgttccacccatacctggggaaattcgtcatcatgctcctctctgacgaaaggccgtcttctggggggatctactctaatgaagaaatattgaagaaaaaggggcttcatgacatacctcttttgtacaaaggcatcgaactttttcaaatcgttgtcgatgacctaatacacaaatggagtactgaatgggaatccacattaacgcagttcgaggacgtccttgtgataaagatacaagatgtcttggaacacaagacccgcaaacgtctcatgtatgacagcaacaagcttgagcggtccgagctttactttgccctgctccagcttctccgtatcttccattttcatattagcgacagcatgaccgacttcaagcgtatggtatcaatgtctcaagaagccctcgacattatgaggggggatgctatcgaggaggaaattacgaaaaagaattgggacatagtggccgagagacagaggaagttcggcgaggaacttctcaggcggataaacggcagaactgcggagatcgagagcctaagagacggctcggttcgcgaaacattgcgaagcgcccagctcaacagatatttattcgtcttcacagtctttacgattctttatctctcaccaagctttgtagcgactctatactcaacaaatgcattcggcggtacagacggcaccgaagagacacaaagaagattttggattacgtttggcagcgccactggcgttacttataccatcgcagcaataatactgtccactttcagctggaagaagtggtggcaaaagtttcaagagcttttcaagtgggacctatcgaaagccactgattcccaaatcgatgacgcggagggcgaaagcaaaggaactggactgtcgcttttcgaaactagcctggctcattttcttcgaaagcgcaagaatgagaccgacgccggcgaggagacgcctaaagcaagaagaagcggtcttgtttaa

SEQ ID NO: 9180 - protein, 681 aa, Muscodor strobelii
  misc_feature: SGI Peptide ID NO. 562858
  misc_feature (239)..(608): NCBI GI: 171676599 Blast Desc: protein product [Podospora anserina] gi|170936366|emb|CAP61024.1| protein product [Podospora anserina]
  misc_feature (230)..(538): NCBI GI: 116197541 Blast Desc: [Chaetomium globosum CBS 148.51] gi|88178205|gb|EAQ85673.1| [Chaetomium globosum CBS 148.51]
  misc_feature (411)..(568): NCBI GI: 119501615 Blast Desc: NFIA_044860 [Neosartorya fischeri NRRL 181] gi|119415730|gb|EAW25667.1| NFIA_044860 [Neosartorya fischeri NRRL 181]
  misc_feature (273)..(466): NCBI GI: 115436796 Blast Desc: [Aspergillus terreus NIH2624] gi|114188461|gb|EAU30161.1| [Aspergillus terreus NIH2624]
  misc_feature (350)..(567): NCBI GI: 46134027 Blast Desc: FG09153.1 [Gibberella zeae PH-1]
  misc_feature (397)..(606): NCBI GI: 116194133 Blast Desc: [Chaetomium globosum CBS 148.51] gi|88182697|gb|EAQ90165.1| [Chaetomium globosum CBS 148.51]
  misc_feature (447)..(604): NCBI GI: 116198769 Blast Desc: [Chaetomium globosum CBS 148.51] gi|88178819|gb|EAQ86287.1| [Chaetomium globosum CBS 148.51]
MATETADTLMRQILDEIRQLRVDQKSFMEALMRKRTTNPTEDESKEIDESEETAGPKETGSSQMQQLSIPAKFGHKVSKNFWKLKIPTDQNRGSSIDEFKMWLKRSDPSAWPYAPQAELLTVQYIGQGGAVSTYMPSGATNADWDSMKSRIEKSWMDEALAERDEQEQNHCKVKIRDNFIVHEFEWSENGTGGLWLQHSCPVSTELFRDNVATERSNESFARAGIVCQVSPVWQDESTGLLGFESIAIVFMLHHHEHQVCNGVHTFHCPYDFLANYATAWPLGQLRCSSVQVTGAASFLQFNQRSLSIGSPREQSSETEASGLRCERQSTKFVLNRNTENLMLSERRYCATILFHPYLGKFVIMLLSDERPSSGGIYSNEEILKKKGLHDIPLLYKGIELFQIVVDDLIHKWSTEWESTLTQFEDVLVIKIQDVLEHKTRKRLMYDSNKLERSELYFALLQLLRIFHFHISDSMTDFKRMVSMSQEALDIMRGDAIEEEITKKNWDIVAERQRKFGEELLRRINGRTAEIESLRDGSVRETLRSAQLNRYLFVFTVFTILYLSPSFVATLYSTNAFGGTDGTEETQRRFWITFGSATGVTYTIAAIILSTFSWKKWWQKFQELFKWDLSKATDSQIDDAEGESKGTGLSLFETSLAHFLRKRKNETDAGEETPKARRSGLV

SEQ ID NO: 9181 - DNA, 472 bp, Muscodor strobelii
  misc_feature: SGI EST ID NO. CUFF.21842.0
  misc_feature: Variant of the nucleotide sequence at SEQ ID NO 9179
ttcgtcttcacagtctttacgattctttatctctcaccaagctttgtagcgactctatactcaacaaatgcattcggcggtacagacggcaccgaagagacacaaagaagattttggattacgtttggcagcgccactggcgttacttataccatcgcagcaataatactgtccactttcagctggaagaagtggtggcaaaagtttcaagagcttttcaagtgggacctatcgaaagccactgattcccaaatcgatgacgcggagggcgaaagcaaaggaactggactgtcgcttttcgaaactagcctggctcattttcttcgaaagcgcaagaatgagaccgacgccggcgaggagacgcctaaagcaagaagaagcggtcttgtttaacgaaggactgagtctgagtaagacgacgcgtttcttgtcgcctccttcgctatacctacgttgcactcctgggacttcc

SEQ ID NO: 9182 - DNA, 2187 bp, Muscodor strobelii
  misc_feature: SGI cDNA ID NO. 562859
  misc_feature: Reduced expression when VOC is produced
  misc_feature: Encodes the peptide sequence at SEQ ID NO 9183
atggctactcaacaagatgcggagccgtccgcaagcgccacctcgtcgagcgcggctgcgcccggagcatcgtccaccgccaaatcagaccactcctcctcatcctcgacacccagagacaaggccgatgcatccgccgatgccgacgagaccaccatccccattcgcgacaaggctgcatacgagaggatcgccatcgacagggccatacaacgcgaccaggtcaacgcggctgctctcatcctggccaaccagcgccagacggatcacaacaccgtcgcgtacaagaagataggcgactacaaatctcttcggacagatctgaggccctattttccacccgcgaagctgtacggcgaaggctacgccggctttggcaatgggaggacagacaacccccaggcaaggctggtctatccatcgcagaagcctcgacccaacaagcagcagacgatgcccctcaaatggaagcgcaaggacatgaaagcccaggccgaccagcacgaagagctcgtccccatacgactggatgtcgactacgataggatcaagctgcgcgacacctttacctggaacctgcatgagcgtattgttcagcccgacttatttgcctgccaactactcgaggatatgggtctcaagctgcccacgcatcaaccagtatttgacgaagcgagaagacaactatccgagcagttgaacgatttctatccattcgtattttccgacgaagatgcgctggatcccgaactgccctactctgcttggaagaacgacgagatgaggatattggtgaagctcaacatcaccatcggcgcgcacacactggtagatcagtttgagtgggagatcaataatcctctcaactcccctgaggacttcgctgccagcatgtcaaaggacctcgctctatctggtgaatttactacggctatcgctcattgcattcgagaacaaacgcagctattcacgaggagtctatacataattggtcatccttttgacggtagaccgatcgaagatcctgatcttgttgctgcattcctcccgtcgcccttgccaagcgtcttccgcccacaacagcaagccaaagagtacgcaccctacctatacgaactcaacgaggccgatctcgagagaaatgagcttgttttctcacgagaacagagacggcagaagcgatccatcaacagacgcggtggcccaaccctacctgatcttaaggagagacagcgaaccataagaacgcttgttgtctcatcgacattacccggtgccgcacttgatgtcgaagagagccgactgtacaaacgcgtggctggtgctccaggtaccggccgcggaagaggacgtggtgctcgcgatggcgatatatccgactctgacgagagtgatgactcatcaccagactcgccagccgcatcgcagttggcgggcacagcaaggacaagaggaatgcgcggcgcagcatctgctgctcagcagcgcatggccaacattggtcgatccgaaactcccgaggccatcatccatcatcacgagactagaacctcaagaagattcggtcgtgaactcacgcgcgaggcaactgaggagccacaacatttccatgtaacattgaaggtcccgaaggaaaagctgcggcaaattcttcaaggcaataaattgaagcgaagcgcaccagctggttccatgacgccgtctcaacctcctaaccgcgttcctccaacttccgcatccaatagcatgcctccaccctccactcctagcgcagcgacgcctactgcccctggtcgcgcccccaatggggtgccatcgggtcaaatcggtcgagtagacgccccggctccccagaccaggcgagcctctgccgactcctcgtggctcgtcagcgcactggaacagttcaagcaagaggacgcgtacaagcacgaccaattcgaagggctcatgcggtatagcgcggtggatactaacacgggagctccttatcaaatcccgcaagggccgcaaccggtgccggctcacgttcgattttacttcttgccccgcatacggtgtctcgactgtcccggcaagctgtatacgcctggtcctgatacgtccgcctctaacttcgaggtccatctcaagaataaggcgcacaaagaacgggtggaagcgcggcgagcaagcgaaaacaattag

SEQ ID NO: 9183 - protein, 728 aa, Muscodor strobelii
  misc_feature: SGI Peptide ID NO. 562859
  misc_feature (136)..(394): Pfam Id: PF04855 Pfam Desc: SNF5 / SMARCB1 / INI1
  misc_feature (7)..(728): NCBI GI: 46125153 Blast Desc: FG06954.1 [Gibberella zeae PH-1]
  misc_feature (19)..(719): NCBI GI: 256733162 Blast Desc: Snf5 subunit [Nectria haematococca mpVI 77-13-4]
  misc_feature (52)..(722): NCBI GI: 145608862 Blast Desc: MGG_06315 [Magnaporthe grisea 70-15] gi|145016288|gb|EDK00778.1| MGG_06315 [Magnaporthe grisea 70-15]
  misc_feature (41)..(710): NCBI GI: 261358243 Blast Desc: transcription regulatory protein SNF5 [Verticillium albo-atrum VaMs.102]
  misc_feature (1)..(724): NCBI GI: 171686524 Blast Desc: protein product [Podospora anserina] gi|170943223|emb|CAP68876.1| protein product [Podospora anserina]
  misc_feature (5)..(722): NCBI GI: 156033203 Blast Desc: SS1G_13677 [Sclerotinia sclerotiorum 1980] gi|154699080|gb|EDN98818.1| SS1G_13677 [Sclerotinia sclerotiorum 1980]
  misc_feature (33)..(722): NCBI GI: 116207930 Blast Desc: CHGG_03258 [Chaetomium globosum CBS 148.51] gi|88183855|gb|EAQ91323.1| CHGG_03258 [Chaetomium globosum CBS 148.51]
  misc_feature (4)..(726): NCBI GI: 154290941 Blast Desc: BC1G_15534 [Botryotinia fuckeliana B05.10] gi|150847170|gb|EDN22363.1| BC1G_15534 [Botryotinia fuckeliana B05.10]
  misc_feature (114)..(724): NCBI GI: 242817523 Blast Desc: SWI-SNF complex subunit (Snf5), [Talaromyces stipitatus ATCC 10500] gi|218713438|gb|EED12862.1| SWI-SNF complex subunit (Snf5), [Talaromyces stipitatus ATCC 10500]
  misc_feature (114)..(724): NCBI GI: 212530794 Blast Desc: SWI-SNF complex subunit (Snf5), [Penicillium marneffei ATCC 18224] gi|210074952|gb|EEA29039.1| SWI-SNF complex subunit (Snf5), [Penicillium marneffei ATCC 18224]
  misc_feature: Useful for introducing or modulating the production of volatile compounds
MATQQDAEPSASATSSSAAAPGASSTAKSDHSSSSSTPRDKADASADADETTIPIRDKAAYERIAIDRAIQRDQVNAAALILANQRQTDHNTVAYKKIGDYKSLRTDLRPYFPPAKLYGEGYAGFGNGRTDNPQARLVYPSQKPRPNKQQTMPLKWKRKDMKAQADQHEELVPIRLDVDYDRIKLRDTFTWNLHERIVQPDLFACQLLEDMGLKLPTHQPVFDEARRQLSEQLNDFYPFVFSDEDALDPELPYSAWKNDEMRILVKLNITIGAHTLVDQFEWEINNPLNSPEDFAASMSKDLALSGEFTTAIAHCIREQTQLFTRSLYIIGHPFDGRPIEDPDLVAAFLPSPLPSVFRPQQQAKEYAPYLYELNEADLERNELVFSREQRRQKRSINRRGGPTLPDLKERQRTIRTLVVSSTLPGAALDVEESRLYKRVAGAPGTGRGRGRGARDGDISDSDESDDSSPDSPAASQLAGTARTRGMRGAASAAQQRMANIGRSETPEAIIHHHETRTSRRFGRELTREATEEPQHFHVTLKVPKEKLRQILQGNKLKRSAPAGSMTPSQPPNRVPPTSASNSMPPPSTPSAATPTAPGRAPNGVPSGQIGRVDAPAPQTRRASADSSWLVSALEQFKQEDAYKHDQFEGLMRYSAVDTNTGAPYQIPQGPQPVPAHVRFYFLPRIRCLDCPGKLYTPGPDTSASNFEVHLKNKAHKERVEARRASENN

SEQ ID NO: 9184 - DNA, 2842 bp, Muscodor strobelii
  misc_feature: SGI EST ID NO. CUFF.22052.0
  misc_feature: Variant of the nucleotide sequence at SEQ ID NO 9182
tgaaaacaggagcggaagttgcgccaggatttgcaagtggctgacactcaacaccgaatgcgactgcccatcaccacatcgacgcttgcacacgacttcccgaattgcgatcatcaggtgacgcgtaccaactgtgcaacttcccgccatcgtgtccttttgatctcatctcattcagagctgaattgccatcacgatcgtgactgcttgcgaccgcacgaagatagtcgtccgcgcccagcgccggcatccatctacctattccctcatattcgacgacatataattccctccatgtccatataagactcatatctcatcatggctactcaacaagatgcggagccgtccgcaagcgccacctcgtcgagcgcggctgcgcccggagcatcgtccaccgccaaatcagaccactcctcctcatcctcgacacccagagacaaggccgatgcatccgccgatgccgacgagaccaccatccccattcgcgacaaggctgcatacgagaggatcgccatcgacagggccatacaacgcgaccaggtcaacgcggctgctctcatcctggccaaccagcgccagacggatcacaacaccgtcgcgtacaagaagataggcgactacaaatctcttcggacagatctgaggccctattttccacccgcgaagctgtacggcgaaggctacgccggctttggcaatgggaggacagacaacccccaggcaaggctggtctatccatcgcagaagcctcgacccaacaagcagcagacgatgcccctcaaatggaagcgcaaggacatgaaagcccaggccgaccagcacgaagagctcgtccccatacgactggatgtcgactacgataggatcaagctgcgcgacacctttacctggaacctgcatgagcgtattgttcagcccgacttatttgcctgccaactactcgaggatatgggtctcaagctgcccacgcatcaaccagtatttgacgaagcgagaagacaactatccgagcagttgaacgatttctatccattcgtattttccgacgaagatgcgctggatcccgaactgccctactctgcttggaagaacgacgagatgaggatattggtgaagctcaacatcaccatcggcgcgcacacactggtagatcagtttgagtgggagatcaataatcctctcaactcccctgaggacttcgctgccagcatgtcaaaggacctcgctctatctggtgaatttactacggctatcgctcattgcattcgagaacaaacgcagctattcacgaggagtctatacataattggtcatccttttgacggtagaccgatcgaagatcctgatcttgttgctgcattcctcccgtcgcccttgccaagcgtcttccgcccacaacagcaagccaaagagtacgcaccctacctatacgaactcaacgaggccgatctcgagagaaatgagcttgttttctcacgagaacagagacggcagaagcgatccatcaacagacgcggtggcccaaccctacctgatcttaaggagagacagcgaaccataagaacgcttgttgtctcatcgacattacccggtgccgcacttgatgtcgaagagagccgactgtacaaacgcgtggctggtgctccaggtaccggccgcggaagaggacgtggtgctcgcgatggcgatatatccgactctgacgagagtgatgactcatcaccagactcgccagccgcatcgcagttggcgggcacagcaaggacaagaggaatgcgcggcgcagcatctgctgctcagcagcgcatggccaacattggtcgatccgaaactcccgaggccatcatccatcatcacgagactagaacctcaagaagattcggtcgtgaactcacgcgcgaggcaactgaggagccacaacatttccatgtaacattgaaggtcccgaaggaaaagctgcggcaaattcttcaaggcaataaattgaagcgaagcgcaccagctggttccatgacgccgtctcaacctcctaaccgcgttcctccaacttccgcatccaatagcatgcctccaccctccactcctagcgcagcgacgcctactgcccctggtcgcgcccccaatggggtgccatcgggtcaaatcggtcgagtagacgccccggctccccagaccaggcgagcctctgccgactcctcctccacctccagcgtggctcgtcagcgcactggaacagttcaagcaagaggacgcgtacaagcacgaccaattcgaagggctcatgcggtatagcgcggtggatactaacacgggagctccttatcaaatcccgcaagggccgcaaccggtgccggctcacgttcgattttacttcttgccccgcatacggtgtctcgactgtcccggcaagctgtatacgcctggtcctgatacgtccgcctctaacttcgaggtccatctcaagaataaggcgcacaaagaacgggtggaagcgcggcgagcaagcgaaaacaattagcttgggatctataggaggtcaataggatactgacatacgggatatcggatggactggcgttgggttggaagtgtttgtttttactggtgtatatcattttgagaggcgcgtgtatttgagacagaaagcgctggagttcgttattaaaagattgggcaagggagctagttgtctctctgcagctagacagagcgatgggagactctagagtctagtttcagttgaactgggctgttttgtacatacactgaataccaatatcactggtctgtgtcttcggtagggattatgaataagcaatttgggtgttgtgagttcgcg

SEQ ID NO: 9185 - DNA, 1248 bp, Muscodor strobelii
  misc_feature: SGI cDNA ID NO. 562860
  misc_feature: Encodes the peptide sequence at SEQ ID NO 9186
atgtctgacgataaagctgcacccgttgactactcgctcaagaaccccgatgttctgaccaaatacaagacggccgccgcaattggcgagaaggtgctcgccgaggtcgccaagctctgtgtcgccggcgagaagatcgtcaccatctgccagaagggcgacaagctcatcgaggaggaggtcgccaaggtctaccgcaccaccaagctcaagggcttctcccatccaaccacggtctccccttcgtcctacgtcacaccttacacgcctctgaccaccgatgctgccgaggccaccctcgagctccaggctggcgagcccgtcaagatccaactcggcgcacagatcgatggctttggctccatagtatgcgacaccattatcgtccccgccaaggatggtgctgaggatgttgtcactggacgcaatgccgacctgatccttgccaattactatgcgaacgagctgctgctgcgcctgatgatacccccaggactcctcgccagcggcaccgacgaagagaaggctaaggccgccgccgtcaaggcccctacacagtccaagatcacctcccttctggacaaggtcgccaagagctacgagtgcagcctcgtcgagagcactacatcctggcttttcgagcgtaatgagatcgagggccccaagaagattgtcattgctccagccgagggcaccaagggcgagggtacacccgaggtcggtgaggtgtggggtgtcgagatgggtatgagtttgagctccggcaaggtcaagactctggatcagcgtgccaccttacatcgtcgcacgcaaaacacctatatcctcaagtcgcaaacagcccgcaagacgctgtcgacgatccagaacaagtttggacactttcccttcagcttgaggcagctcgaggaagagggcggcgacactaaatacaaggtcggtgtctttgacggtgtccgctctaacgtgttgcggcaatacgagttggtcggtgacaaggagggtgcacctgtggccagattattgactaccctggcgatcaccaagaacggtatcacgaagcttggtgctgctcctcctctggacgtcagcaagtaccagacggacaagaagatcaccgacgaggagatcctgaagatcttggagcagccgctggccaagaacaagggcaagagcaagaacaagaagaagaagaccaagaaggcggcggacggcaaggaggccgaggaggagggcgatgacgagtag

SEQ ID NO: 9186 - protein, 415 aa, Muscodor strobelii
  misc_feature: SGI Peptide ID NO. 562860
  misc_feature (20)..(297): Pfam Id: PF00557 Pfam Desc: metallopeptidase family M24
  misc_feature (20)..(119): Pfam Id: PF00557 Pfam Desc: metallopeptidase family M24
  misc_feature (8)..(390): NCBI GI: 171686526 Blast Desc: protein product [Podospora anserina] gi|170943224|emb|CAP68877.1| protein product [Podospora anserina]
  misc_feature (2)..(390): NCBI GI: 145608860 Blast Desc: MGG_06316 [Magnaporthe grisea 70-15] gi|145016287|gb|EDK00777.1| MGG_06316 [Magnaporthe grisea 70-15]
  misc_feature (1)..(390): NCBI GI: 256732714 Blast Desc: [Nectria haematococca mpVI 77-13-4]
  misc_feature (9)..(411): NCBI GI: 85081271 Blast Desc: NCU00422 [Neurospora crassa OR74A] gi|28917760|gb|EAA27450.1| NCU00422 [Neurospora crassa OR74A] gi|40882157|emb|CAF05984.1| related to 442K curved dna-binding
  misc_feature (9)..(407): NCBI GI: 46125155 Blast Desc: FG06955.1 [Gibberella zeae PH-1]
  misc_feature (9)..(390): NCBI GI: 116207932 Blast Desc: CHGG_03259 [Chaetomium globosum CBS 148.51] gi|88183856|gb|EAQ91324.1| CHGG_03259 [Chaetomium globosum CBS 148.51]
  misc_feature (1)..(390): NCBI GI: 145259014 Blast Desc: An04g08860 [Aspergillus niger] gi|134074861|emb|CAK38973.1| protein product [Aspergillus niger]
  misc_feature (1)..(385): NCBI GI: 154290943 Blast Desc: BC1G_15535 [Botryotinia fuckeliana B05.10] gi|150847171|gb|EDN22364.1| BC1G_15535 [Botryotinia fuckeliana B05.10]
  misc_feature (1)..(385): NCBI GI: 156033205 Blast Desc: SS1G_13678 [Sclerotinia sclerotiorum 1980] gi|154699081|gb|EDN98819.1| SS1G_13678 [Sclerotinia sclerotiorum 1980]
  misc_feature (1)..(390): NCBI GI: 119482241 Blast Desc: curved DNA-binding protein (42 kDa protein) [Neosartorya fischeri NRRL 181] gi|119409303|gb|EAW19252.1| curved DNA-binding protein (42 kDa protein) [Neosartorya fischeri
MSDDKAAPVDYSLKNPDVLTKYKTAAAIGEKVLAEVAKLCVAGEKIVTICQKGDKLIEEEVAKVYRTTKLKGFSHPTTVSPSSYVTPYTPLTTDAAEATLELQAGEPVKIQLGAQIDGFGSIVCDTIIVPAKDGAEDVVTGRNADLILANYYANELLLRLMIPPGLLASGTDEEKAKAAAVKAPTQSKITSLLDKVAKSYECSLVESTTSWLFERNEIEGPKKIVIAPAEGTKGEGTPEVGEVWGVEMGMSLSSGKVKTLDQRATLHRRTQNTYILKSQTARKTLSTIQNKFGHFPFSLRQLEEEGGDTKYKVGVFDGVRSNVLRQYELVGDKEGAPVARLLTTLAITKNGITKLGAAPPLDVSKYQTDKKITDEEILKILEQPLAKNKGKSKNKKKKTKKAADGKEAEEEGDDE

SEQ ID NO: 9187 - DNA, 3888 bp, Muscodor strobelii
  misc_feature: SGI EST ID NO. CUFF.22160.1
  misc_feature: Variant of the nucleotide sequence at SEQ ID NO 9185
aaacaccttcgatgatgcccaggaataactagaaacaagagctagccctgataaacaacaattatgaatcgaaaaaaaaaaaaaacattcgacttatattcatcgcaaacccctgcctgagtgttattttgtttgaacggcgggcgtcaggtctggttgaagttcatgtcttcatttctagggtaggtttcctgctctgtatgcgaagctgcatctgttgaaagatcgtgtctttgttcagggtacgatatttatatcctaagatgtactcttctgctagctgaaatatgagatgttgaatttcaatcaattttggatgttgttgatcgttgttctaagcacaacaagatttgaaaatgatgccagtaaatagattattatcatcaacacaacaggtaatgggaattctaatcaatatatgacttggttatctacaacttagaaaactgctctctgtcatttgtcaggcaaacagaatcttttactcatatctgctgctcggattttcaagctagactcttcgtttattggttcgtttcattcattcaaagtcctagttttaacagcattgagttcactctacacactattctggctacagcatggatatcatcaagtgtaagactgtattctcggcaagctttgcgctctgtggtctcatcatgagctatccaaaatcagacgaggaagtgttgagattcaaggagacatggaggtggtctgattgaatagctgctgcgaggcatatggatgtatgaatgaatgaatgtgcgtcattgccttatccggcgcatcttatccaccagcagactgatctagacacgggagagctttggtcgagctgcggaagttggaaagacgcgacctgaattgagcgaacgggctgcagaatgagtacggggtgacctcactacccctccataagcccacacaaagcccctcagcaaaacctcaaaatacccgcgtgcatcactctgagactcccgttctgctccatactgtcgaacggagaactctcgacagcttcgcattctctgtcctcctgtcccaattattttaactatacaggcattcgctcagtagaatcgtccaagatgtctgacgataaagctgcacccgttgactactcgctcaagaaccccgatgttctgaccaaatacaagacggccgccgcaattggcgagaaggtgctcgccgaggtcgccaagctctgtgtcgccggcgagaagatcgtcaccatctgccagaagggcgacaagctcatcgaggaggaggtcgccaaggtctaccgcaccaccaagctcaagggtaggtccccgtctcttgacaacgagtcattcgttcaccggcaagtcgcgcatagctaatgtcgcgtgtccgtgcaggcttctcccatccaaccacggtctccccttcgtcctacgtcacaccttacacgcctctgaccaccgatgctgccgaggccaccctcgagctccaggctggcgagcccgtcaagatccaactcggcgcacagatcgatggctttggctccatagtatgcgacaccattatcgtccccgccaaggatggtgctgaggatgttgtcactggacgcaatgccgacctgatccttgccaattactatgcgaacgagctgctgctgcgcctgatgatacccccaggactcctcgccagcggcaccgacgaagagaaggctaaggccgccgccgtcaaggcccctacacagtccaagatcacctcccttctggacaaggtcgccaagagctacgagtgcagcctcgtcgagagcactacatcctggcttttcgagcgtaatgagatcgagggccccaagaagattgtcattgctccagccgagggcaccaagggcgagggtacacccgaggtcggtgaggtgtggggtgtcgagatgggtatgagtttgagctccggcaaggtcaagactctggatcagcgtgccaccttacatcgtcgcacgcaaaacacctatatcctcaagtcgcaaacagcccgcaagacgctgtcgacgatccagaacaagtttggacactttcccttcagcttgaggcagctcgaggaagagggcggcgacactaaatacaaggtcggtgtctttgacggtgtccgctctaacgtgttgcggcaatacgagttggtcggtgacaaggagggtgcacctgtggccagattattgactaccctggcgatcaccaagaacggtatcacgaagcttggtgctgctcctcctctggacgtcagcaagtaccagacggacaagaagatcaccgacgaggagatcctgaagatcttggagcagccgctggccaagaacaagggcaagagcaagaacaagaagaagaagaccaagaaggcggcggacggcaaggaggccgaggaggagggcgatgacgagtagccgaccaacgaccaaaagcttgataagtgatggactatgtcggccatgtgttggtcgaggaagtcattatatcacgacatggagtatgctgatgactctcagaaggcttagtggtatggccatgagttggctttcactaagtatttttaatgtttacctgactgagacacacggtctggccgaggagagcctgagaggcttgctcaagagccctatcctgctctgtttacacgtccatgttcagatgaccggatatctgagccctgtgttagcatactcaacagaacaaaagaatgccgaaacgtgctcgaagcagccaaccaacagactcctctgttctcctttcgtggcacaccatgcaaatgctgattcgcacatgactaggctgatatgacgatccaggttttacagatgctaacacttactagacctgcgcaagggtgacattaaaaaggccggggcatacagaaattgcagattcgaggttctacaggacgaatgcttttttactaatgtttacattgccaccaacagagctacacagaaaaatgcagaaaacaaaggaatgggtactacgaggctggtggtacccaagatggggggcttggacagtggaggaaaagtgcagcaaaagggtcgaggcagtggacggcaacggcatgatctgtcaagtgattctcaggtgatttggcggagcaggaggcagagaggcatggcgtgatgcatccgccttatcagggttgcagcagacactgtattgccgaggaagatagcgtgaatgtgcaaaaaaagtacaacaacaccagtctgttcaagacgtgttgtggttttggagattcaggggggtttgaacaatttagttttgcgaatgaaaagttaccaaaacgatgagctcatgggatgtggtgtaccgtgcctcaagttgtctggggacggagctggagctatgtgtagcagacagttgcaaggtctggaacccgaattatcgcgactgctgcaactgctcccacctcggctgagggaatgaggtgagggaagagatacacagagataccagaagattcagtggacagtacaggggttttaatcaagttgcagacggtgtcgggcgatgggctagggcaggattgacagcgcggtggtagtggcagatagcggtagtggtagcccttgcctggtgcctttagccctgccagggtacagtgcggaatggtgcagcagtcacagtacacccaatttttggagacgcttcgtttggtacttctgcattccacaccctgaaccgcgtgtccgaagcccattgtgccaacagaccgcgaccaacacccggcattcaatcaatcatccatgtgcaacgtgtagagagcatctgcacgcgacgggaaccgatctgagcgaggccctcgacgtgttgccccaaggccaaaagggggtccggtctgtctggcgcccacaccctcacagacgaa

SEQ ID NO: 9188 - DNA, 1278 bp, Muscodor strobelii
  misc_feature: SGI cDNA ID NO. 562861
  misc_feature: Reduced expression when VOC is produced
  misc_feature: Encodes the peptide sequence at SEQ ID NO 9189
atgtctgacgataaagctgcacccgttggcactgactcgacaaactggctatgtatagactactcgctcaagaaccccgatgttctgaccaaatacaagacggccgccgcaattggcgagaaggtgctcgccgaggtcgccaagctctgtgtcgccggcgagaagatcgtcaccatctgccagaagggcgacaagctcatcgaggaggaggtcgccaaggtctaccgcaccaccaagctcaagggcttctcccatccaaccacggtctccccttcgtcctacgtcacaccttacacgcctctgaccaccgatgctgccgaggccaccctcgagctccaggctggcgagcccgtcaagatccaactcggcgcacagatcgatggctttggctccatagtatgcgacaccattatcgtccccgccaaggatggtgctgaggatgttgtcactggacgcaatgccgacctgatccttgccaattactatgcgaacgagctgctgctgcgcctgatgatacccccaggactcctcgccagcggcaccgacgaagagaaggctaaggccgccgccgtcaaggcccctacacagtccaagatcacctcccttctggacaaggtcgccaagagctacgagtgcagcctcgtcgagagcactacatcctggcttttcgagcgtaatgagatcgagggccccaagaagattgtcattgctccagccgagggcaccaagggcgagggtacacccgaggtcggtgaggtgtggggtgtcgagatgggtatgagtttgagctccggcaaggtcaagactctggatcagcgtgccaccttacatcgtcgcacgcaaaacacctatatcctcaagtcgcaaacagcccgcaagacgctgtcgacgatccagaacaagtttggacactttcccttcagcttgaggcagctcgaggaagagggcggcgacactaaatacaaggtcggtgtctttgacggtgtccgctctaacgtgttgcggcaatacgagttggtcggtgacaaggagggtgcacctgtggccagattattgactaccctggcgatcaccaagaacggtatcacgaagcttggtgctgctcctcctctggacgtcagcaagtaccagacggacaagaagatcaccgacgaggagatcctgaagatcttggagcagccgctggccaagaacaagggcaagagcaagaacaagaagaagaagaccaagaaggcggcggacggcaaggaggccgaggaggagggcgatgacgagtag

SEQ ID NO: 9189 - protein, 425 aa, Muscodor strobelii
  misc_feature: SGI Peptide ID NO. 562861
  misc_feature (30)..(307): Pfam Id: PF00557 Pfam Desc: metallopeptidase family M24
  misc_feature (30)..(129): Pfam Id: PF00557 Pfam Desc: metallopeptidase family M24
  misc_feature (19)..(400): NCBI GI: 145608860 Blast Desc: MGG_06316 [Magnaporthe grisea 70-15] gi|145016287|gb|EDK00777.1| MGG_06316 [Magnaporthe grisea 70-15]
  misc_feature (19)..(400): NCBI GI: 171686526 Blast Desc: protein product [Podospora anserina] gi|170943224|emb|CAP68877.1| protein product [Podospora anserina]
  misc_feature (19)..(400): NCBI GI: 256732714 Blast Desc: [Nectria haematococca mpVI 77-13-4]
  misc_feature (19)..(421): NCBI GI: 85081271 Blast Desc: NCU00422 [Neurospora crassa OR74A] gi|28917760|gb|EAA27450.1| NCU00422 [Neurospora crassa OR74A] gi|40882157|emb|CAF05984.1| related to 442K curved dna-binding
  misc_feature (19)..(417): NCBI GI: 46125155 Blast Desc: FG06955.1 [Gibberella zeae PH-1]
  misc_feature (19)..(400): NCBI GI: 116207932 Blast Desc: CHGG_03259 [Chaetomium globosum CBS 148.51] gi|88183856|gb|EAQ91324.1| CHGG_03259 [Chaetomium globosum CBS 148.51]
  misc_feature (19)..(395): NCBI GI: 156033205 Blast Desc: SS1G_13678 [Sclerotinia sclerotiorum 1980] gi|154699081|gb|EDN98819.1| SS1G_13678 [Sclerotinia sclerotiorum 1980]
  misc_feature (19)..(395): NCBI GI: 154290943 Blast Desc: BC1G_15535 [Botryotinia fuckeliana B05.10] gi|150847171|gb|EDN22364.1| BC1G_15535 [Botryotinia fuckeliana B05.10]
  misc_feature (19)..(400): NCBI GI: 145259014 Blast Desc: An04g08860 [Aspergillus niger] gi|134074861|emb|CAK38973.1| protein product [Aspergillus niger]
  misc_feature (19)..(400): NCBI GI: 261200455 Blast Desc: curved DNA-binding protein [Ajellomyces dermatitidis SLH14081] gi|239593700|gb|EEQ76281.1| curved DNA-binding protein [Ajellomyces dermatitidis SLH14081] gi|239607423|gb|EEQ84410.1|
  misc_feature: Useful for introducing or modulating the production of volatile compounds
MSDDKAAPVGTDSTNWLCIDYSLKNPDVLTKYKTAAAIGEKVLAEVAKLCVAGEKIVTICQKGDKLIEEEVAKVYRTTKLKGFSHPTTVSPSSYVTPYTPLTTDAAEATLELQAGEPVKIQLGAQIDGFGSIVCDTIIVPAKDGAEDVVTGRNADLILANYYANELLLRLMIPPGLLASGTDEEKAKAAAVKAPTQSKITSLLDKVAKSYECSLVESTTSWLFERNEIEGPKKIVIAPAEGTKGEGTPEVGEVWGVEMGMSLSSGKVKTLDQRATLHRRTQNTYILKSQTARKTLSTIQNKFGHFPFSLRQLEEEGGDTKYKVGVFDGVRSNVLRQYELVGDKEGAPVARLLTTLAITKNGITKLGAAPPLDVSKYQTDKKITDEEILKILEQPLAKNKGKSKNKKKKTKKAADGKEAEEEGDDE

SEQ ID NO: 9190 - DNA, 3888 bp, Muscodor strobelii; identical to SEQ ID NO: 9187
  misc_feature: SGI EST ID NO. CUFF.22160.1
  misc_feature: Variant of the nucleotide sequence at SEQ ID NO 9188

SEQ ID NO: 9191 - DNA, 717 bp, Muscodor strobelii
  misc_feature: SGI cDNA ID NO. 562862
  misc_feature: Elevated expression when VOC is produced
  misc_feature: Encodes the peptide sequence at SEQ ID NO 9192
atggcgtcacgaccctccgtcgactccgtgcccgacacagcacctctcttgtcaggtgacaccaaacccccaactcctccattcaccctccaccgcgtccctcctcaagtcgaaacacacttcgacatcccaccgccatccaaagagcttagagtcttgaccctaatcggcgtagtccgtatcttagcccttaccttcgggctcgtggctgctatcaagatatcggcacactcgcactaccacgagctttctatcatctgtgaagtgttcacttggctcggagtagcgtggaacgccttccagattctttctactcggttgcataaaactagtgcattcaagatcagtgttgtactgggaagcgggaagactgttcttttcggcggaggcgatggagaagatgatggcgacgagggacgaccctgctgtttcggattgttcacagtacccgtatgggatttggctttgggaattacgcttctcaccataaacattgttgctaatgttctcgagagacattatcactcatggtgggacgggagtgcaggcatcgctatcagcgtgatggggtatttcactgctgtgtggcagttgatcatggctgttctggctctctccccttcgctgaggaaggctcatatcaggttcgagaagctggaactccgtcctagttatgctattcgcctaccacgggactccgtcgacggccaggcttga

SEQ ID NO: 9192 - protein, 238 aa, Muscodor strobelii
  misc_feature: SGI Peptide ID NO. 562862
  misc_feature: Useful for introducing or modulating the production of volatile compounds
MASRPSVDSVPDTAPLLSGDTKPPTPPFTLHRVPPQVETHFDIPPPSKELRVLTLIGVVRILALTFGLVAAIKISAHSHYHELSIICEVFTWLGVAWNAFQILSTRLHKTSAFKISVVLGSGKTVLFGGGDGEDDGDEGRPCCFGLFTVPVWDLALGITLLTINIVANVLERHYHSWWDGSAGIAISVMGYFTAVWQLIMAVLALSPSLRKAHIRFEKLELRPSYAIRLPRDSVDGQA

SEQ ID NO: 9193 - DNA, 1333 bp, Muscodor strobelii
  misc_feature: SGI EST ID NO. CUFF.21865.0
  misc_feature: Variant of the nucleotide sequence at SEQ ID NO 9191
cgggaatgcgtagatgatcaggtagttgtttgttagagtatgaagcggaaacaggtcactctcagccgctctcctctcttctccgtgtaagtcgagttggatatatagcattctacctcccatcgcttttacatctcatcatacaattccagagctcaccattagtcctccatctcgttcagtgtcttatcttcacattatcatcaatatcgtaaatgatcatggcgtcacgaccctccgtcgactccgtgcccgacacagcacctctcttgtcaggtgacaccaaacccccaactcctccattcaccctccaccgcgtccctcctcaagtcgaaacacacttcgacatcccaccgccatccaaagagcttagagtcttgaccctaatcggcgtagtccgtatcttagcccttaccttcgggctcgtggctgctatcaagatatcggcacactcgcactaccacgagctttctatcatctgtgaagtgttcacttggctcggagtagcgtggaacgccttccagattctttctactcggttgcataaaactagtgcattcaagatcagtgttgtactgggaagcgggaagactgttcttttcggcggaggcgatggagaagatgatggcgacgagggacgaccctgctgtttcggattgttcacagtacccgtatgggatttggctttgggaattacgcttctcaccataaacattgttgctaatgttctcgagagacattatcactcatggtgggacgggagtgcaggcatcgctatcagcgtgatggggtatttcactgctgtgtggcagttgatcatggctgttctggctctctccccttcgctgaggaaggctcatatcaggttcgagaagctggaactccgtcctagttatgctattcgcctaccacgggactccgtcgacggccaggcttgatccatatgctattgtatagttgaagcattaagagagtgtgcacagagatgctggaaatggggtctcgattgtttcacgatgagtcgggtacgaggttttggtacatggtagtttctcgttcatgcgcgccatgccgcatgggtttaagacgactggtgactgatgtgaagttttgctgtcttatggattaccaagcagtacaatataattaaactagaacaaggatgtttcgctgctggcttatagcaataggatttagcagagttgacgatctaaatatttcttttcggttcctatcacgacgcagcctgatcacggctagtgcacgttgtcaatatcgttatccatttaaggtagaaattctctgctgtcatatgcaacccttcgatccctcg

SEQ ID NO: 9194 - DNA, 2376 bp, Muscodor strobelii
  misc_feature: SGI cDNA ID NO. 562863
  misc_feature: Elevated expression when VOC is produced
  misc_feature: Encodes the peptide sequence at SEQ ID NO 9195
atgtctgggtctgattctcctaacgacatacaacttaacgttgacgaaattaaagaatggaggtcgatcgtaactctcatcgtctttgttggggccaatattattgttctctttccgttccacataccgattccagttccatacgtgctatggaaagctgtaaagaaatgtctaggaagcttgcgcataacagcttggagtcccgattatgacgttcctgagaagaggcgcagttggaggagactctcgaaatctcagttggctcaacacgagaatgggattgtgccaaacccaaagaccccaattggaaactgggtgtggttccagttcaagattgacttcgtcacggggcccctcattgctgacctcttcttactcgcaatcggtgctatcggcaaagatgaagtggtagccggaattgctggaaaggacaacatcgtgccctacgacatcctcctctttttcttctcgcttgcctacattgcgatatccatcgacgcctcgggcctcatcagatatgcggcatttaaggttttgcaatggggaggcaaagtaggacatcgtctgttcttcttcctctatgtcttctttttcctcctgggaagcttcatcggaaacgatcctatcattctatccggcactgctttcctcgcctacatgacccgtgtctctagtaacattgtgcatcctcgtgcatggatacacactcaattcgctgttgccaatatagcgtcggctattctagtgtcgtctaacccgaccaatctcgttctagccggcgcattcaagattacgtttattgactataccaaagacatgattgtgcctgtcgttatcaccggtcttctactatttcccttcctactctattttgtttttgcggacgagaaactcatccccaacactatcacaatgcacgatctgtcggaagatcagaaaaaggagaagcctgtcaatccccacattccttttgcgagaggatctgctgccgaggaggaaaagaaattagcagacacagcagaagggaacctgttatctctcgtggagatcatgaatcctttccttgataaacctggtgcagttgtcggtggcactataatcaccgccgctctcgtctcgattcttgtcatcaacgcaaactctggtataggcggcaaagagacaccggttttttatattacgttaccagctgcaacaattatgctaatctttgatattgcttggggctggatcaatcgccacgaaacgcggaaaatttctcgcgccgggagaaggcaaattgaggaggaaaaaagccgagttgccgcccaaaagaatgcggaagcaggagttcttgggacaagcacggaatcacccgaagtagacgattccgatgcgcaggatgagaaaactcacaggcccgggagcttcaccgctcagacgagtgatgaggagaagacagagggtgttaaagtgcgccaagacgacgtcgccgacaggtcatcgacctcagaagctgggcatcaacaaggcgtggaggcgtcctcgccacatgattcatctgtagctatgctaatgcccaaggaggggccagagcctgtgtcaaggacacctgagcagacggggagactgtcaccaaatcaggaaatagcgcctgcgtctcctcaaaatagagcggacacacagaacacccagataacccaaactacccagaacacagtatcgacgcaagggctagaagaggaaaagcgaaaggctcaggaacaaaccgtatcgaccagcacagagaagagaggggaaaggaggacaaataatcaacagagaacgctggtgtcggtaattacatatgcttaccggtggtcgcaagagacatttcccacggttgttgccgtattggcccatcttcctttcgccttgctcccattctcgttcgagatgtttatccttgtgcaagggttgagcactaagggatgggtacccgtctttgcgtacggttgggatcactggatcgacaagactggcactgtcggtgcagttggcggcatgggtttcctgtcagttatattatgcaacttcgctggtaccaacattggtactacaattctactgtcccgcgttatacaagcgtggaatcaaattcatctcaacgccggaaccgcgattctgccccgaacaaagtgggcaactatatacgccatggcgctcggtgtgaactatggcgccttcagtgttgcgttcagtgcttctcttgctggtctactctggagggacatcttaagccgaaaacacatccatgtcggcagactcgaatttgcgcgcattaatctacccataattgctgtcgcgatggtaattggctcagctgtattggtcggcgaggtgtaccttttcaaatga

SEQ ID NO: 9195 - protein, 791 aa, Muscodor strobelii
  misc_feature: SGI Peptide ID NO. 562863
  misc_feature (11)..(791): NCBI GI: 255949816 Blast Desc: Pc22g17650 [Penicillium chrysogenum Wisconsin 54-1255] gi|211592692|emb|CAP99053.1| Pc22g17650 [Penicillium chrysogenum Wisconsin 54-1255]
  misc_feature (11)..(791): NCBI GI: 121716044 Blast Desc: arsenite efflux transporter ArsB-like, puative [Aspergillus clavatus NRRL 1] gi|119403788|gb|EAW14205.1| arsenite efflux transporter ArsB-like, puative [Aspergillus NRRL
  misc_feature (11)..(791): NCBI GI: 119481891 Blast Desc: arsenite efflux transporter ArsB-like, puative [Neosartorya fischeri NRRL 181] gi|119409128|gb|EAW19077.1| arsenite efflux transporter ArsB-like, puative [Neosartorya NRRL
  misc_feature (11)..(791): NCBI GI: 146323028 Blast Desc: arsenite efflux transporter ArsB-like, puative [Aspergillus fumigatus Af293] gi|129558580|gb|EAL93805.2| arsenite efflux transporter ArsB-like, puative [Aspergillus
  misc_feature (1)..(791): NCBI GI: 225684611 Blast Desc: conserved [Paracoccidioides brasiliensis Pb03]
  misc_feature (1)..(779): NCBI GI: 226286855 Blast Desc: conserved [Paracoccidioides brasiliensis Pb18]
  misc_feature (112)..(791): NCBI GI: 156057749 Blast Desc: SS1G_04606 [Sclerotinia sclerotiorum 1980] gi|154702391|gb|EDO02130.1| SS1G_04606 [Sclerotinia sclerotiorum 1980]
  misc_feature (32)..(791): NCBI GI: 226280184 Blast Desc: conserved [Paracoccidioides brasiliensis Pb01]
  misc_feature (12)..(791): NCBI GI: 225563401 Blast Desc: conserved [Ajellomyces capsulatus G186AR]
  misc_feature (12)..(791): NCBI GI: 240107517 Blast Desc: CPC735_041400 [Coccidioides posadasii C735 delta SOWgp]
  misc_feature: Useful for introducing or modulating the production of volatile compounds
MSGSDSPNDIQLNVDEIKEWRSIVTLIVFVGANIIVLFPFHIPIPVPYVLWKAVKKCLGSLRITAWSPDYDVPEKRRSWRRLSKSQLAQHENGIVPNPKTPIGNWVWFQFKIDFVTGPLIADLFLLAIGAIGKDEVVAGIAGKDNIVPYDILLFFFSLAYIAISIDASGLIRYAAFKVLQWGGKVGHRLFFFLYVFFFLLGSFIGNDPIILSGTAFLAYMTRVSSNIVHPRAWIHTQFAVANIASAILVSSNPTNLVLAGAFKITFIDYTKDMIVPVVITGLLLFPFLLYFVFADEKLIPNTITMHDLSEDQKKEKPVNPHIPFARGSAAEEEKKLADTAEGNLLSLVEIMNPFLDKPGAVVGGTIITAALVSILVINANSGIGGKETPVFYITLPAATIMLIFDIAWGWINRHETRKISRAGRRQIEEEKSRVAAQKNAEAGVLGTSTESPEVDDSDAQDEKTHRPGSFTAQTSDEEKTEGVKVRQDDVADRSSTSEAGHQQGVEASSPHDSSVAMLMPKEGPEPVSRTPEQTGRLSPNQEIAPASPQNRADTQNTQITQTTQNTVSTQGLEEEKRKAQEQTVSTSTEKRGERRTNNQQRTLVSVITYAYRWSQETFPTVVAVLAHLPFALLPFSFEMFILVQGLSTKGWVPVFAYGWDHWIDKTGTVGAVGGMGFLSVILCNFAGTNIGTTILLSRVIQAWNQIHLNAGTAILPRTKWATIYAMALGVNYGAFSVAFSASLAGLLWRDILSRKHIHVGRLEFARINLPIIAVAMVIGSAVLVGEVYLFK

SEQ ID NO: 9196 - DNA, 3453 bp, Muscodor strobelii
  misc_feature: SGI EST ID NO. CUFF.21875.0
  misc_feature: Variant of the nucleotide sequence at SEQ ID NO 9194
tttctcccgcgatacgatcaaggctttcgttccttggcacattcttgaatcgtcagaaaatccaatgctctcattccttgtcagctggcacgcctctattccccgcaacaacattggacaaccatctgtccattcagtcatggctagcctgtcttgatagacttgcccagaagatctacaaacttggcggaggtgccgacttgcacattacagcgccacaagctatccattcaagaggctcatcaacgagatatctgctgaagtcatacctgcagagttcaacatcaaaatttgacaactcagcctcgtgctagtgcccattatatactctgatcattgtcgtgaggacagtcgcgatcctgcctgaggctccagagcagtaaagcacggactcgaaatgtcgtaggctcgtcgaggttttctcaggtaatttaattgagccgcccaacggacttggacccctgagacatcgctcacttctacatgcctactatgtctgggtctgattctcctaacgacatacaacttaacgttgacgaaattaaagaatggaggtcgatcgtaactctcatcgtctttgttggggccaatattattgttctctttccgttccacataccgattccagttccatacgtgctatggaaagctgtaaagaaatgtctaggaagcttgcgcataacagcttggagtcccgattatgacgttcctgagaagaggcgcagttggaggagactctcgaaatctcagttggctcaacacgagaatgggattgtgccaaacccaaagaccccaattggaaactgggtgtggttccagttcaagattgacttcgtcacggggcccctcattgctgacctcttcttactcgcaatcggtgctatcggcaaagatgaagtggtagccggaattgctggaaaggacaacatcgtgccctacgacatcctcctctttttcttctcgcttgcctacattgcgatatccatcgacgcctcgggcctcatcagatatgcggcatttaaggttttgcaatggggaggcaaagtaggacatcgtctgttcttcttcctctatgtcttctttttcctcctgggaagcttcatcggaaacgatcctatcattctatccggcactgctttcctcgcctacatgacccgtgtctctagtaacattgtgcatcctcgtgcatggatacacactcaattcgctgttgccaatatagcgtcggctattctagtgtcgtctaacccgaccaatctcgttctagccggcgcattcaagattacgtttattgactataccaaagacatgattgtgcctgtcgttatcaccggtcttctactatttcccttcctactctattttgtttttgcggacgagaaactcatccccaacactatcacaatgcacgatctgtcggaagatcagaaaaaggagaagcctgtcaatccccacattccttttgcgagaggatctgctgccgaggaggaaaagaaattagcagacacagcagaagggaacctgttatctctcgtggagatcatgaatcctttccttgataaacctggtgcagttgtcggtggcactataatcaccgccgctctcgtctcgattcttgtcatcaacgcaaactctggtataggcggcaaagagacaccggttttttatattacgttaccagctgcaacaattatgctaatctttgatattgcttggggctggatcaatcgccacgaaacgcggaaaatttctcgcgccgggagaaggcaaattgaggaggaaaaaagccgagttgccgcccaaaagaatgcggaagcaggagttcttgggacaagcacggaatcacccgaagtagacgattccgatgcgcaggatgagaaaactcacaggcccgggagcttcaccgctcagacgagtgatgaggagaagacagagggtgttaaagtgcgccaagacgacgtcgccgacaggtcatcgacctcagaagctgggcatcaacaaggcgtggaggcgtcctcgccacatgattcatctgtagctatgctaatgcccaaggaggggccagagcctgtgtcaaggacacctgagcagacggggagactgtcaccaaatcaggaaatagcgcctgcgtctcctcaaaatagagcggacacacagaacacccagataacccaaactacccagaacacagtatcgacgcaagggctagaagaggaaaagcgaaaggctcaggaacaaaccgtatcgaccagcacagagaagagaggggaaaggaggacaaataatcaacagagaacgctggtgtcggtaattacatatgcttaccggtggtcgcaagagacatttcccacggttgttgccgtattggcccatcttcctttcgccttgctcccattctcgttcgagatgtttatccttgtgcaagggttgagcactaagggatgggtacccgtctttgcgtacggttgggatcactggatcgacaagactggcactgtcggtgcagttggcggcatgggtttcctgtcagttatattatgcaacttcgctggtaccaacattggtactacaattctactgtcccgcgttatacaagcgtggaatcaaattcatctcaacgccggaaccgcgattctgccccgaacaaagtgggcaactatatacgccatggcgctcggtgtgaactatggcgccttcagtgttgcgttcagtgcttctcttgctggtctactctggagggacatcttaagccgaaaacacatccatgtcggcagactcgaatttgcgcgcattaatctacccataattgctgtcgcgatggtaattggctcagctgtattggtcggcgaggtgtaccttttcaaatgatgaatcacgacgtttttttaataccatatcttcatagacttaggagcaagatccatctataccgaagaagctttgtgcttgctctactcccccttacgttacaaaaactggaacccaatcagattcaaagttctcagaacaacacggatgtgctgactctgacctattttgtactcttaaccatagggcctattctgctacatcggtgtgtggcagtcggaggccatgcgggtggcgtcaacaatgtcagagcgcaattgagtgctcggcgtttaggacatcacatgctgcaaaagactatcaaggtaaatagagggccaattcaagaaacactcaagtataggatgtctaagccaaacgaaatatactatgctaccagacaatattttacactgatttctatgcatgtaagcttagtgactaggcagcttgaacccaacaggacagccgtgttgaaacatcccatcgaggtcgaaccttttcccaattgcaataagcttagctacactctcgttgccgtagctattgatgacattatcatggcctagggcatagttggcgaagatgaagcgatggagtagtccc

SEQ ID NO: 9197 - DNA, 1305 bp, Muscodor strobelii
  misc_feature: SGI cDNA ID NO. 562864
  misc_feature: Elevated expression when VOC is produced
  misc_feature: Encodes the peptide sequence at SEQ ID NO 9198
atgactcctcatcccatcaattcacttctattcgaccaaactgcaactgcccacgcttcgaacgctaccaccgctccagtagctcacgtagtctgcgcgtggcccgtatccggacaatacggctttggtacgagattgttatattactttttagtggcagcgtgtgtttgggcgagaaacaaagaatggattcgagacgcgtgtctcgcggccgctttgctcctaccagcagtagcggccatacatgccattgttctagcatcattgcatgttgataatgctgttgatcttgacatctacggggcgttccagatctgctcaattggcattctagctgctccaatcaccgttggactgtctgatacgtatttcaaaagctctaggcgcaatcttatcttcttatggacgagcctcgtgctcgccgggatgctgagtcttacggtcgaattttttcgcagccatacacacccatgcagcgttgacaatgacgggaatcaaatcgatcctttcaacgccgcaatattcccatacgaaaatgcgaactgcagtctgaattgtatagagggcaatggtggtccacgttcccctcttcgtttcagcggcacaagcgacatttacgtgctcccagccccaaggatcctaacctttggtgcgaccactcttctcgctgctgggagctcgatacctcccattttgacactgatcttcacgtgggaaaaggtccgcaagagcaactggaagaaggagcacatgaaccaggagcttgaggggaccaatggagcaacattggccatcatggggcgcatcgacaatactgtcgactttttcaagaaagttgtgctaacgtcgcttttcactggaatagtaattgtacttctggtgcttggggaagtcaatttctggagcgatcagatgacttatcggactgagccttttgctagtgttggacaatggtcaaatgtcgtcgccacttttctcctaatcgcatcgacgctctacattaaagagtttagtgagccgatcgaacaaggtagagagaaccctccgggccgtagcccgtcccgcagcagcgccgaagaccaaagaagcgaccgcaccacatccaggactaccacaagacgccccaacagagctatgaatggggatgtagaatacctcgaccatagagccagcgatgttccagccgacgatctcgaaggagaacacatcacattcagtggccacgcaatacacgagactgggcaaccagatgaaaatcataacatgaccgaatccaaaggcacacaccgggactgccgttgctag

SEQ ID NO: 9198 - protein, 434 aa, Muscodor strobelii
  misc_feature: SGI Peptide ID NO. 562864
  misc_feature (24)..(347): NCBI GI: 156061421 Blast Desc: SS1G_02854 [Sclerotinia sclerotiorum 1980] gi|154700257|gb|EDN99995.1| SS1G_02854 [Sclerotinia sclerotiorum 1980]
  misc_feature (21)..(379): NCBI GI: 154282051 Blast Desc: conserved [Ajellomyces capsulatus NAm1] gi|150412017|gb|EDN07405.1| conserved [Ajellomyces capsulatus NAm1]
  misc_feature (1)..(375): NCBI GI: 255949814 Blast Desc: Pc22g17640 [Penicillium chrysogenum Wisconsin 54-1255] gi|211592691|emb|CAP99052.1| Pc22g17640 [Penicillium chrysogenum Wisconsin 54-1255]
  misc_feature (21)..(334): NCBI GI: 240276000 Blast Desc: conserved [Ajellomyces capsulatus H143]
  misc_feature (6)..(382): NCBI GI: 189197033 Blast Desc: conserved [Pyrenophora tritici-repentis Pt-1C-BFP] gi|187980802|gb|EDU47428.1| conserved [Pyrenophora tritici-repentis Pt-1C-BFP]
  misc_feature (29)..(334): NCBI GI: 119481893 Blast Desc: NFIA_090360 [Neosartorya fischeri NRRL 181] gi|119409129|gb|EAW19078.1| NFIA_090360 [Neosartorya fischeri NRRL 181]
  misc_feature (27)..(334): NCBI GI: 146323030 Blast Desc: conserved [Aspergillus fumigatus Af293] gi|129558581|gb|EAL93806.2| conserved [Aspergillus fumigatus Af293] gi|159129901|gb|EDP55015.1| conserved [Aspergillus A1163]
  misc_feature (29)..(376): NCBI GI: 121716042 Blast Desc: conserved [Aspergillus clavatus NRRL 1] gi|119403787|gb|EAW14204.1| conserved [Aspergillus clavatus NRRL 1]
  misc_feature (19)..(334): NCBI GI: 169616748 Blast Desc: SNOG_11549 [Phaeosphaeria nodorum SN15] gi|111060137|gb|EAT81257.1| SNOG_11549 [Phaeosphaeria nodorum SN15]
  misc_feature (48)..(346): NCBI GI: 154313825 Blast Desc: BC1G_05762 [Botryotinia fuckeliana B05.10] gi|150849344|gb|EDN24537.1| BC1G_05762 [Botryotinia fuckeliana B05.10]
  misc_feature: Useful for introducing or modulating the production of volatile compounds
MTPHPINSLLFDQTATAHASNATTAPVAHVVCAWPVSGQYGFGTRLLYYFLVAACVWARNKEWIRDACLAAALLLPAVAAIHAIVLASLHVDNAVDLDIYGAFQICSIGILAAPITVGLSDTYFKSSRRNLIFLWTSLVLAGMLSLTVEFFRSHTHPCSVDNDGNQIDPFNAAIFPYENANCSLNCIEGNGGPRSPLRFSGTSDIYVLPAPRILTFGATTLLAAGSSIPPILTLIFTWEKVRKSNWKKEHMNQELEGTNGATLAIMGRIDNTVDFFKKVVLTSLFTGIVIVLLVLGEVNFWSDQMTYRTEPFASVGQWSNVVATFLLIASTLYIKEFSEPIEQGRENPPGRSPSRSSAEDQRSDRTTSRTTTRRPNRAMNGDVEYLDHRASDVPADDLEGEHITFSGHAIHETGQPDENHNMTESKGTHRDCRC

SEQ ID NO: 9199 - DNA, 4337 bp, Muscodor strobelii
  misc_feature: SGI EST ID NO. CUFF.21907.0
  misc_feature: Variant of the nucleotide sequence at SEQ ID NO 9197
gatgccaaggttgtaggacgtattgtgatcgatcgttgcggcgtagcctcactcttcctttctcatcttccacagtaaccagacacctgatcccgctcagaatgaggctctggaaatctgcatttccttcaaaatcacttgtactcgctcggccatactctccccttgtttcttccttttctatctcgaggctcggtatgcaacccgaaccacttcaaatgactaaagaagcccacatcgagagctgagagccctgtctgcatgccactgccgcatgctttacgtatagttaaattgagctgcttgcgcgcttgtcgttacagcctccagctccgcattcttgcttctcttaatctgacctgatctgcctcgcgccgtctacctgtttcacagcccgccctgtctgccttcatgactcctcatcccatcaattcacttctattcgaccaaactgcaactgcccacgcttcgaacgctaccaccgctccagtagctcacgtagtctgcgcgtggcccgtatccggacaatacggctttggtacgagattgttatattactttttagtggcagcgtgtgtttgggcgagaaacaaagaatggattcgagacgcgtgtctcgcggccgctttgctcctaccagcagtagcggccatacatgccattgttctagcatcattgcatgttgataatgctgttgatcttgacatctacggggcgttccagatctgctcaattggcattctagctgctccaatcaccgttggactgtctgatacgtatttcaaaagctctaggcgcaatcttatcttcttatggacgagcctcgtgctcgccgggatgctgagtcttacggtcgaattttttcgcagccatacacacccatgcagcgttgacaatgacgggaatcaaatcgatcctttcaacgccgcaatattcccatacgaaaatgcgaactgcagtctgaattgtatagagggcaatggtggtccacgttcccctcttcgtttcagcggcacaagcgacatttacgtgctcccagccccaaggatcctaacctttggtgcgaccactcttctcgctgctgggagctcgatacctcccattttgacactgatcttcacgtgggaaaaggtccgcaagagcaactggaagaaggagcacatgaaccaggagcttgaggggaccaatggagcaacattggccatcatggggcgcatcgacaatactgtcgactttttcaagaaagttgtgctaacgtcgcttttcactggaatagtaattgtacttctggtgcttggggaagtcaatttctggagcgatcagatgacttatcggactgagccttttgctagtgttggacaatggtcaaatgtcgtcgccacttttctcctaatcgcatcgacgctctacattaaagagtttagtgagccgatcgaacaaggtagagagaaccctccgggccgtagcccgtcccgcagcagcgccgaagaccaaagaagcgaccgcaccacatccaggactaccacaagacgccccaacagagctatgaatggggatgtagaatacctcgaccatagagccagcgatgttccagccgacgatctcgaaggagaacacatcacattcagtggccacgcaatacacgagactgggcaaccagatgaaaatcataacatgaccgaatccaaaggcacacaccgggactgccgttgctagttggttgaacaagattggtgactatatcgggacgccaaaaccaagtcgatatgacgattccagattctggcaaggtgaagtcagaaggtttcctaacgttcctggcgaattccagcgaaacgcgaacttccaagtgatctcgcgaagttttagtgttcatcgacagctcgacgaggaccagcgcagcatcgcggaaggtatatctagagtaaatagcatgacttcgatgcattattccgaaagtagcactcccaggggtccaagaccgtccatctccccgcctcgaatttcccgctcgtctcggtcaagtacaatgcctgtccgagaggggaacccgagctcagctacgctcaacagagttaccacgtcgcctgcttctccgactatgcgagagagaagagacacgcttgacgtaccaaaccgacctgctgcgcttcaattgcgacatcatcgaggaagctctttgtctgagagtcagccccctactatcatactccaaggacaaggctcgcccacaagccctgccattgtgctgtccaccgagccagatgacgatgactctgacgaaactcctacaaggcccgcgccaacactttcactcccaccatgagtataacgagcacaataggacatggaaagtcacatattttacggcaatactttcaccgctgcctcatcccaaatgagacatcgaagggcggtgtcgtccacctcgaacctttgaccttaccagtatatacccttataacctctacatcggagacgacgccgcgaataacaatagatacccgaccaacaacacagcacgaacctcgccgtcatcatgcactgccttcgacctgtatatatagatcactaacgacgccatgatatcacgatttcatttcataccacacattctgtactacataccattgctcggcaagaagactgtgaaattaagctgcttactgcagcattgcagcacacgtatctctccgccaatggtttacaggcctcaacggagagtgagagacggaggcattagcaacccgaaagagtattggctttggcatgtgagagatatttcggtatccccagctgtgtagaacatcgcataaccgggtttcggtgctagacaagaggacggttagacctacacattgtatatagactggtagaacttggtagcgcaaattcgaattcaatatgaatctagaccctaggtatagcaagtgatgggccatcataccagttctatatgctccaaagttaatccgaaagatcaccctaactccgctctctgcagttttatcctatccctctttgcaagccaaaccaagctcgccaatctcttctccctactaccactcactcatccacaatccaaatcttaactccttccaatttccctcccacacctctcccagcactctttaccggtaagtatcgtagatcccaacatcgctaatccaacaacaccgggatctgctttaatccaaccgactactgtgccagggagcatgatatccagacaattcgccacaactccacgccctagcttatgtgtttcagcaatgacctgtttccgccacgccttgcgagccaatttccggtccgcgacaatcttctttaaacgagcctgctccttactcacatcccactctccgtccttctctccctcatcttcaccacccgtaacaagtccatcatcctttatatttcccttctcctttccaccgacaccatgcccagtagcttccacaggcaacggcgtagttagaaccactgaagcaatcctcactactcccgccgccgccccacatgccaaaccgaaaagccaaaatcgttgtgcctcgaccgctatcatggcactagtctgcttctcaaacagtccgagcccgggaatctgctggacgtctaggaagattgaggcttcgaggaggagatacatcccgttgaatgatttggagaggatgtcgaggtatgctgctctttttgcgaatttggctcttttgagtgcgaggggcgatggcttttcattctgagacgttgaggttgcaggagagggtgatgagaaggaagaataagtcttatgtgcaccgccgaagaattccaaagagcggaagatacggaagttccggcgggcgaggtttaatctgtcttttaatgcggataggatagggattgcggttgcgagatctagtgttgaggagatgtatttgggaggcgtgagggtcaaggtggaggttagtagggagatgaatgttaggaatgggggaagaagcgttgggtaggagacgaggatctggaggatcgcttgacagaagcgaaatgaacgttcgattccgactatagacagattagtacctaatgcaggacacgtaaaggtgtggaattcagcactgaagttattgaacaggagtgacatgaagtgagtgattggataaggtaggtaacggagtggtgcatgagcaagcttttcagcaacatccgagtcggccaatttgatattctcatcattgcagagactggtataccgaaacattgaatttcacggctactttatgagtgatttatacacttcatgaaatggtcgaagatgagtatctcatttccagcccttaccctagaaatcaaat

SEQ ID NO: 9200 - DNA, 1005 bp, Muscodor strobelii
  misc_feature: SGI cDNA ID NO. 562865
  misc_feature: Encodes the peptide sequence at SEQ ID NO 9201
atgtcttcgacttttgatcaggttgtaagattcacgacggacgccgtcggaatcgaacgttcatttcgcttctgtcaagcgatcctccagatcctcgtctcctacccaacgcttcttcccccattcctaacattcatctccctactaacctccaccttgaccctcacgcctcccaaatacatctcctcaacactagatctcgcaaccgcaatccctatcctatccgcattaaaagacagattaaacctcgcccgccggaacttccgtatcttccgctctttggaattcttcggcggtgcacataagacttattcttccttctcatcaccctctcctgcaacctcaacgtctcagaatgaaaagccatcgcccctcgcactcaaaagagccaaattcgcaaaaagagcagcatacctcgacatcctctccaaatcattcaacgggatgtatctcctcctcgaagcctcaatcttcctagacgtccagcagattcccgggctcggactgtttgagaagcagactagtgccatgatagcggtcgaggcacaacgattttggcttttcggtttggcatgtggggcggcggcgggagtagtgaggattgcttcagtggttctaactacgccgttgcctgtggaagctactgggcatggtgtcggtggaaaggagaagggaaatataaaggatgatggacttgttacgggtggtgaagatgagggagagaaggacggagagtgggatgtgagtaaggagcaggctcgtttaaagaagattgtcgcggaccggaaattggctcgcaaggcgtggcggaaacaggtcattgctgaaacacataagctagggcgtggagttgtggcgaattgtctggatatcatgctccctggcacagtagtcggttggattaaagcagatcccggtgttgttggattagcgatgttgggatctacgatacttaccggtaaagagtgctgggagaggtgtgggagggaaattggaaggagttaa

SEQ ID NO: 9201 - protein, 334 aa, Muscodor strobelii
  misc_feature: SGI Peptide ID NO. 562865
  misc_feature (1)..(331): NCBI GI: 46134223 Blast Desc: FG09251.1 [Gibberella zeae PH-1]
  misc_feature (3)..(329): NCBI GI: 85086249 Blast Desc: NCU04045 [Neurospora crassa OR74A] gi|28918754|gb|EAA28424.1| NCU04045 [Neurospora crassa OR74A] gi|39979236|emb|CAE85606.1| [Neurospora crassa]
  misc_feature (1)..(333): NCBI GI: 256727743 Blast Desc: NECHADRAFT_76871 [Nectria haematococca mpVI 77-13-4]
  misc_feature (3)..(334): NCBI GI: 171682188 Blast Desc: protein product [Podospora anserina] gi|170941053|emb|CAP66703.1| protein product [Podospora anserina]
  misc_feature (83)..(326): NCBI GI: 145611104 Blast Desc: MGG_00648 [Magnaporthe grisea 70-15] gi|145018437|gb|EDK02716.1| MGG_00648 [Magnaporthe grisea 70-15]
  misc_feature (7)..(331): NCBI GI: 240111246 Blast Desc: CPC735_070810 [Coccidioides posadasii C735 delta SOWgp]
  misc_feature (3)..(332): NCBI GI: 225557384 Blast Desc: peroxin 11B [Ajellomyces capsulatus G186AR]
  misc_feature (7)..(332): NCBI GI: 261205422 Blast Desc: peroxin 11B [Ajellomyces dermatitidis SLH14081] gi|239592507|gb|EEQ75088.1| peroxin 11B [Ajellomyces dermatitidis SLH14081] gi|239611338|gb|EEQ88325.1| peroxin 11B [Ajellomyces
  misc_feature (284)..(330): NCBI GI: 154298517 Blast Desc: [Botryotinia fuckeliana B05.10] gi|150858039|gb|EDN33231.1| [Botryotinia fuckeliana B05.10]
  misc_feature (275)..(331): NCBI GI: 119189409 Blast Desc: CIMG_04752 [Coccidioides immitis RS]
MSSTFDQVVRFTTDAVGIERSFRFCQAILQILVSYPTLLPPFLTFISLLTSTLTLTPPKYISSTLDLATAIPILSALKDRLNLARRNFRIFRSLEFFGGAHKTYSSFSSPSPATSTSQNEKPSPLALKRAKFAKRAAYLDILSKSFNGMYLLLEASIFLDVQQIPGLGLFEKQTSAMIAVEAQRFWLFGLACGAAAGVVRIASVVLTTPLPVEATGHGVGGKEKGNIKDDGLVTGGEDEGEKDGEWDVSKEQARLKKIVADRKLARKAWRKQVIAETHKLGRGVVANCLDIMLPGTVVGWIKADPGVVGLAMLGSTILTGKECWERCGREIGRS

SEQ ID NO: 9202 - DNA, 1497 bp, Muscodor strobelii
  misc_feature: SGI cDNA ID NO. 562866
  misc_feature: Reduced expression when VOC is produced
  misc_feature: Encodes the peptide sequence at SEQ ID NO 9203
atgctgtcacggacgtccacggctgcggcggcgggtgcagcctctgcaaaggccatcacccgcgcagcgctcccagctgccagccagcaaagcagatcgcttgcgacggtacaggatggaaaccccgtgcgacactacggcggtctcaaggaccaggaccgcatcttccagaacctctacggccgctttcctcccgacctcaagtccgccaagaagatgggcgactggcacaagactaaagaaatcatcctgaagggacacgactggatcatctcggagatcaaggcctcgggtctgcgaggcagaggaggagctggcttcccgtctggtctcaaatggtcgttcatgaacttcaaagactgggacaaagacaccaagccccgatacctcgtcgtcaacgccgacgagggcgagcccggcacgtgcaaggaccgcgagatcatgcgcaaggatccccacaagctcatcgagggttgcctcgtcgccggccgcgccatgaacgccaccgccgcctacatctacatccgcggcgagttcatccacgaggccgccgtcctgcagcacgccatcaacgaggcttacgccgacggcctcatcggcaagaacgcctgcggctccggctacgacttcgacgtctacctgcaccgcggcgccggcgcctacgtctgcggcgaggagacctccctcatcgagtccctcgagggcaagcccggcaagccccgtctcaagccccccttccccgccgccgtcggcctgttcggctgcccctccaccgtcgccaacgtcgagaccgtcgccgtcgccccgaccatctgcagacgaggaggaagctggttcgctggctttggccgcgagcgcaaccaggggaccaagctgttctgtatctccggaaacgtgaacaaccctgctaccgtcgaggaggagatgtccatccctctgcgcgagctcatcgagaagcactgcggtggtgtcaagggcggctgggacaacctgttggccatcatccccggtggttcctccacacccatcctgcccaagcgtgtttgtgacgagcagttgatggacttcgacgctttgaaggacagccagtccggcctgggtactgccgccgttattgtcatggacaagagtgccgatgtcgtccgtggcatttcccggttatcacacttctaccgccacgagtcctgcggtcaatgcacaccctgccgtgagggcagcaagtgggtagagcagatcatgagccggttcgagaagggtatgggtcgtgagagggagattgatatgttacaggagcttaccaagcaggttgagggacacactatttgcgctttgggtgaagctttcgcctggcccgtccagggtcttatccgacacttccgtcccgaattagaagccagaatgcagagctacgccaaggagcacggctctcaggccctcggtggtggttgggctccggatacgcgcgcccagggaaagttggtctcaccaggccagtag

SEQ ID NO: 9203 - protein, 498 aa, Muscodor strobelii
  misc_feature: SGI Peptide ID NO. 562866
  misc_feature (74)..(339): Pfam Id: PF01512 Pfam Desc: Respiratory-chain NADH dehydrogenase 51 Kd subunit
  misc_feature (21)..(497): NCBI GI: 2499312 Blast Desc: NDUV1_ASPNG RecName: Full=NADH-ubiquinone oxidoreductase 51 kDa subunit, mitochondrial; AltName: Full=Complex I-51kD; Short=CI-51kD; Flags: Precursor 51kDa of I);
  misc_feature (90)..(498): NCBI GI: 154287522 Blast Desc: NADH-ubiquinone oxidoreductase 51 kDa subunit, mitochondrial precursor [Ajellomyces capsulatus NAm1] gi|150408197|gb|EDN03738.1| NADH-ubiquinone oxidoreductase 51 kDa
  misc_feature (28)..(494): NCBI GI: 50547327 Blast Desc: YALI0B20372p [Yarrowia lipolytica] gi|7684614|gb|AAF65194.2|AF197536_1 nucleotide-binding respiratory complex I subunit [Yarrowia lipolytica] NUBM protein
  misc_feature (2)..(481): NCBI GI: 71004398 Blast Desc: UM00718.1 [Ustilago maydis 521] gi|46095874|gb|EAK81107.1| UM00718.1 [Ustilago maydis 521]
  misc_feature (31)..(484): NCBI GI: 169868608 Blast Desc: CC1G_03104 [Coprinopsis cinerea okayama7#130] gi|116498033|gb|EAU80928.1| CC1G_03104 [Coprinopsis cinerea okayama7#130]
  misc_feature (32)..(494): NCBI GI: 255724736 Blast Desc: NADH-ubiquinone oxidoreductase 51 kDa subunit, mitochondrial precursor [Candida tropicalis MYA-3404] gi|15425872|gb|AAK97627.1|AF399714_1 NADH dehydrogenase complex I
  misc_feature (32)..(481): NCBI GI: 126135420 Blast Desc: NADH-ubiquinone oxidoreductase 51 kDa subunit, mitochondrial precursor (Complex I-51KD) (CI-51KD) [Pichia stipitis CBS 6054] gi|126091432|gb|ABN66205.1| NADH-ubiquinone 51
  misc_feature (32)..(495): NCBI GI: 50424275 Blast Desc: DEHA0F09251g [Debaryomyces hansenii CBS767] gi|49656393|emb|CAG89064.1| DEHA2F08360p [Debaryomyces hansenii]
  misc_feature (25)..(494): NCBI GI: 149245198 Blast Desc: NADH-quinone oxidoreductase chain F 1 [Lodderomyces elongisporus NRRL YB-4239] gi|146449527|gb|EDK43783.1| NADH-quinone oxidoreductase chain F 1 [Lodderomyces elongisporus
  misc_feature (13)..(484): NCBI GI: 170112662 Blast Desc: [Laccaria bicolor S238N-H82] gi|164637434|gb|EDR01719.1| [Laccaria bicolor S238N-H82]
  misc_feature (26)..(497): SWISSPROT Homolog: EC 1.6.5.3 NADH dehydrogenase (ubiquinone)
  misc_feature (26)..(497): SWISSPROT Homolog: EC 1.6.99.3 NADH dehydrogenase
  misc_feature: Useful for introducing or modulating the production of volatile compounds
MLSRTSTAAAAGAASAKAITRAALPAASQQSRSLATVQDGNPVRHYGGLKDQDRIFQNLYGRFPPDLKSAKKMGDWHKTKEIILKGHDWIISEIKASGLRGRGGAGFPSGLKWSFMNFKDWDKDTKPRYLVVNADEGEPGTCKDREIMRKDPHKLIEGCLVAGRAMNATAAYIYIRGEFIHEAAVLQHAINEAYADGLIGKNACGSGYDFDVYLHRGAGAYVCGEETSLIESLEGKPGKPRLKPPFPAAVGLFGCPSTVANVETVAVAPTICRRGGSWFAGFGRERNQGTKLFCISGNVNNPATVEEEMSIPLRELIEKHCGGVKGGWDNLLAIIPGGSSTPILPKRVCDEQLMDFDALKDSQSGLGTAAVIVMDKSADVVRGISRLSHFYRHESCGQCTPCREGSKWVEQIMSRFEKGMGREREIDMLQELTKQVEGHTICALGEAFAWPVQGLIRHFRPELEARMQSYAKEHGSQALGGGWAPDTRAQGKLVSPGQ

SEQ ID NO: 9204 - DNA, 1915 bp, Muscodor strobelii
  misc_feature: SGI EST ID NO. CUFF.22085.1
  misc_feature: Variant of the nucleotide sequence at SEQ ID NO 9202
tcatcactctccgacatcagcatttttgaacatcgacgacccccgacgacctcgatcgccactggactctccactctgcacgctcgattgagcaccaccaccacacccacacacacccgacgatgctgtcacggacgtccacggctgcggcggcgggtgcagcctctgcaaaggccatcacccgcgcagcgctcccagctgccagccagcaaagcagatcgcttgcgacggtacaggatggaaaccccgtgcgacactacggcggtctcaaggaccaggaccgcatcttccagaacctctacggccgctttcctcccgacctcaagtccgccaagaagatgggcgactggcacaagactaaagaaatcatcctgaagggacacgactggatcatctcggagatcaaggcctcgggtctgcgaggcagaggaggagctggcttcccgtctggtctcaaatggtcgttcatgaacttcaaagactgggacaaagacaccaagccccgatacctcgtcgtcaacgccgacgagggcgagcccggcacgtgcaaggaccgcgagatcatgcgcaaggatccccacaagctcatcgagggttgcctcgtcgccggccgcgccatgaacgccaccgccgcctacatctacatccgcggcgagttcatccacgaggccgccgtcctgcagcacgccatcaacgaggcttacgccgacggcctcatcggcaagaacgcctgcggctccggctacgacttcgacgtctacctgcaccgcggcgccggcgcctacgtctgcggcgaggagacctccctcatcgagtccctcgagggcaagcccggcaagccccgtctcaagccccccttccccgccgccgtcggcctgttcggctgcccctccaccgtcgccaacgtcgagaccgtcgccgtcgccccgaccatctgcagacgaggaggaagctggttcgctggctttggccgcgagcgcaaccaggggaccaagctgttctgtatctccggaaacgtgaacaaccctgctaccgtcgaggaggagatgtccatccctctgcgcgagctcatcgagaagcactgcggtggtgtcaagggcggctgggacaacctgttggccatcatccccggtggttcctccacacccatcctgcccaagcgtgtttgtgacgagcagttgatggacttcgacgctttgaaggacagccagtccggcctgggtactgccgccgttattgtcatggacaagagtgccgatgtcgtccgtggcatttcccggttatcacacttctaccgccacgagtcctgcggtcaatgcacaccctgccgtgagggcagcaagtgggtagagcagatcatgagccggttcgagaagggtatgggtcgtgagagggagattgatatgttacaggagcttaccaagcaggttgagggacacactatttgcgctttgggtgaagctttcgcctggcccgtccagggtcttatccgacacttccgtcccgaattagaagccagaatgcagagctacgccaaggagcacggctctcaggccctcggtggtggttgggctccggatacgcgcgcccagggaaagttggtctcaccaggccagtagactacttggaagtgggaaaatagaataatcatcatccggtgtgatttagagacggagtcttcgtcgacaccttgtacactttgctcacctaccttacctacctacctatctatcatgtcgtctctatgtacatacccatcaagaaatttgtcttcgaactactaggtagcccttggtctatggcgtgatgtgttaatgagtgatgtgtgtcaagcggttgacttccatgtcagatgcaagaactagtctgaattaagagatttgatagcccagattcatgtgtaattcgagttgaa

SEQ ID NO: 9205 - DNA, 1506 bp, Muscodor strobelii
  misc_feature: SGI cDNA ID NO. 562867
  misc_feature: Encodes the peptide sequence at SEQ ID NO 9206
atggaagacattcgcagcttgctctcgggaaagaatactgtcactatcattgttctctactatgtgactcttgcgttgtaccggttgtatttccatcccctagccaaattccccggccccaagttagcagccgtgacgcgactatacgaaggctactatgatctctatcagagtggccagtataccttcaagatagcggagctgcataaaaaatatggccccatcatccgtatcagcccttacgagctgcacgtaaatgatgccgctttcttggacactctctacagccgccaggaaggagtatggcacaagtatgactgggccgtcgatgcctttgcgactaaaggcgcgagcctctggacagctgaccatactctgcacaagcaccgtcgtctgcctttgaatcctttcttctcaaaggccaaggtgtcggcacagcaggacatgatactgagacatgtccactcactcttcaataggctttctggctttgctgaatcgcagaagactgtggatgtcggcgccgcctttgctgcatttgtgcgagacgtgactaatgagtatatacttggaaaacactacaacgatatcgagaaggaggattttgatgctggaatgctggtcgctggccaggctggcggcgcgatgtggcgtgctaccaagttcatacgcttctttgctcccttggtgcgatctatcccgccgccattgattatggcagtttctgatccagtcatgaaagacttcttccgattcatgataacttccatgaatgataccaaggttctcatgaaaaaggcggtatctggacatgacgacagcccacgcacattggtacatgagattatgcagtccaaacttgcatcttcagagaaatcgcatcggagagtattcgaggaagtgaacacaacgactggcgctggcttcgagaccacagccgccgtcgtccgaaacgccgtcttccacatctacaatgacccgaggattctccagaagctacgagccgagcttgctacagcccctgatcacgattgcaagacgcttgagcagctcccatatttgaccgccatcatcatggaagctatgcgcctgtcacccgccatagctacgcgcagcgcccggattgcccaggacaaagatctcgcttacgcgaaatggcgaatacctgctggcacgcccgtcgggatgaccatacatctgctccatcagaacgagcaacaatatccagagcccaagctcttcaatccggagcgatggatgtctcccaacccttggcagttgggtaagaagacatttgtgccttttagcaaaggaacgcgtaactgtcttggaatgcatcttgcttgggctgagatttacctattactcggcagcgtagtgcctcggttcgacttcgagttcccgacaacgaagtcagaggatttcgaagtcattaaggacaatttcgccctcgccaccaaaaatttgggagtcgtccctgcttttgtaactggagtcgcagtataa

SEQ ID NO: 9206 - protein, 501 aa, Muscodor strobelii
  misc_feature: SGI Peptide ID NO. 562867
  misc_feature (40)..(493): Pfam Id: PF00067 Pfam Desc: Cytochrome P450
  misc_feature (306)..(493): Pfam Id: PF00067 Pfam Desc: Cytochrome P450
  misc_feature (1)..(497): NCBI GI: 171683471 Blast Desc: protein product [Podospora anserina] gi|170941695|emb|CAP67349.1| protein product [Podospora anserina]
  misc_feature (1)..(446): NCBI GI: 116206024 Blast Desc: CHGG_02305 [Chaetomium globosum CBS 148.51] gi|88182902|gb|EAQ90370.1| CHGG_02305 [Chaetomium globosum CBS 148.51]
  misc_feature (14)..(497): NCBI GI: 238841488 Blast Desc: cytochrome P450 [Microsporum canis CBS 113480]
  misc_feature (8)..(497): NCBI GI: 238839890 Blast Desc: cytochrome P450 [Microsporum canis CBS 113480]
  misc_feature (18)..(482): NCBI GI: 212527464 Blast Desc: cytochrome P450, [Penicillium marneffei ATCC 18224] gi|210073287|gb|EEA27374.1| cytochrome P450, [Penicillium marneffei ATCC 18224]
  misc_feature (1)..(482): NCBI GI: 119499275 Blast Desc: cytochrome P450, [Neosartorya fischeri NRRL 181] gi|119414559|gb|EAW24498.1| cytochrome P450, [Neosartorya fischeri NRRL 181]
  misc_feature (20)..(491): NCBI GI: 119172571 Blast Desc: CIMG_09899 [Coccidioides immitis RS]
  misc_feature (16)..(482): NCBI GI: 255938474 Blast Desc: Pc14g00120 [Penicillium chrysogenum Wisconsin 54-1255] gi|211584628|emb|CAP74153.1| Pc14g00120 [Penicillium chrysogenum Wisconsin 54-1255]
  misc_feature (1)..(482): NCBI GI: 121719400 Blast Desc: cytochrome P450, [Aspergillus clavatus NRRL 1] gi|119404597|gb|EAW14973.1| cytochrome P450, [Aspergillus clavatus NRRL 1]
  misc_feature (20)..(491): NCBI GI: 240111650 Blast Desc: Cytochrome P450 family protein [Coccidioides posadasii C735 delta SOWgp]
  misc_feature (3)..(466): SWISSPROT Homolog: EC 1.14.14.1 Unspecific monooxygenase
MEDIRSLLSGKNTVTIIVLYYVTLALYRLYFHPLAKFPGPKLAAVTRLYEGYYDLYQSGQYTFKIAELHKKYGPIIRISPYELHVNDAAFLDTLYSRQEGVWHKYDWAVDAFATKGASLWTADHTLHKHRRLPLNPFFSKAKVSAQQDMILRHVHSLFNRLSGFAESQKTVDVGAAFAAFVRDVTNEYILGKHYNDIEKEDFDAGMLVAGQAGGAMWRATKFIRFFAPLVRSIPPPLIMAVSDPVMKDFFRFMITSMNDTKVLMKKAVSGHDDSPRTLVHEIMQSKLASSEKSHRRVFEEVNTTTGAGFETTAAVVRNAVFHIYNDPRILQKLRAELATAPDHDCKTLEQLPYLTAIIMEAMRLSPAIATRSARIAQDKDLAYAKWRIPAGTPVGMTIHLLHQNEQQYPEPKLFNPERWMSPNPWQLGKKTFVPFSKGTRNCLGMHLAWAEIYLLLGSVVPRFDFEFPTTKSEDFEVIKDNFALATKNLGVVPAFVTGVAV

SEQ ID NO: 9207 - DNA, 1914 bp, Muscodor strobelii
  misc_feature: SGI EST ID NO. CUFF.21883.0
  misc_feature: Variant of the nucleotide sequence at SEQ ID NO 9205
tacgagccgagcttgctacagcccctgatcacgattgcaagacgcttgagcagctcccatatttgaccgccatcatcatggaagctatgcgcctgtcacccgccatagctacgcgcagcgcccggattgcccaggacaaagatctcgcttacgcgaaatggcgaatacctgctggcacgcccgtcgggatgaccatacatctgctccatcagaacgagcaacaatatccagagcccaagctcttcaatccggagcgatggatgtctcccaacccttggcagttgggtaagaagacatttgtgccttttagcaaaggaacgcgtaactgtcttggaatgcatcttgcttgggctgagatttacctattactcggcagcgtagtgcctcggttcgacttcgagttcccgacaacgaagtcagaggatttcgaagtcattaaggacaatttcgccctcgccaccaaaaatttgggagtcgtccctgcttttgtaactggagtcgcagtataagctcgaggtgagaaaggtacttcacactatcatcagactttattatgttatcgatggctgtaactgcgcaagacgcgaaagcatcttatgtgcgagctaccacgtttgcctgggccactgatatcaagattcgtgctatagattcagatacttgccgataattgtgatcagttgcaagatactggccatgaagataggccaatttcatcgtgctcatctcactaatgactattaatggtttctggttgcagatgttattttcattttattcaaggatggcatatgagccctagacgccccttaattgacatactttcttcgagatcttgacacccaagtttcgtaatctttgaattatggggtagccacttcccaaccgaccttttgctgaatgaacctgatgatatcctcgatctcgtcgggaatcttgtaccagtggcctaaccccgcgtacaagttccattcgacctgatacccggccaagcgcattgttctcccggcggcctcgcccagggcgtatggctctttctcgtctgcttctccgtgcccaagaaaaattggagtagaagatgcagtgtcctctgtatctggcggcgccacaatacagagcaggtctcgttcaaaatcggctgccttttgcgccgatgttcgtggcggaccgtcatcatctgatgcggcgaaaggatcgtcttcatcaaactcagaattgcatgcgctttcctcggcaactgctttttcgatctctcgttgaaaaggaagatagctacacatccccaagtaaccacccacgggatactcgagagtgagcagaacagacagagacatagcgcttccctgactaattccacccaggatgatgtttgctgggggtatcccgacaacttcgatctcgtcatgaagaaggtcgcgattacggtagcggactctgcaaggccttgcaattgtgtctcttgcttgaaagaaggctccggaaggcgggcgatattgaaccattgggtcagcttctttctcccgaatgcgctcgaccgtcggcgtttggtggtagaaaatacgaagcgagcaccagggaatagttggggcaacgattgcccggagacgtcagtcccgtttcgatcaattctttgccgaacttctggccatttcagctaagactgtgtagcagaatgaacgtatttgtgtgctgttgcgtgggttgaacaatgtaggtcgactgatcagccgtgcctacctgctcgtgagcagggattggatgaatgttttccataatgaagtgtatccccctgttcaccctgcaggtttattgatgacatgggccattatttctcctaccatgttgtgacggtctcggtgagacttatagaaacagattttagccaccattgaactgccctgaagtaggtctccg

SEQ ID NO: 9208 - DNA, 642 bp, Muscodor strobelii
  misc_feature: SGI cDNA ID NO. 562868
  misc_feature: Encodes the peptide sequence at SEQ ID NO 9209
atggaaaacattcatccaatccctgctcacgagcagaagttcggcaaagaattgatcgaaacgggactgacagtccgctaccgtaatcgcgaccttcttcatgacgagatcgaagttgtcgggatacccccagcaaacatcatcctgggtggaattagtcagggaagcgctatgtctctgtctgttctgctcactctcgagtatcccgtgggtggttacttggggatgtgtagctatcttccttttcaacgagagatcgaaaaagcagttgccgaggaaagcgcatgcaattctgagtttgatgaagacgatcctttcgccgcatcagatgatgacggtccgccacgaacatcggcgcaaaaggcagccgattttgaacgagacctgctctgtattgtggcgccgccagatacagaggacactgcatcttctactccaatttttcttgggcacggagaagcagacgagaaagagccatacgccctgggcgaggccgccgggagaacaatgcgcttggccgggtatcaggtcgaatggaacttgtacgcggggttaggccactggtacaagattcccgacgagatcgaggatatcatcaggttcattcagcaaaaggtcggttgggaagtggctaccccataa

SEQ ID NO: 9209 - protein, 213 aa, Muscodor strobelii
  misc_feature: SGI Peptide ID NO. 562868
  misc_feature (145)..(206): Pfam Id: PF02230 Pfam Desc: Phospholipase/Carboxylesterase
  misc_feature (41)..(87): Pfam Id: PF02230 Pfam Desc: Phospholipase/Carboxylesterase
  misc_feature (42)..(205): NCBI GI: 46115032 Blast Desc: FG03358.1 [Gibberella zeae PH-1]
  misc_feature (30)..(207): NCBI GI: 238500726 Blast Desc: acyl-protein thioesterase 1,2, [Aspergillus flavus NRRL3357] gi|220691834|gb|EED48181.1| acyl-protein thioesterase 1,2, [Aspergillus flavus NRRL3357]
  misc_feature (31)..(206): NCBI GI: 171692461 Blast Desc: protein product [Podospora anserina] gi|170946179|emb|CAP72980.1| protein product [Podospora anserina]
  misc_feature (40)..(210): NCBI GI: 121700755 Blast Desc: phospholipase/carboxylesterase, [Aspergillus clavatus NRRL 1] gi|119396785|gb|EAW07216.1| phospholipase/carboxylesterase, [Aspergillus clavatus NRRL 1]
  misc_feature (16)..(206): NCBI GI: 238842716 Blast Desc: conserved [Microsporum canis CBS 113480]
  misc_feature (45)..(207): NCBI GI: 240276084 Blast Desc: acyl-protein thioesterase [Ajellomyces capsulatus H143]
  misc_feature (46)..(207): NCBI GI: 115391749 Blast Desc: [Aspergillus terreus NIH2624] gi|114194303|gb|EAU36003.1| [Aspergillus terreus NIH2624]
  misc_feature (45)..(207): NCBI GI: 225556826 Blast Desc: acyl-protein thioesterase [Ajellomyces capsulatus G186AR]
  misc_feature (32)..(206): NCBI GI: 156054396 Blast Desc: SS1G_06046 [Sclerotinia sclerotiorum 1980] gi|154703826|gb|EDO03565.1| SS1G_06046 [Sclerotinia sclerotiorum 1980]
  misc_feature (31)..(210): NCBI GI: 239607397 Blast Desc: conserved [Ajellomyces dermatitidis ER-3]
MENIHPIPAHEQKFGKELIETGLTVRYRNRDLLHDEIEVVGIPPANIILGGISQGSAMSLSVLLTLEYPVGGYLGMCSYLPFQREIEKAVAEESACNSEFDEDDPFAASDDDGPPRTSAQKAADFERDLLCIVAPPDTEDTASSTPIFLGHGEADEKEPYALGEAAGRTMRLAGYQVEWNLYAGLGHWYKIPDEIEDIIRFIQQKVGWEVATP

SEQ ID NO: 9210 - DNA, 588 bp, Muscodor strobelii
  misc_feature: SGI cDNA ID NO. 562869
  misc_feature: Encodes the peptide sequence at SEQ ID NO 9211
atgtcatcatctaaaaggcagtctatcctgccacgaatgccctcgggtcccaaagcgccagtcaacttctcgtcctccatcaccatcgctgactcggcccaactcgctggaaaccacaccatcaacatcagctccgaatctgtcgtccacccccgcgcaaaactcgactcagccaacggtcgcatcaccattggtcgccgatgcgttgtgcatgagcgaaccagtattggcgccgcttctactgatcccacccccagcgagtctcgcgatggtgttgtcgttggcgattatgccaccattgaagtcggggccgtcattgagtctggtggcacttacattggcgatgggtgctcagtcggcgtttgtagtcgcgtaggcaagggagcaaagctgggcaagcattgtatcctgacgcctaagagcttcgtggctccattcgagactgtcccagacttcactgtcatctactctaatggcaccaggcggctcgataaatgcggcgtggccgacctgaaaaacaagactcaagcacgacagattgaggttctgaggaagttgatccctagtaatccgtcaaagttccagtga

SEQ ID NO: 9211 - protein, 195 aa, Muscodor strobelii
  misc_feature: SGI Peptide ID NO. 562869
  misc_feature (3)..(194): NCBI GI: 171682192 Blast Desc: protein product [Podospora anserina] gi|170941055|emb|CAP66705.1| protein product [Podospora anserina]
  misc_feature (5)..(195): NCBI GI: 85086241 Blast Desc: NCU04043 [Neurospora crassa OR74A] gi|28918752|gb|EAA28422.1| [Neurospora crassa OR74A] gi|39979234|emb|CAE85604.1| conserved [Neurospora crassa]
  misc_feature (2)..(195): NCBI GI: 261359348 Blast Desc: conserved [Verticillium albo-atrum VaMs.102]
  misc_feature (1)..(195): NCBI GI: 145611108 Blast Desc: MGG_00646 [Magnaporthe grisea 70-15] gi|145018440|gb|EDK02719.1| MGG_00646 [Magnaporthe grisea 70-15]
  misc_feature (3)..(195): NCBI GI: 256727163 Blast Desc: NECHADRAFT_99404 [Nectria haematococca mpVI 77-13-4]
  misc_feature (1)..(195): NCBI GI: 154298521 Blast Desc: BC1G_11445 [Botryotinia fuckeliana B05.10] gi|150858041|gb|EDN33233.1| BC1G_11445 [Botryotinia fuckeliana B05.10]
  misc_feature (2)..(194): NCBI GI: 189190840 Blast Desc: conserved [Pyrenophora tritici-repentis Pt-1C-BFP] gi|187973365|gb|EDU40864.1| conserved [Pyrenophora tritici-repentis Pt-1C-BFP]
  misc_feature (2)..(194): NCBI GI: 169607202 Blast Desc: SNOG_06657 [Phaeosphaeria nodorum SN15] gi|160707175|gb|EAT86488.2| SNOG_06657 [Phaeosphaeria nodorum SN15]
  misc_feature (1)..(133): NCBI GI: 156042203 Blast Desc: SS1G_11652 [Sclerotinia sclerotiorum 1980] gi|154696035|gb|EDN95773.1| SS1G_11652 [Sclerotinia sclerotiorum 1980]
  misc_feature (17)..(159): NCBI GI: 238487308 Blast Desc: transferase hexapeptide domain protein [Aspergillus flavus NRRL3357] gi|220699771|gb|EED56110.1| transferase hexapeptide domain protein [Aspergillus flavus NRRL3357]
MSSSKRQSILPRMPSGPKAPVNFSSSITIADSAQLAGNHTINISSESVVHPRAKLDSANGRITIGRRCVVHERTSIGAASTDPTPSESRDGVVVGDYATIEVGAVIESGGTYIGDGCSVGVCSRVGKGAKLGKHCILTPKSFVAPFETVPDFTVIYSNGTRRLDKCGVADLKNKTQARQIEVLRKLIPSNPSKFQ

SEQ ID NO: 9212 - DNA, 1627 bp, Muscodor strobelii
  misc_feature: SGI EST ID NO. CUFF.21901.0
  misc_feature: Variant of the nucleotide sequence at SEQ ID NO 9210
acgccatctcctagtaaacaaacccgagtagccactgtacctgagcctcattcccaaactgcatgttcgaggccggcaaacaatcgtaccactgaaagcattgtattccacttttcgacaccgaagaccgtcgccatgtcatcatctaaaaggcagtctatcctgccacgaatgccctcgggtcccaaagcgccagtcaacttctcgtcctccatcaccatcgctgactcggcccaactcgctggaaaccacaccatcaacatcagctccgaatctgtcgtccacccccgcgcaaaactcgactcagccaacggtcgcatcaccattggtcgccgatgcgttgtgcatgagcgaaccagtattggcgccgcttctactgatcccacccccagcgagtctcgcgatggtgttgtcgttggcgattatgccaccattgaagtcggggccgtcattgagtctggtggcacttacattggcgatgggtgctcagtcggcgtttgtagtcgcgtaggcaagggagcaaagctgggcaagcattgtatcctgacgcctaagagcttcgtggctccattcgagactgtcccagacttcactgtcatctactctaatggcaccaggcggctcgataaatgcggcgtggccgacctgaaaaacaagactcaagcacgacagattgaggttctgaggaagttgatccctagtaatccgtcaaagttccagtgataccctcagtctcttataaccgacgactactcgtatgcgtaactaggcgaagggtttatactattcaatcatggcccatcacgtcaaattgttgacgacgaattcctaatgcagaagtctgtcccattttacatcccctcgtctccgtataccgacatccgcacatggcgacagatgagggcacatagtcaacgagtctgccttggctacggcgcaagacgcagagtacgacatgcttcagctttcgacagatgaattagagacgtcgcatctgtagactcgaatcatgacacataaatgcggtattgtcagataggccaacggacgatttctgcagctgcagctgaacatgcccctttcggatagtctcccgtcttgagcaccggctattttcgcccgttgatgctggaaattcggaaaagcaccctctccttgtggcaatgctactatgccagcaatgcagtgcggagctcctagtttgatgttcacgcactgccagttgcgcagctcgcatcggggaagccatccagtagtgggatgatagcaatcgaaaggctgcactgcgcctctgcaaaggctatgccgccaataactacgtcatgccgttaagcagattgcagctatgtgaagcacctaacgctatctcatagctcaacaggttcacgcagacaccacgtaggtaaactaaagaatcccacatggaaagtaaatacatagctctggggaatcataatcttccatcgcacgttcgctatgcattattacgtagctctactaagtagccgtagctgcaaatgccattggaagccatgggcaaggatgactactatgttatctccaatatgcaaatgccgcgcataatgttgaaacacttgcatgttgaaagagcggtatgccataccta

SEQ ID NO: 9213 - DNA, 1551 bp, Muscodor strobelii
  misc_feature: SGI cDNA ID NO. 562870
  misc_feature: Encodes the peptide sequence at SEQ ID NO 9214
atgtcccgcagagtggatgatgacctagcttatggtgaaaggtgggacaaggaccgcttggtctatgagcgagatcgtttcgaagagcgggagcgcgatcgctaccctccccgagcacctgttcgcgagcgtcctcgtgaagcctcggttgacgagagatactttgaacgtcgcaaggcccgtccctgggaagaagagaatgattttgttcgcgagagagtgtactacaatgatgaaccccgccagcgtcgctccccaccccccgaacttgaaacacgaatcgtccaacgaagtcgtgacgtcgagtatcgcagcccatcacccattcgccggccacgcccgggaatgctgcgacgccaatcttcattagacacatttgatagacgacctgccgctcgattgtatggagaaaaggaccgggacgaatatgtcccccgcgatcggcgccctgaataccgcccggagccataccaacccattcccttgccacgttcccgtgcacttcccccgcctagagtctacgccgaacgcgactatgactacgatgagatcaagatctctgagcctcggcgctacggcgacgatgaatttcgtggttatcccgaacacgtccgtgaacgggaaatagtgcggacaaaagaacgacgagagcgcagtggctcacgaacaagccgagcacggacacatcatagtagctcgcatcatagtacctcaagggcgtcgtcaacgagctcatctagcagtgagtcaggtggcaccacggtaaccagtaagagcaagacgacagagtatcctaagaagggcaagacgagaattccgtctcgacttgtatccatacgggcaatcatggatctgcaatatccattcatcgaagagggaaacacaataattattcaaagggctctcggacagcaaaacatcgatgatttgctcaaaatgagcgaagaatacaagcgcgtggatgccgagatcgccgctactcgttccatcgcaccagcaatagaggagcgcagggaagaatttgttattccgccaaaggcgccaacaacgatcatggcgccacctccccctcctcctgttgagattgtgaaggagacagtgacgcgcgagatttcgcctgcgcgcacagctcggactggtcgctcacataggagttacagcacttccaccactgcccgcacgccttacgttgttgaagcgacgccgagagaaatcagcgataatgttgccgttggtcctattgcactagcgagagactatggttacggcaatcaggaactagtcatccgtgatgacaggcatcatcatcaccacgacacggaactcgtcatacatgatgatcggcatcaccatcatcatgatcatcaccatcactctcatagtcgcgagagagatatggtgagagctgaacgactgccgaccggggagctggtcttgtatgaggagagcattgagaaggtggaggagccgagacgcggagtcaggattgagaaggacaagaaaggaccgcctcccggtttgatgagagcaatgcttgctactctaacgtag

SEQ ID NO: 9214 - protein, 516 aa, Muscodor strobelii
  misc_feature: SGI Peptide ID NO. 562870
  misc_feature (12)..(328): NCBI GI: 256733383 Blast Desc: NECHADRAFT_99498 [Nectria haematococca mpVI 77-13-4]
  misc_feature (12)..(328): NCBI GI: 46127825 Blast Desc: FG08290.1 [Gibberella zeae PH-1]
  misc_feature (22)..(375): NCBI GI: 171681606 Blast Desc: protein product [Podospora anserina] gi|170940762|emb|CAP66411.1| protein product [Podospora anserina]
  misc_feature (103)..(340): NCBI GI: 85097650 Blast Desc: NCU05527 [Neurospora crassa OR74A] gi|28921981|gb|EAA31253.1| NCU05527 [Neurospora crassa OR74A]
  misc_feature (12)..(319): NCBI GI: 261360689 Blast Desc: conserved [Verticillium albo-atrum VaMs.102]
  misc_feature (12)..(345): NCBI GI: 156057727 Blast Desc: SS1G_04595 [Sclerotinia sclerotiorum 1980] gi|154702380|gb|EDO02119.1| SS1G_04595 [Sclerotinia sclerotiorum 1980]
  misc_feature (101)..(516): NCBI GI: 242787854 Blast Desc: conserved [Talaromyces stipitatus ATCC 10500] gi|218721248|gb|EED20667.1| conserved [Talaromyces stipitatus ATCC 10500]
  misc_feature (120)..(516): NCBI GI: 212543823 Blast Desc: conserved [Penicillium marneffei ATCC 18224] gi|210066973|gb|EEA21066.1| conserved [Penicillium marneffei ATCC 18224]
  misc_feature (113)..(319): NCBI GI: 154273715 Blast Desc: [Ajellomyces capsulatus NAm1] gi|150415317|gb|EDN10670.1| [Ajellomyces capsulatus NAm1]
  misc_feature (113)..(319): NCBI GI: 240282065 Blast Desc: conserved [Ajellomyces capsulatus H143]
MSRRVDDDLAYGERWDKDRLVYERDRFEERERDRYPPRAPVRERPREASVDERYFERRKARPWEEENDFVRERVYYNDEPRQRRSPPPELETRIVQRSRDVEYRSPSPIRRPRPGMLRRQSSLDTFDRRPAARLYGEKDRDEYVPRDRRPEYRPEPYQPIPLPRSRALPPPRVYAERDYDYDEIKISEPRRYGDDEFRGYPEHVREREIVRTKERRERSGSRTSRARTHHSSSHHSTSRASSTSSSSSESGGTTVTSKSKTTEYPKKGKTRIPSRLVSIRAIMDLQYPFIEEGNTIIIQRALGQQNIDDLLKMSEEYKRVDAEIAATRSIAPAIEERREEFVIPPKAPTTIMAPPPPPPVEIVKETVTREISPARTARTGRSHRSYSTSTTARTPYVVEATPREISDNVAVGPIALARDYGYGNQELVIRDDRHHHHHDTELVIHDDRHHHHHDHHHHSHSRERDMVRAERLPTGELVLYEESIEKVEEPRRGVRIEKDKKGPPPGLMRAMLATLT

SEQ ID NO: 9215 - DNA, 2912 bp, Muscodor strobelii
  misc_feature: SGI EST ID NO. CUFF.21982.2
  misc_feature: Variant of the nucleotide sequence at SEQ ID NO 9213
gctgttttcgcttccgcgctgccaggcatcaacttctgacgggcttcgcaccagaccccggtacggtgggacaaactctaagcccaacgggctggtagcattagttcaggaatttgatcatagcattgtgcccaaagcaaggtcatggatagtcgtcgagacaaccttgaagtgcattcttcaaatagacaacggaacgccgaactcaaaatcacgccccttcggttcgctcccccgactagcaactctcatctcatcttaatcaccatcctatagatatcgtagactttatccttacctttatagagctcgtgcatcgcaaagctgagaacagacacttgagcgttacgctaccgcgtgttggcgtcactcgaacatctgcgcattgtgcttcggctagtcacctgtccaattataaacggtcattcttaacgcctctagcggtcacttgcgcatccgtgtgtctcgtttctcactcgaaaggacctccagcataccccccaagagacacgacagataatttgggccatacacgagtgtcttttgcgcatccacctacccttgatctaacctagcgttctgcccgcatagactgctcgtctgcgatacaacgaaactgggccgtgagagctgccaaggaacacgaagccacccccgtcaagtcccatcccaccagtccagattcgtacgcagtctgagattctattcacggtccgtttcatttagcggcagactccccctgttatctaccccctctgtcgtcatcgctcatcgttctcttcctttttagacttggatactcgacctggttttatgtccatcggaatcatcaaatcccacacttccttttcatcaaaatttattatcataatcctagacaattgagacaaacttgctgctcatcgaatctcgtttgcctgtcatccaacaccaggtctcacaatgtcccgcagagtggatgatgacctagcttatggtgaaaggtgggacaaggaccgcttggtctatgagcgagatcgtttcgaagagcgggagcgcgatcgctaccctccccgagcacctgttcgcgagcgtcctcgtgaagcctcggttgacgagagatactttgaacgtcgcaaggcccgtccctgggaagaagagaatgattttgttcgcgagagagtgtactacaatgatgaaccccgccagcgtcgctccccaccccccgaacttgaaacacgaatcgtccaacgaagtcgtgacgtcgagtatcgcagcccatcacccattcgccggccacgcccgggaatgctgcgacgccaatcttcattagacacatttgatagacgacctgccgctcgattgtatggagaaaaggaccgggacgaatatgtcccccgcgatcggcgccctgaataccgcccggagccataccaacccattcccttgccacgttcccgtgcacttcccccgcctagagtctacgccgaacgcgactatgactacgatgagatcaagatctctgagcctcggcgctacggcgacgatgaatttcgtggttatcccgaacacgtccgtgaacgggaaatagtgcggacaaaagaacgacgagagcgcagtggctcacgaacaagccgagcacggacacatcatagtagctcgcatcatagtacctcaagggcgtcgtcaacgagctcatctagcagtgagtcaggtggcaccacggtaaccagtaagagcaagacgacagagtatcctaagaagggcaagacgagaattccgtctcgacttgtatccatacgggcaatcatggatctgcaatatccattcatcgaagagggaaacacaataattattcaaagggctctcggacagcaaaacatcgatgatttgctcaaaatgagcgaagaatacaagcgcgtggatgccgagatcgccgctactcgttccatcgcaccagcaatagaggagcgcagggaagaatttgttattccgccaaaggcgccaacaacgatcatggcgccacctccccctcctcctgttgagattgtgaaggagacagtgacgcgcgagatttcgcctgcgcgcacagctcggactggtcgctcacataggagttacagcacttccaccactgcccgcacgccttacgttgttgaagcgacgccgagagaaatcagcgataatgttgccgttggtcctattgcactagcgagagactatggttacggcaatcaggaactagtcatccgtgatgacaggcatcatcatcaccacgacacggaactcgtcatacatgatgatcggcatcaccatcatcatgatcatcaccatcactctcatagtcgcgagagagatatggtgagagctgaacgactgccgaccggggagctggtcttgtatgaggagagcattgagaaggtggaggagccgagacgcggagtcaggattgagaaggacaagaaaggtaggatgtccattagtgtgcctaagtatcgaaagtgaaggaccgcctcccggtttgatgagagcaatgcttgctactctaacgtagatgaggtgagggcagtagcttggcttcgattcggtctgctcagtgaattcttacaacggtactcgaaatgaagtcaacagaagtatagaagatgtaatcgattcttcatgtgctggcctcgctattcctgtcaatcgagcactcgaacaagaatgttccaaatgctagactggatttcgcttctcgatttcactttgggtggcgatgtatacggctcggacaataacttgaatattacatatggtgttgggtgaggttcattggtcaggacttggtcgaggaaatcatatataccatacaaggaataacgacgttacgatctgtgtcttcattttggacgtttatagtaataaacttgaaataatacctgatatcgcag

SEQ ID NO: 9216 - DNA, 1305 bp, Muscodor strobelii
  misc_feature: SGI cDNA ID NO. 562871
  misc_feature: Encodes the peptide sequence at SEQ ID NO 9217
atgctatcatcaagaggatcaggatgggccaaaatcgacttcaaccatggagctcaaaatgaatacgacgcagtcacgaaccctgggggtatcgtgagtttcgcaaacgcagagaactggcttctattggacgaccttacctccttcatcaatgcgaacgcacaattcagcaagtcccacctaacatacggcgaaggattcaccgggactgtccgtcttcggaatgccatggcaaaccacataaacgcacatttcaatcccgtcaaaaagatagatgccgaagaaatcacctttgcagcgggtgtaacagatcttaatgaagtctgcgcactaataacatgcgacccgggacagtgccttatgctaggcgcgcctgtttacggagctttctctagggaccttgtcgtcagaactggagtcgagctagagtatgtagatgtaggagataccgatcaattcacgccagcttgcgtggcggcattcgaaaagggatacgaggacgcaaaggcgaggggacgggatatcaaagcgctcattatatgtaatcctcataatcctcttggtcaatgctaccctcgagaagcattagtcgaactcctgaagctctgcgcatcaaagggtatccacctcataagcgatgagatatacgcactctctacatacgctcctacgcacggcgagccagaatcattcacttctgttcgctcgatcgacttcgaagccataatagacccgaagcaagttcacgttctctacggaatgtccaaagacttcggcgcagcaggtctgcggctaggatgtctcgtgtcacaaaatgagcagttcactaaggctacgagagcaatatgtcgcttctcatccccttcgcaattctccatggacctcgcagcgaagattctcgaagaccaagtattcgtcaaaaagtttctcgggcaatcgagtcgctgcttaacgcaagcgcgtgctctcgccgaagaattgctcaccggaatccatatttcgtatcataagacaggaaatgcaggattcttcctctggcttgatctctctgcttacttaccgctctcactggataacgatggatggacagcccacagacagctggcccaaaggttcagggaagcgggtgtcatcatgtcatctggtgaagcatacaaatcacctcagcctggaaggtttaggttgatattttgtatccctgaacagtctctgagggaaggtatcaagcggtatgctgctgtgctgactatcgctaattcgttgtttttgactgacgttttgatgcagcattgccagtgtcattaa

SEQ ID NO: 9217 - protein, 434 aa, Muscodor strobelii
  misc_feature: SGI Peptide ID NO. 562871
  misc_feature (29)..(411): Pfam Id: PF00155 Pfam Desc: Aminotransferase class I and II
  misc_feature (73)..(411): Pfam Id: PF00155 Pfam Desc: Aminotransferase class I and II
  misc_feature (1)..(410): NCBI GI: 256721792 Blast Desc: NECHADRAFT_97577 [Nectria haematococca mpVI 77-13-4]
  misc_feature (1)..(410): NCBI GI: 119483764 Blast Desc: acc synthase [Neosartorya fischeri NRRL 181] gi|119409941|gb|EAW19888.1| acc synthase [Neosartorya fischeri NRRL 181]
  misc_feature (1)..(419): NCBI GI: 242819738 Blast Desc: aminotransferase, classes I and II family [Talaromyces stipitatus ATCC 10500] gi|218713843|gb|EED13267.1| aminotransferase, classes I and II family [Talaromyces stipitatus
  misc_feature (1)..(410): NCBI GI: 159123934 Blast Desc: aminotransferase, classes I and II family [Aspergillus fumigatus A1163]
  misc_feature (1)..(410): NCBI GI: 70983041 Blast Desc: aminotransferase, classes I and II family [Aspergillus fumigatus Af293] gi|66844673|gb|EAL85010.1| aminotransferase, classes I and II family [Aspergillus fumigatus Af293]
  misc_feature (1)..(410): NCBI GI: 189194105 Blast Desc: 1-aminocyclopropane-1-carboxylate synthase 1 [Pyrenophora tritici-repentis Pt-1C-BFP] gi|187978955|gb|EDU45581.1| 1-aminocyclopropane-1-carboxylate 1
  misc_feature (1)..(415): NCBI GI: 145236715 Blast Desc: An06g01840 [Aspergillus niger] gi|134075466|emb|CAK48027.1| protein product [Aspergillus niger]
  misc_feature (1)..(411): NCBI GI: 238487426 Blast Desc: aspartate aminotransferase, [Aspergillus flavus NRRL3357] gi|220699830|gb|EED56169.1| aspartate aminotransferase, [Aspergillus flavus NRRL3357]
  misc_feature (2)..(417): NCBI GI: 238489283 Blast Desc: aspartate aminotransferase, [Aspergillus flavus NRRL3357] gi|220698267|gb|EED54607.1| aspartate aminotransferase, [Aspergillus flavus NRRL3357]
  misc_feature (1)..(411): NCBI GI: 261357946 Blast Desc: 1-aminocyclopropane-1-carboxylate synthase [Verticillium albo-atrum VaMs.102]
  misc_feature (8)..(410): SWISSPROT Homolog: EC 4.4.1.14 1-aminocyclopropane-1-carboxylate synthase
MLSSRGSGWAKIDFNHGAQNEYDAVTNPGGIVSFANAENWLLLDDLTSFINANAQFSKSHLTYGEGFTGTVRLRNAMANHINAHFNPVKKIDAEEITFAAGVTDLNEVCALITCDPGQCLMLGAPVYGAFSRDLVVRTGVELEYVDVGDTDQFTPACVAAFEKGYEDAKARGRDIKALIICNPHNPLGQCYPREALVELLKLCASKGIHLISDEIYALSTYAPTHGEPESFTSVRSIDFEAIIDPKQVHVLYGMSKDFGAAGLRLGCLVSQNEQFTKATRAICRFSSPSQFSMDLAAKILEDQVFVKKFLGQSSRCLTQARALAEELLTGIHISYHKTGNAGFFLWLDLSAYLPLSLDNDGWTAHRQLAQRFREAGVIMSSGEAYKSPQPGRFRLIFCIPEQSLREGIKRYAAVLTIANSLFLTDVLMQHCQCH

SEQ ID NO: 9218 - DNA, 1744 bp, Muscodor strobelii
  misc_feature: SGI EST ID NO. CUFF.21920.0
  misc_feature: Variant of the nucleotide sequence at SEQ ID NO 9216
tgactttatccgagtgaaattgtaaactgtacccgttttcatagcatctgcagtaccagaaactccataatacgcataatcttttacgctcgaagagcccacagtacaagaagatgctatcatcaagaggatcaggatgggccaaaatcgacttcaaccatggagctcaaaatgaatacgacgcagtcacgaaccctgggggtatcgtgagtttcgcaaacgcagagaactggcttctattggacgaccttacctccttcatcaatgcgaacgcacaattcagcaagtcccacctaacatacggcgaaggattcaccgggactgtccgtcttcggaatgccatggcaaaccacataaacgcacatttcaatcccgtcaaaaagatagatgccgaagaaatcacctttgcagcgggtgtaacagatcttaatgaagtctgcgcactaataacatgcgacccgggacagtgccttatgctaggcgcgcctgtttacggagctttctctagggaccttgtcgtcagaactggagtcgagctagagtatgtagatgtaggagataccgatcaattcacgccagcttgcgtggcggcattcgaaaagggatacgaggacgcaaaggcgaggggacgggatatcaaagcgctcattatatgtaatcctcataatcctcttggtcaatgctaccctcgagaagcattagtcgaactcctgaagctctgcgcatcaaagggtatccacctcataagcgatgagatatacgcactctctacatacgctcctacgcacggcgagccagaatcattcacttctgttcgctcgatcgacttcgaagccataatagacccgaagcaagttcacgttctctacggaatgtccaaagacttcggcgcagcaggtctgcggctaggatgtctcgtgtcacaaaatgagcagttcactaaggctacgagagcaatatgtcgcttctcatccccttcgcaattctccatggacctcgcagcgaagattctcgaagaccaagtattcgtcaaaaagtttctcgggcaatcgagtcgctgcttaacgcaagcgcgtgctctcgccgaagaattgctcaccggaatccatatttcgtatcataagacaggaaatgcaggattcttcctctggcttgatctctctgcttacttaccgctctcactggataacgatggatggacagcccacagacagctggcccaaaggttcagggaagcgggtgtcatcatgtcatctggtgaagcatacaaatcacctcagcctggaaggtttaggttgatattttgtatccctgaacagtctctgagggaaggtatcaagcgcattgccagtgtcattaagccttgatcttttactcttgagattatgaaggagtaaggtagatcctgtattgcaatgaaaaataccaggataccagatggtcctcatgagatattcgacgtatagaaatgttgttgttgatagagtggtaggatccacgggtgatgggttttgtagtacgtagatgcataatcttcagcatgacgaagtgacgcgtatgcatatactctgattgcttagtaaaaagtcgaaagtcaccacgcgttcgaaattcatatcgagcatggcgttcttacctttgagagtaattacgagccgcatacacgttcaaaatgcgacagagatgaaatctgaattccagatcatcagttttacacgatcatagcattgaattccgaagttcg

SEQ ID NO: 9219 - DNA, 1254 bp, Muscodor strobelii
  misc_feature: SGI cDNA ID NO. 562872
  misc_feature: Encodes the peptide sequence at SEQ ID NO 9220
atgctatcatcaagaggatcaggatgggccaaaatcgacttcaaccatggagctcaaaatgaatacgacgcagtcacgaaccctgggggtatcgtgagtttcgcaaacgcagagaactggcttctattggacgaccttacctccttcatcaatgcgaacgcacaattcagcaagtcccacctaacatacggcgaaggattcaccgggactgtccgtcttcggaatgccatggcaaaccacataaacgcacatttcaatcccgtcaaaaagatagatgccgaagaaatcacctttgcagcgggtgtaacagatcttaatgaagtctgcgcactaataacatgcgacccgggacagtgccttatgctaggcgcgcctgtttacggagctttctctagggaccttgtcgtcagaactggagtcgagctagagtatgtagatgtaggagataccgatcaattcacgccagcttgcgtggcggcattcgaaaagggatacgaggacgcaaaggcgaggggacgggatatcaaagcgctcattatatgtaatcctcataatcctcttggtcaatgctaccctcgagaagcattagtcgaactcctgaagctctgcgcatcaaagggtatccacctcataagcgatgagatatacgcactctctacatacgctcctacgcacggcgagccagaatcattcacttctgttcgctcgatcgacttcgaagccataatagacccgaagcaagttcacgttctctacggaatgtccaaagacttcggcgcagcaggtctgcggctaggatgtctcgtgtcacaaaatgagcagttcactaaggctacgagagcaatatgtcgcttctcatccccttcgcaattctccatggacctcgcagcgaagattctcgaagaccaagtattcgtcaaaaagtttctcgggcaatcgagtcgctgcttaacgcaagcgcgtgctctcgccgaagaattgctcaccggaatccatatttcgtatcataagacaggaaatgcaggattcttcctctggcttgatctctctgcttacttaccgctctcactggataacgatggatggacagcccacagacagctggcccaaaggttcagggaagcgggtgtcatcatgtcatctggtgaagcatacaaatcacctcagcctggaaggtttaggttgatattttgtatccctgaacagtctctgagggaaggtatcaagcgcattgccagtgtcattaagccttga

SEQ ID NO: 9220 - protein, 417 aa, Muscodor strobelii
  misc_feature: SGI Peptide ID NO. 562872
  misc_feature (29)..(411): Pfam Id: PF00155 Pfam Desc: Aminotransferase class I and II
  misc_feature (73)..(411): Pfam Id: PF00155 Pfam Desc: Aminotransferase class I and II
  misc_feature (1)..(413): NCBI GI: 256721792 Blast Desc: NECHADRAFT_97577 [Nectria haematococca mpVI 77-13-4]
  misc_feature (1)..(410): NCBI GI: 119483764 Blast Desc: acc synthase [Neosartorya fischeri NRRL 181] gi|119409941|gb|EAW19888.1| acc synthase [Neosartorya fischeri NRRL 181]
  misc_feature (1)..(414): NCBI GI: 242819738 Blast Desc: aminotransferase, classes I and II family [Talaromyces stipitatus ATCC 10500] gi|218713843|gb|EED13267.1| aminotransferase, classes I and II family [Talaromyces stipitatus
  misc_feature (1)..(411): NCBI GI: 189194105 Blast Desc: 1-aminocyclopropane-1-carboxylate synthase 1 [Pyrenophora tritici-repentis Pt-1C-BFP] gi|187978955|gb|EDU45581.1| 1-aminocyclopropane-1-carboxylate 1
  misc_feature (1)..(410): NCBI GI: 159123934 Blast Desc: aminotransferase, classes I and II family [Aspergillus fumigatus A1163]
  misc_feature (1)..(410): NCBI GI: 70983041 Blast Desc: aminotransferase, classes I and II family [Aspergillus fumigatus Af293] gi|66844673|gb|EAL85010.1| aminotransferase, classes I and II family [Aspergillus fumigatus Af293]
  misc_feature (1)..(416): NCBI GI: 145236715 Blast Desc: An06g01840 [Aspergillus niger] gi|134075466|emb|CAK48027.1| protein product [Aspergillus niger]
  misc_feature (1)..(410): NCBI GI: 238487426 Blast Desc: aspartate aminotransferase, [Aspergillus flavus NRRL3357] gi|220699830|gb|EED56169.1| aspartate aminotransferase, [Aspergillus flavus NRRL3357]
  misc_feature (2)..(416): NCBI GI: 238489283 Blast Desc: aspartate aminotransferase, [Aspergillus flavus NRRL3357] gi|220698267|gb|EED54607.1| aspartate aminotransferase, [Aspergillus flavus NRRL3357]
  misc_feature (26)..(415): NCBI GI: 169764389 Blast Desc: [Aspergillus oryzae RIB40] gi|83764520|dbj|BAE54664.1| protein product [Aspergillus oryzae]
  misc_feature (8)..(416): SWISSPROT Homolog: EC 4.4.1.14 1-aminocyclopropane-1-carboxylate synthase
MLSSRGSGWAKIDFNHGAQNEYDAVTNPGGIVSFANAENWLLLDDLTSFINANAQFSKSHLTYGEGFTGTVRLRNAMANHINAHFNPVKKIDAEEITFAAGVTDLNEVCALITCDPGQCLMLGAPVYGAFSRDLVVRTGVELEYVDVGDTDQFTPACVAAFEKGYEDAKARGRDIKALIICNPHNPLGQCYPREALVELLKLCASKGIHLISDEIYALSTYAPTHGEPESFTSVRSIDFEAIIDPKQVHVLYGMSKDFGAAGLRLGCLVSQNEQFTKATRAICRFSSPSQFSMDLAAKILEDQVFVKKFLGQSSRCLTQARALAEELLTGIHISYHKTGNAGFFLWLDLSAYLPLSLDNDGWTAHRQLAQRFREAGVIMSSGEAYKSPQPGRFRLIFCIPEQSLREGIKRIASVIKP

SEQ ID NO: 9221 - DNA, 1744 bp, Muscodor strobelii; identical to SEQ ID NO: 9218
  misc_feature: SGI EST ID NO. CUFF.21920.0
  misc_feature: Variant of the nucleotide sequence at SEQ ID NO 9219

SEQ ID NO: 9222 - DNA, 1725 bp, Muscodor strobelii
  misc_feature: SGI cDNA ID NO. 562873
  misc_feature: Encodes the peptide sequence at SEQ ID NO 9223
atgaaagacatattctttgactccaagttccgcggcatagaaaacgttgacattcttcgcgatacggatgccggtaaggatattgaattcgagcatgagggctactcagttcgcatttcgcagatgaaggatgtgctatgcaaacgtccgaaatcgtactatgatgctccacgatccaagaaagtggaagcacagacacatatgaaaataggaagggagcttgaacccgctatgggacgtaaggtcgaggatttgatgatagcacagctgatggctcaaggtgatcacccgccagttgttggcgcggacgatacgagagcaaagaacaggaggaaaaagtggttcaaatcatgtagaaccaaggccactcgggacttctgggttatgaaaaattctgtgcaaagagaggaactccgagatcttgcccagaataatttgcctcatgatcttgctaattttctaaagatcatcaaagatgaagaccattcacgttcgcaggatccgtacatccagcatcacagagattgggcggccgcagcggattccacgatatatactcgattagacaaagacattgtccttgttctagacggtgaaggcgagactattcttgcgtctgtgtcggagcttttccaagtactcttcggcataaacacgatgcagaaggttaccgaagcaatcacccaatggtcagcattacaaccgcttccgcagcctgagacaagtcgtcatagggttgacgaactgatccggcaatcacaccccgaactggatctcgaattggctcgcacaccaaaagaattggaggacaggggaacgtgcgtagttcactatggcacatgggcatgcaaaagccatggtgctcggccgaaggacgtattcctaactgcagatacggacttcgagcgtgcgattatctctaaacacgaagggccgaattatgcgaagatggtattcccagccttcaaaaagggggcacttggaatctcgtcagacgtagctggatttctgcttggcagtattgagaaagagtactacgcaaagtgtttagaatacttcgaggcccttcccgagagccggcgaacgccactatcctcgtcaacctggtcaacgttggtagcgctcggtgtgcgcagcttcactgagagacataaagacgccgctgatatcaaaaacgggttcgcggcactttgtgcgcttggcgactacgacggtggagatctgtgtcttccacagctaggacttaagctcaactacaaacccggaaactgtgtgatgtttcgaggtgccgaattggagcattttgttaccgattggaagggaaacagaatcttcttggttttcaccaatcaccagtcggtcagaaattgggttgaccagcaattacacgaagcgccagatcagacttcgtgcgaaaagaccgatcctgagccagacggtcaagcacgtacaaaagacatggacaggcagtctagcgacgactcagagaccgaatctgacgaagagtacgacatatgtattgaaaaacatttggatcctcaagaagataaaaatcttacggccaaggagctctatgggccttcactaacctattactatgattcttcttcttctggttccagccaaagcgatggcatggctgagcagagtgttgcactatcacatagcgatcagtactcttcattttctaagaggcagaagctagcgcctgaagaagaccagtaa

SEQ ID NO: 9223 - protein, 574 aa, Muscodor strobelii
  misc_feature: SGI Peptide ID NO. 562873
MKDIFFDSKFRGIENVDILRDTDAGKDIEFEHEGYSVRISQMKDVLCKRPKSYYDAPRSKKVEAQTHMKIGRELEPAMGRKVEDLMIAQLMAQGDHPPVVGADDTRAKNRRKKWFKSCRTKATRDFWVMKNSVQREELRDLAQNNLPHDLANFLKIIKDEDHSRSQDPYIQHHRDWAAAADSTIYTRLDKDIVLVLDGEGETILASVSELFQVLFGINTMQKVTEAITQWSALQPLPQPETSRHRVDELIRQSHPELDLELARTPKELEDRGTCVVHYGTWACKSHGARPKDVFLTADTDFERAIISKHEGPNYAKMVFPAFKKGALGISSDVAGFLLGSIEKEYYAKCLEYFEALPESRRTPLSSSTWSTLVALGVRSFTERHKDAADIKNGFAALCALGDYDGGDLCLPQLGLKLNYKPGNCVMFRGAELEHFVTDWKGNRIFLVFTNHQSVRNWVDQQLHEAPDQTSCEKTDPEPDGQARTKDMDRQSSDDSETESDEEYDICIEKHLDPQEDKNLTAKELYGPSLTYYYDSSSSGSSQSDGMAEQSVALSHSDQYSSFSKRQKLAPEEDQ

SEQ ID NO: 9224 - DNA, 384 bp, Muscodor strobelii
  misc_feature: SGI cDNA ID NO. 562874
  misc_feature: Encodes the peptide sequence at SEQ ID NO 9225
atgaagtttctcactaccctcgcatttcccattcttccttttactgctaatgccctctctggagagtcacccaatggcaacaacgtatctcgctacctgccgggcactttcagtaacgtaacgcaagctctgttgaaggacaatagcggtttcgtctctgtcgggcacgatggcgtgctacgctcctttgttcccaacgggaccgtcatcgactactaccagttagatccagatcaagtcaagcagtttgccgagagacagtactcggcatggagagtacacggggctggagacataccggctagtgtcgctgagctagcgcgtccgccatatccagacgggcgtctcgtggtcaatgaaaccagctccttttcccctccgtga

SEQ ID NO: 9225 - protein, 127 aa, Muscodor strobelii
  misc_feature: SGI Peptide ID NO. 562874
  misc_feature (48)..(126): NCBI GI: 226292242 Blast Desc: PADG_03746 [Paracoccidioides brasiliensis Pb18]
  misc_feature (48)..(125): NCBI GI: 226282592 Blast Desc: PAAG_01079 [Paracoccidioides brasiliensis Pb01]
  misc_feature (36)..(126): NCBI GI: 225678951 Blast Desc: [Paracoccidioides brasiliensis Pb03]
  misc_feature (44)..(80): NCBI GI: 226287954 Blast Desc: [Paracoccidioides brasiliensis Pb18]
  misc_feature (21)..(84): NCBI GI: 256725759 Blast Desc: [Nectria haematococca mpVI 77-13-4]
  misc_feature (1)..(120): NCBI GI: 146322962 Blast Desc: AFUA_2G13175 [Aspergillus fumigatus Af293] gi|129558547|gb|EBA27494.1| AFUA_2G13175 [Aspergillus fumigatus Af293] gi|159129707|gb|EDP54821.1| AFUB_028810 [Aspergillus
  misc_feature (28)..(126): NCBI GI: 116194906 Blast Desc: [Chaetomium globosum CBS 148.51] gi|88179964|gb|EAQ87432.1| [Chaetomium globosum CBS 148.51]
MKFLTTLAFPILPFTANALSGESPNGNNVSRYLPGTFSNVTQALLKDNSGFVSVGHDGVLRSFVPNGTVIDYYQLDPDQVKQFAERQYSAWRVHGAGDIPASVAELARPPYPDGRLVVNETSSFSPP

SEQ ID NO: 9226 - DNA, 666 bp, Muscodor strobelii
  misc_feature: SGI cDNA ID NO. 562875
  misc_feature: Elevated expression when VOC is produced
  misc_feature: Encodes the peptide sequence at SEQ ID NO 9227
atgagcattgatctgcaatcgcttattaaaggggagagctcactagattccggatatgagggaaggtttcaggcagcactgcgccgcaatacaaaagcacaccagacccagtctcaacaaccaaccgaacttgctcttcgacttatccctcagatccccaaaataaacctctggaaagagactctacgggagccgacttgctaccatcctttaccccgcagctattcgtttcagattgcagctatgtcagagcaaaccccccaacagacctgcggatcttggtcacgcgaagaccccgaccaacaggaactaagcaccatcatatccagcttcaaactagacgattatggcgttatatcattaggaaaggacggtattataaggtctctaaccgcggagcgcgatgtgatcggcgccgcgcctctccgcccgagcctcatcgcagcgttccatgccaggatgccgaaagagtaccttgataaatatctcactgccgagtgggatggcgccgatggattcaaggcgcctgaatccgcttggtacagccccgacaaaggcatcctaccagagccgttgagcgagctaaagaagaaagcggatatcgaggggtcgaaggggctgaagagccacgagtctcaagcctctggcgaggggcttaaaaaatag

SEQ ID NO: 9227 - protein, 221 aa, Muscodor strobelii
  misc_feature: SGI Peptide ID NO. 562875
  misc_feature (82)..(202): NCBI GI: 240275761 Blast Desc: conserved [Ajellomyces capsulatus H143]
  misc_feature (82)..(197): NCBI GI: 225563184 Blast Desc: conserved [Ajellomyces capsulatus G186AR]
  misc_feature (93)..(198): NCBI GI: 226292241 Blast Desc: conserved [Paracoccidioides brasiliensis Pb18]
  misc_feature (93)..(198): NCBI GI: 225681060 Blast Desc: conserved [Paracoccidioides brasiliensis Pb03]
  misc_feature (93)..(198): NCBI GI: 226282593 Blast Desc: conserved [Paracoccidioides brasiliensis Pb01]
  misc_feature (85)..(190): NCBI GI: 119183844 Blast Desc: [Coccidioides immitis RS]
  misc_feature (101)..(199): NCBI GI: 242810115 Blast Desc: conserved [Talaromyces stipitatus ATCC 10500] gi|218716139|gb|EED15561.1| conserved [Talaromyces stipitatus ATCC 10500]
  misc_feature (99)..(193): NCBI GI: 256720778 Blast Desc: NECHADRAFT_102850 [Nectria haematococca mpVI 77-13-4]
  misc_feature (88)..(196): NCBI GI: 169597189 Blast Desc: SNOG_01377 [Phaeosphaeria nodorum SN15] gi|160707464|gb|EAT91026.2| SNOG_01377 [Phaeosphaeria nodorum SN15]
  misc_feature (99)..(194): NCBI GI: 242778771 Blast Desc: conserved [Talaromyces stipitatus ATCC 10500] gi|218722925|gb|EED22343.1| conserved [Talaromyces stipitatus ATCC 10500]
  misc_feature: Useful for introducing or modulating the production of volatile compounds
MSIDLQSLIKGESSLDSGYEGRFQAALRRNTKAHQTQSQQPTELALRLIPQIPKINLWKETLREPTCYHPLPRSYSFQIAAMSEQTPQQTCGSWSREDPDQQELSTIISSFKLDDYGVISLGKDGIIRSLTAERDVIGAAPLRPSLIAAFHARMPKEYLDKYLTAEWDGADGFKAPESAWYSPDKGILPEPLSELKKKADIEGSKGLKSHESQASGEGLKK

SEQ ID NO: 9228 - DNA, 3372 bp, Muscodor strobelii
  misc_feature: SGI cDNA ID NO. 562876
  misc_feature: Reduced expression when VOC is produced
  misc_feature: Encodes the peptide sequence at SEQ ID NO 9229
caggcccctccttcgcccgccatacgcaacctgagcaatgttcagaatggtacgtcatcgcctgtaccgagcatcgacacgagtcgcattcccagccagccacctgtgctccgaaggctggcctccaacatgagtcaggattctatagcggcctcgatctcgacagcgcgaagcgacgatgcgacgagcctcccgccgagatcaagaggaggcatgacaggaccaggcgcattcgccagacagtcagagccaccagagggtccccctccacaagtcaatcttcccgacaggaggaggccaccgatggacccgttgaagataggcacacaaacggacaacgacctagtacccgcgccgcttagtgcacgcaaagatcctccaccgcgaagcagcgatcgcgccatgacacgaacagaatccacaggggccggctccgtgagcagcttcaaatcagacaccaagactatagtgtcggagaagtcgaacaatgcatctacagccgcactacccagcgcgaacgggactcccgagccctctaaatcacaagtaccagctgctgcgccaccgataccccccgaagacacacccaagacagaggaagagtcgaaacgaggcttgggccccatgatcagagcaaagaggtcacagaaggacttagcaggtacactatggaaggctgcatcggcggcgagtgctttcaagccacgcccaggtggggctggtgaacggttgcgagaggcggccaagaaggccagtgtggatggtccagacggtatcactggtgtcgtacctgccccacctcgccccgtggtagagccgccaaaacccgctgaagtgcccaagccacttgagccggcctcgaaatcaaacgagagactcacgcctgttcccgaggtgaagcttactgtgcctaattcttcacgacctacaagtctcgaggtccccgccaaggaggcgcagaggaaaatcgcagaagaaacacggaagagcgaggaagcacggcgcgtaactgtgccaagtaatgatgcgaggtatctatctactcttggtgtagatacgacgattctcgcagattcgacggccgagtttgccagctggttggaccatttcggatgggtccccggcaatcagatgcgcaccaagaactttgatgaaatgaagctcgacattgacagggaactgaacaaggcgcaggccggcggctgggttgctcggttccaggaagaagacgaaagggtagatgccatcaagaaaggattggatgttgctatcgctgaatgtgacgaactcgataatctcctgaccctttacagcgtcgagctttcgaccctatccgacgacattgcctacatagaagctcagggacagggcttgcaggtccaagctgccaatcagaaacttctccgaaacgaattggagtcgctcttgagcacctgtgccatcacgtcggatgacctgcgaggtcttaagatggcgcctctagagacgtcatcaggagtcgaagagattgagaatgcattagtcacactatacaaagcacagatgaagatcgatccctcggcagctatgtctgagccacgaaagagcgaagacaccagcattagcggcaagcaggccagcttcaatcctgattacggcaagatgcggatagtgcaagagaaaaaggaaatgtacttcactgaaagtcaaaacttcctgaaccgatttggaggattcatggctcgccagttcgacaagtccatacaagagacgaagtccgctatttccggtgctttggccaagaaggtggacccacgaaatcatgacgcagggcgcgacttgttatggcagtatagccctcttgtcctatatgcaaaggaggtgaatattgacgagtggtaccgctatatatccatataccaggagaagagcttcccactctatcggtcggagttcaaggacatcctcgatgcatggaagcgcaatgcgagaaagcctgcgggtgaagatagtgttgtgctcttcacggctcaagtagagaagcagcaagaagggacgatggcgacagccaggagagtcacagtcaagaggagccagactctggccaggagcttgggtcgacctctgggcgagggcaagtcaaattccgagaaagcaactgacgggcgcagtcacccctatgaagtctttgctggcattatggatgacttgctccccctagtcgagatcgagcagaacttcattgttgacttcttccacgccactaccctcgagacatctgacttcccggacttggtcgcggctagtcgaccacgcgacagacgaggtggtgacttgaaacgtcaccgactcatggaacccgatcgcgatttagctagacgagtcactcgcgctatggaggctatattctccttcctcgaacaagagcttcagaacttgatcctttgggtcttgtcacaagaccccttgcaaggagttggcgttcttgcagtcttggaacgcaagcaagttgaaatgacatcatctaatcaggactttttgaacaacatactacaaaaactcaatgggaatctcgaatcccggttctccaagttcgtcgaggagcaaatccgcgcaatcgaagacacgaaggttaagattaagaagcgcaagggagtcatctcattcatgcgagtatttccacatttctctgcggctgttgagaacatgttagctacgacagacaccgcctcctccgtccgacgagcggttgatcgagagtatgagcgaatcattaaatccatgttcgactcactgaaagttattgcccgagagaacccagccactcttactagcagtggtgccgaccccgaagacaaggaagcactgaactatcacatcctactcatagaaaacatgaaccacttcctggaagaactcaatacccacggcctcgaaatcctcgaggactggaaagaggccgcagctggcgagatggcggagcacatggggctatacctcaacgcagtcatgcgccgtccgcttgggaagttactcgaatacctcgagaatcttgagagccagatcgcgagcggcaagaacatgacgatcatcgctgcccaaccaagtaacagcaaggcaacattcaacaaggtactatctgcctacgacggaaaagaagttcgcaagggcatcgagtcattacggaaaagagtcgagaagcactttggagacgccgatgaccctagtcttagcagagacctcgtgaatcgtgtgctgaaggagtgtgagcgattctataacgatgtcgaggtcagaattgccaacgtcacgagcagtgtttataacggtgatgtgctgtttgagtggcctagagcggatgtcaaggtgtcgtttgcaaatcccgggcgctag

SEQ ID NO: 9229 - protein, 1123 aa, Muscodor strobelii
  misc_feature: SGI Peptide ID NO. 562876
  misc_feature (2)..(1123): NCBI GI: 261359389 Blast Desc: conserved [Verticillium albo-atrum VaMs.102]
  misc_feature (6)..(1123): NCBI GI: 85095799 Blast Desc: NCU09869 [Neurospora crassa OR74A] gi|28921628|gb|EAA30915.1| conserved [Neurospora crassa OR74A]
  misc_feature (14)..(1120): NCBI GI: 116202747 Blast Desc: CHGG_09258 [Chaetomium globosum CBS 148.51] gi|88177776|gb|EAQ85244.1| CHGG_09258 [Chaetomium globosum CBS 148.51]
  misc_feature (16)..(1118): NCBI GI: 256727166 Blast Desc: NECHADRAFT_76880 [Nectria haematococca mpVI 77-13-4]
  misc_feature (195)..(1118): NCBI GI: 46134209 Blast Desc: FG09244.1 [Gibberella zeae PH-1]
  misc_feature (16)..(1115): NCBI GI: 171682556 Blast Desc: protein product [Podospora anserina] gi|170941237|emb|CAP66887.1| protein product [Podospora anserina]
  misc_feature (36)..(1123): NCBI GI: 145608172 Blast Desc: MGG_03323 [Magnaporthe grisea 70-15] gi|145015668|gb|EDK00158.1| MGG_03323 [Magnaporthe grisea 70-15]
  misc_feature (37)..(1118): NCBI GI: 156064685 Blast Desc: SS1G_00350 [Sclerotinia sclerotiorum 1980] gi|154691212|gb|EDN90950.1| SS1G_00350 [Sclerotinia sclerotiorum 1980]
  misc_feature (197)..(1118): NCBI GI: 189190788 Blast Desc: conserved [Pyrenophora tritici-repentis Pt-1C-BFP] gi|187973339|gb|EDU40838.1| conserved [Pyrenophora tritici-repentis Pt-1C-BFP]
  misc_feature (184)..(1118): NCBI GI: 238486356 Blast Desc: Exocyst complex component Sec3, [Aspergillus flavus NRRL3357] gi|220699295|gb|EED55634.1| Exocyst complex component Sec3, [Aspergillus flavus NRRL3357]
  misc_feature: Useful for introducing or modulating the production of volatile compounds
QAPPSPAIRNLSNVQNGTSSPVPSIDTSRIPSQPPVLRRLASNMSQDSIAASISTARSDDATSLPPRSRGGMTGPGAFARQSEPPEGPPPQVNLPDRRRPPMDPLKIGTQTDNDLVPAPLSARKDPPPRSSDRAMTRTESTGAGSVSSFKSDTKTIVSEKSNNASTAALPSANGTPEPSKSQVPAAAPPIPPEDTPKTEEESKRGLGPMIRAKRSQKDLAGTLWKAASAASAFKPRPGGAGERLREAAKKASVDGPDGITGVVPAPPRPVVEPPKPAEVPKPLEPASKSNERLTPVPEVKLTVPNSSRPTSLEVPAKEAQRKIAEETRKSEEARRVTVPSNDARYLSTLGVDTTILADSTAEFASWLDHFGWVPGNQMRTKNFDEMKLDIDRELNKAQAGGWVARFQEEDERVDAIKKGLDVAIAECDELDNLLTLYSVELSTLSDDIAYIEAQGQGLQVQAANQKLLRNELESLLSTCAITSDDLRGLKMAPLETSSGVEEIENALVTLYKAQMKIDPSAAMSEPRKSEDTSISGKQASFNPDYGKMRIVQEKKEMYFTESQNFLNRFGGFMARQFDKSIQETKSAISGALAKKVDPRNHDAGRDLLWQYSPLVLYAKEVNIDEWYRYISIYQEKSFPLYRSEFKDILDAWKRNARKPAGEDSVVLFTAQVEKQQEGTMATARRVTVKRSQTLARSLGRPLGEGKSNSEKATDGRSHPYEVFAGIMDDLLPLVEIEQNFIVDFFHATTLETSDFPDLVAASRPRDRRGGDLKRHRLMEPDRDLARRVTRAMEAIFSFLEQELQNLILWVLSQDPLQGVGVLAVLERKQVEMTSSNQDFLNNILQKLNGNLESRFSKFVEEQIRAIEDTKVKIKKRKGVISFMRVFPHFSAAVENMLATTDTASSVRRAVDREYERIIKSMFDSLKVIARENPATLTSSGADPEDKEALNYHILLIENMNHFLEELNTHGLEILEDWKEAAAGEMAEHMGLYLNAVMRRPLGKLLEYLENLESQIASGKNMTIIAAQPSNSKATFNKVLSAYDGKEVRKGIESLRKRVEKHFGDADDPSLSRDLVNRVLKECERFYNDVEVRIANVTSSVYNGDVLFEWPRADVKVSFANPGR

SEQ ID NO: 9230 - DNA, 4075 bp, Muscodor strobelii
  misc_feature: SGI EST ID NO. CUFF.21940.0
  misc_feature: Variant of the nucleotide sequence at SEQ ID NO 9228
aggccctgtcgagcaacaacaattcttctacttccctaagcggccctccccccagccaggcccctccttcgcccgccatacgcaacctgagcaatgttcagaatggtacgtcatcgcctgtaccgagcatcgacacgagtcgcattcccagccagccacctgtgctccgaaggctggcctccaacatgagtcaggattctatagcggcctcgatctcgacagcgcgaagcgacgatgcgacgagcctcccgccgagatcaagaggaggcatgacaggaccaggcgcattcgccagacagtcagagccaccagagggtccccctccacaagtcaatcttcccgacaggaggaggccaccgatggacccgttgaagataggcacacaaacggacaacgacctagtacccgcgccgcttagtgcacgcaaagatcctccaccgcgaagcagcgatcgcgccatgacacgaacagaatccacaggggccggctccgtgagcagcttcaaatcagacaccaagactatagtgtcggagaagtcgaacaatgcatctacagccgcactacccagcgcgaacgggactcccgagccctctaaatcacaagtaccagctgctgcgccaccgataccccccgaagacacacccaagacagaggaagagtcgaaacgaggcttgggccccatgatcagagcaaagaggtcacagaaggacttagcaggtacactatggaaggctgcatcggcggcgagtgctttcaagccacgcccaggtggggctggtgaacggttgcgagaggcggccaagaaggccagtgtggatggtccagacggtatcactggtgtcgtacctgccccacctcgccccgtggtagagccgccaaaacccgctgaagtgcccaagccacttgagccggcctcgaaatcaaacgagagactcacgcctgttcccgaggtgaagcttactgtgcctaattcttcacgacctacaagtctcgaggtccccgccaaggaggcgcagaggaaaatcgcagaagaaacacggaagagcgaggaagcacggcgcgtaactgtgccaagtaatgatgcgaggtatctatctactcttggtgtagatacgacgattctcgcagattcgacggccgagtttgccagctggttggaccatttcggatgggtccccggcaatcagatgcgcaccaagaactttgatgaaatgaagctcgacattgacagggaactgaacaaggcgcaggccggcggctgggttgctcggttccaggaagaagacgaaagggtagatgccatcaagaaaggattggatgttgctatcgctgaatgtgacgaactcgataatctcctgaccctttacagcgtcgagctttcgaccctatccgacgacattgcctacatagaagctcagggacagggcttgcaggtccaagctgccaatcagaaacttctccgaaacgaattggagtcgctcttgagcacctgtgccatcacgtcggatgacctgcgaggtcttaagatggcgcctctagagacgtcatcaggagtcgaagagattgagaatgcattagtcacactatacaaagcacagatgaagatcgatccctcggcagctatgtctgagccacgaaagagcgaagacaccagcattagcggcaagcaggccagcttcaatcctgattacggcaagatgcggatagtgcaagagaaaaaggaaatgtacttcactgaaagtcaaaacttcctgaaccgatttggaggattcatggctcgccagttcgacaagtccatacaagagacgaagtccgctatttccggtgctttggccaagaaggtggacccacgaaatcatgacgcagggcgcgacttgttatggcagtatagccctcttgtcctatatgcaaaggaggtgaatattgacgagtggtaccgctatatatccatataccaggagaagagcttcccactctatcggtcggagttcaaggacatcctcgatgcatggaagcgcaatgcgagaaagcctgcgggtgaagatagtgttgtgctcttcacggctcaagtagagaagcagcaagaagggacgatggcgacagccaggagagtcacagtcaagaggagccagactctggccaggagcttgggtcgacctctgggcgagggcaagtcaaattccgagaaagcaactgacgggcgcagtcacccctatgaagtctttgctggcattatggatgacttgctccccctagtcgagatcgagcagaacttcattgttgacttcttccacgccactaccctcgagacatctgacttcccggacttggtcgcggctagtcgaccacgcgacagacgaggtggtgacttgaaacgtcaccgactcatggaacccgatcgcgatttagctagacgagtcactcgcgctatggaggctatattctccttcctcgaacaagagcttcagaacttgatcctttgggtcttgtcacaagaccccttgcaaggagttggcgttcttgcagtcttggaacgcaagcaagttgaaatgacatcatctaatcaggactttttgaacaacatactacaaaaactcaatgggaatctcgaatcccggttctccaagttcgtcgaggagcaaatccgcgcaatcgaagacacgaaggttaagattaagaagcgcaagggagtcatctcattcatgcgagtatttccacatttctctgcggctgttgagaacatgttagctacgacagacaccgcctcctccgtccgacgagcggttgatcgagagtatgagcgaatcattaaatccatgttcgactcactgaaagttattgcccgagagaacccagccactcttactagcagtggtgccgaccccgaagacaaggaagcactgaactatcacatcctactcatagaaaacatgaaccacttcctggaagaactcaatacccacggcctcgaaatcctcgaggactggaaagaggccgcagctggcgagatggcggagcacatggggctatacctcaacgcagtcatgcgccgtccgcttgggaagttactcgaatacctcgagaatcttgagagccagatcgcgagcggcaagaacatgacgatcatcgctgcccaaccaagtaacagcaaggcaacattcaacaaggtactatctgcctacgacggaaaagaagttcgcaagggcatcgagtcattacggaaaagagtcgagaagcactttggagacgccgatgaccctagtcttagcagagacctcgtgaatcgtgtgctgaaggagtgtgagcgattctataacgatgtcgaggtcagaattgccaacgtcacgagcagtgtttataacggtgatgtgctgtttgagtggcctagagcggatgtcaaggtgtcgtttgcaaatcccgggcgctagcagcggaattcccgggatgaacaatcgggactgacgaagagtctgggcaggaagggcagctcgtttggcctcaacctgaagattggtgggcccgttagtatgggcattaggaagttcgaagaggccgaggcgaagagacgggtgtctggcgaaagcacaccagcaaggagtccgattgcaggagtcttctcgtctagaagtcctactattgcaagtttcaaagataacgatagtcttaaggggagtgtaagggaaacggacaaggactcgctgaggggcagtgtcaaggaggtggatagtccgagggagtcctcttcgttgagaggcagtctgagaagtatagggaacctcaagggaaaggatggcggcatcagagatagtcctgagctcattactgggtcgcgaaaggggagtctgaggtccttgacggaataggagagctgtgtatcgatatcgttacctaggtaaaggggagcgagcactgacaggagttggggcggtgatgctgagtgtatggattatgattagatgatgaaatattgtcttgcttatactgtgttgtttgattgacgacgacagttgacacgtgtatgctgtactaccgttgagctggaatattgttcattgctgtgttcgttacccttatg

SEQ ID NO: 9231 - DNA, 1236 bp, Muscodor strobelii
  misc_feature: SGI cDNA ID NO. 562877
  misc_feature: Encodes the peptide sequence at SEQ ID NO 9232
atggcagatctacacgtctggggcggcgaaatagcagcgagacaccaagaactaatcgaccacttcgcaccgcaacacgagcgctaccgcgtcgacgacgtcatatcacacggtgcctacggtgttacgctgcgtgttctcgagctgggagaggagatcgggtttaaggaggggaagtttttgagaggggttaaaagagtacggaggggtgtgaagtcgataaagaagagttttagaaagttgaaggttcctattgctgatgcggtggtgggggaggttgtgtatgaggatgaggaagaggaggaggttgagaggagggttttgaggaggttgtgtgttaagttgagtattgatgatgaggatgataaattacggcaggagattaggacgctcaggtcgattaatggcagcaagcacgttgtcggacttatagcctatcgagacgatccggtgcccgtcgcaacgcggctttcgggtcttccttttcctcgtgttctgtccggacagggtgatttcttggccgggtgggctggtccggttattgtgttagaatgtgatactataccgcctaaccgtgtcctttggtctttctacctttgccttattcgcgcatgtgtcgcacttctctaccccaaagccctggacccaggtgccgacccggtactagagtccctgcctcagcctgatggcgtcgcctttggaatagagcataacgatatatactcatccaatgtgatggttggagatctagagccttcgctcccggaacacagtcttcttcccaccttaaaattgatcgacttcggagaggcacgggatgagaacgctccagaggacgctgcgtctgcaaatttttatactgtatcagatttgatgttatctctcatcgtccgcgatgtcctagccaaccctgaacaggcacattggcagggcattctgacagacgcgggacaaatcgttccccctgatcctgatccctatggaggatactatggaggatacgttgatttcgacgagggcgatgatccatatccacatgtggatttggagatgagggaccttatttgtcgcgctatggccgtggatgagggagagcgcataccgcttgctcaggcgtatgatgttgcgatgagatgtatcactaaaggggagaatgcgtttttactcagtgggacggccgagtcggatgacgatcttcgggagtttgtgcaaaacatgattcttaatcctgcatag

SEQ ID NO: 9232 - protein, 411 aa, Muscodor strobelii
  misc_feature: SGI Peptide ID NO. 562877
  misc_feature (115)..(285): NCBI GI: 85081014 Blast Desc: NCU05146 [Neurospora crassa OR74A] gi|28881434|emb|CAD70551.1| [Neurospora crassa] gi|28917716|gb|EAA27408.1| [Neurospora crassa OR74A]
MADLHVWGGEIAARHQELIDHFAPQHERYRVDDVISHGAYGVTLRVLELGEEIGFKEGKFLRGVKRVRRGVKSIKKSFRKLKVPIADAVVGEVVYEDEEEEEVERRVLRRLCVKLSIDDEDDKLRQEIRTLRSINGSKHVVGLIAYRDDPVPVATRLSGLPFPRVLSGQGDFLAGWAGPVIVLECDTIPPNRVLWSFYLCLIRACVALLYPKALDPGADPVLESLPQPDGVAFGIEHNDIYSSNVMVGDLEPSLPEHSLLPTLKLIDFGEARDENAPEDAASANFYTVSDLMLSLIVRDVLANPEQAHWQGILTDAGQIVPPDPDPYGGYYGGYVDFDEGDDPYPHVDLEMRDLICRAMAVDEGERIPLAQAYDVAMRCITKGENAFLLSGTAESDDDLREFVQNMILNPA

SEQ ID NO: 9233 - DNA, 1233 bp, Muscodor strobelii
  misc_feature: SGI cDNA ID NO. 562878
  misc_feature: Encodes the peptide sequence at SEQ ID NO 9234
atggcgcatttcatagatcttccttgcgagctgatcattgccgtgttgaagcagctctgcggtttcggcgaccttctcccattcattctcacatgtcgtcacttctatctctcgtacaaagaagtatcgacctcttcgattgctctcgccataatcaagcgacaggttggcccggatctacttcactattccgtcgcagtcaatgaggcccagcgctggcgaagtaatcttccgtcgttgcctatctgcgagctggtcaagatctcacacgatgagtcggccatcctactcaactgcctgcattcctatcctctagaagacatcgtattgatgggacgtatgcacacgttggtcgaaaaatatgcagagaaatttgcatcgcaagccggcgcttacatcgagcaccctacgcaccacccatggagccgacacaaattcaatatctcttcgaccagcctctctctttcttcgagcgagaagtttcgcttctaccgcgccttttaccgcttcgagctatttatcacgctttttcccggccaatgcgattacgctgatgatccggatgatcaagacttccacgtattcttctcgaagtttacgccaccggagctcgaacagctttgttgcgtctacgacttcctccaccgagagtggtgcaaagcacttgccaaactggtgcaatctaggtcagatgcatacatactgaacatggtttgcgggggagatgaccaatggtgctcgaattttggattggatatgactaagaatggcttagtctcagaagggctttatttcataaattggattgagggaaaaaagcccaatacagaagtgctggagcagatgtggaccaatatcaattacatgttccgcgttcgcattgaggaagtacgcctaaaaagctacaatatgcgcattcgcgaacgtggtgccgcgggagaaggcaaatctttctctattggcaccgacacccaagacaaggacaaaggaccggccatcgcttggagttatcctcccgtatccgccctggatggtcatgacatgtgggcggaaagaaatggcgccaacagactgtgcgcctatgttttctgggattcagctcacgttgaagaatacaaaatgaaggagttattcttgcaacaattcaacaagcccttgatgccggagtttctagacgcagaagagtggctcgaggagctactggaggcatcgtgtcacgccgcggttgagtga

SEQ ID NO: 9234 - protein, 410 aa, Muscodor strobelii
  misc_feature: SGI Peptide ID NO. 562878
  misc_feature (7)..(214): NCBI GI: 240109431 Blast Desc: CPC735_029360 [Coccidioides posadasii C735 delta SOWgp]
  misc_feature (7)..(214): NCBI GI: 119182895 Blast Desc: [Coccidioides immitis RS]
  misc_feature (4)..(216): NCBI GI: 238845280 Blast Desc: conserved [Microsporum canis CBS 113480]
  misc_feature (7)..(372): NCBI GI: 258571307 Blast Desc: [Uncinocarpus reesii 1704] gi|237904727|gb|EEP79128.1| [Uncinocarpus reesii 1704]
  misc_feature (15)..(216): NCBI GI: 258571670 Blast Desc: [Uncinocarpus reesii 1704] gi|237904908|gb|EEP79309.1| [Uncinocarpus reesii 1704]
  misc_feature (105)..(364): NCBI GI: 238841616 Blast Desc: conserved [Microsporum canis CBS 113480]
MAHFIDLPCELIIAVLKQLCGFGDLLPFILTCRHFYLSYKEVSTSSIALAIIKRQVGPDLLHYSVAVNEAQRWRSNLPSLPICELVKISHDESAILLNCLHSYPLEDIVLMGRMHTLVEKYAEKFASQAGAYIEHPTHHPWSRHKFNISSTSLSLSSSEKFRFYRAFYRFELFITLFPGQCDYADDPDDQDFHVFFSKFTPPELEQLCCVYDFLHREWCKALAKLVQSRSDAYILNMVCGGDDQWCSNFGLDMTKNGLVSEGLYFINWIEGKKPNTEVLEQMWTNINYMFRVRIEEVRLKSYNMRIRERGAAGEGKSFSIGTDTQDKDKGPAIAWSYPPVSALDGHDMWAERNGANRLCAYVFWDSAHVEEYKMKELFLQQFNKPLMPEFLDAEEWLEELLEASCHAAVE

SEQ ID NO: 9235 - DNA, 1062 bp, Muscodor strobelii
  misc_feature: SGI cDNA ID NO. 562879
  misc_feature: Encodes the peptide sequence at SEQ ID NO 9236
atggcttcactcgttgaggtaattggattgatatcaggtatccttggtatcatccaattcagcaaaaccaatttccccgaaaaagataaggtgggctctattgtaagagtcacagtcggtcttgactacaaaaagggacttaacaatgcgggtggtgatctacctgatgtccggctctggaacgaggctgccggtttcatcggcattaaagtcgatcctggctcagttgacacgggaagctatggcgacataaccattcatcataaacacaataccaatcagcaagccacctatactctgttctctgcgaacaacgacgcaatctgcattgccctcgcctccatcacctggccgagtggtgaccaatatatgtgggttggcgactggggccgacagtgtggaggatcttggtatcactcccacgtcttcattggggagtctaaataccagccggactgtctttggatcgatgggaatggtgaccaacctcaaactgggtttcaagtacactggcctgactttgcccctaaatacaacgccatccccgatgacgaggctggcaagaatgacacgatcaactatctttgcactacgggaccgccctttcaattacggacagatccggatcctcacaccgtcatctatttccccctggggagccgatcggtagagactgccgatgaacctcaggttgcgaggaactacggctcttcgaagcattcaaggcctgcgcgattccagaacagacattatccacgaggcaacagcactgccgcatcgcaaattgccgccagtctagtcatcaataacagtgacaaacactcggcggacgatctttgcagcagtgaaacctcttatgggcctgatttcctccatactggcacgggaactttctgtcgtatgtctgataagaccgtgtggccagtttgcgacggtgcgagtgtcatagacaactgcttcaataccgacatacagcagctagtaaggaacggtgtcgccacaagagatgcgccgtactcacgaattatcgattggacctgtggaactaattgtgatgcttaa

SEQ ID NO: 9236 - protein, 353 aa, Muscodor strobelii
  misc_feature: SGI Peptide ID NO. 562879
  misc_feature (2)..(350): NCBI GI: 171682656 Blast Desc: protein product [Podospora anserina] gi|170941287|emb|CAP66937.1| protein product [Podospora anserina]
  misc_feature (1)..(345): NCBI GI: 39942458 Blast Desc: MGG_03309 [Magnaporthe grisea 70-15] gi|145015685|gb|EDK00175.1| MGG_03309 [Magnaporthe grisea 70-15]
  misc_feature (1)..(345): NCBI GI: 67540572 Blast Desc: AN6456.2 [Aspergillus nidulans FGSC A4] gi|40739288|gb|EAA58478.1| AN6456.2 [Aspergillus nidulans FGSC A4] gi|259479315|tpe|CBF69436.1| TPA: conserved [Aspergillus FGSC
  misc_feature (3)..(345): NCBI GI: 238838945 Blast Desc: conserved [Microsporum canis CBS 113480]
  misc_feature (4)..(346): NCBI GI: 171676806 Blast Desc: protein product [Podospora anserina] gi|170936470|emb|CAP61127.1| protein product [Podospora anserina]
  misc_feature (36)..(345): NCBI GI: 149209779 Blast Desc: MGCH7_ch7g372 [Magnaporthe grisea 70-15] gi|86196327|gb|EAQ70965.1| MGCH7_ch7g372 [Magnaporthe grisea 70-15]
  misc_feature (4)..(345): NCBI GI: 256729453 Blast Desc: NECHADRAFT_84041 [Nectria haematococca mpVI 77-13-4]
  misc_feature (25)..(343): NCBI GI: 240106694 Blast Desc: CPC735_014790 [Coccidioides posadasii C735 delta SOWgp]
  misc_feature (4)..(137): NCBI GI: 171690696 Blast Desc: protein product [Podospora anserina] gi|170945296|emb|CAP71408.1| protein product [Podospora anserina]
  misc_feature (25)..(343): NCBI GI: 119174098 Blast Desc: CIMG_09031 [Coccidioides immitis RS]
MASLVEVIGLISGILGIIQFSKTNFPEKDKVGSIVRVTVGLDYKKGLNNAGGDLPDVRLWNEAAGFIGIKVDPGSVDTGSYGDITIHHKHNTNQQATYTLFSANNDAICIALASITWPSGDQYMWVGDWGRQCGGSWYHSHVFIGESKYQPDCLWIDGNGDQPQTGFQVHWPDFAPKYNAIPDDEAGKNDTINYLCTTGPPFQLRTDPDPHTVIYFPLGSRSVETADEPQVARNYGSSKHSRPARFQNRHYPRGNSTAASQIAASLVINNSDKHSADDLCSSETSYGPDFLHTGTGTFCRMSDKTVWPVCDGASVIDNCFNTDIQQLVRNGVATRDAPYSRIIDWTCGTNCDA

SEQ ID NO: 9237 - DNA, 177 bp, Muscodor strobelii
  misc_feature: SGI EST ID NO. CUFF.21961.0
  misc_feature: Variant of the nucleotide sequence at SEQ ID NO 9235
gccggactgtctttggatcgatgggaatggtgaccaacctcaaactgggtttcaagtacactggcctgactttgcccctaaatacaacgccatccccgatgacgaggctggcaagaatgacacgatcaactatctttgcactacgggaccgccctttcaattacggacagatccgga

SEQ ID NO: 9238 - DNA, 237 bp, Muscodor strobelii
  misc_feature: SGI cDNA ID NO. 562880
  misc_feature: Encodes the peptide sequence at SEQ ID NO 9239
atgtataagattcagcgagctgcctgggataatctcgacatgggtattagactactgtcaagcaaggattccatctcttctcagcttgctcctctattcggtgccggcgaaagtctgagcgaaaatgacacacttgaggccctcgaaccaatgcgcactttacagatcgtcgagaaaggatcacccaagtcaacacacgagggcaaatacgactacttggatagggtcgaggggtga

SEQ ID NO: 9239 - protein, 78 aa, Muscodor strobelii
  misc_feature: SGI Peptide ID NO. 562880
MYKIQRAAWDNLDMGIRLLSSKDSISSQLAPLFGAGESLSENDTLEALEPMRTLQIVEKGSPKSTHEGKYDYLDRVEG

SEQ ID NO: 9240 - DNA, 1008 bp, Muscodor strobelii
  misc_feature: SGI cDNA ID NO. 562881
  misc_feature: Elevated expression when VOC is produced
  misc_feature: Encodes the peptide sequence at SEQ ID NO 9241
atgttacggtggggtatcttaggaacatcctttatttccgatgtggtagccaaggctataatcgcatctcatgactcgcgaatttccgcagtatttggacgcaatgagagtcgactcgcttcttttgcggagaggtacagcattgcagcgaagtacacaagcattgacgctctactcgacaatgacagcgtagatgtggtgtacgtggggctgccaagccacaaacatgccgaagtcacgattgcagctgcaaagaagggaaaggcgatcttgagtgagaaagcacttgcgaccactatgacagatagtcatgcgatgatggacgcggtaaaagagagcggggtgttcttcctcgaaggtctgatgtatctttgtcaccctgtgcatgagcaactcgtggagatcatcaaggacggcaaattgggcaagatcaagggcgtatcaggatactatgcggcaaacattgcagggaaagcaaatccgcttggtaaagggacgatatacaatctcgggtgctatcctgtctctttactgcacctggtgatcgacgctgcctacggatccgatgcatgggagagacggacagtgctggggcatggaaacttagcacacaatgatggagttgcgcatgtccgagatgctgcattcactgcaagattcgacacgggagctttagctacgcttcaaagcaccgattcgtttggtaacgatttcgatttcaagattcagggcgacaaggcggtgttaagattcgaaaccaatccttggctgccgcccgccggagagaacattctaacgattaagccttacaacggaggaatagagagaattgtgatcccgagcaaaggagatgcctttgcatgccaagtgaagagagtcgaagactgtttcgcgaaggggttgaaggaggctcccagaccaagccccagcagggcggattcagtcaagattatgaacttccttaccgagtgggaaaaagacatcatgcaaagacacgcgcagcagtaa

SEQ ID NO: 9241 - protein, 335 aa, Muscodor strobelii
  misc_feature: SGI Peptide ID NO. 562881
  misc_feature (2)..(121): Pfam Id: PF01408 Pfam Desc: Oxidoreductase family, NAD-binding Rossmann fold
  misc_feature (1)..(329): NCBI GI: 261354156 Blast Desc: oxidoreductase domain-containing protein [Verticillium albo-atrum VaMs.102]
  misc_feature (1)..(332): NCBI GI: 46114318 Blast Desc: FG03001.1 [Gibberella zeae PH-1]
  misc_feature (2)..(325): NCBI GI: 163740539 Blast Desc: RG210_10567 [Phaeobacter gallaeciensis 2.10] gi|161386397|gb|EDQ10772.1| RG210_10567 [Phaeobacter gallaeciensis 2.10]
  misc_feature (2)..(326): NCBI GI: 90411755 Blast Desc: P3TCK_17917 [Photobacterium profundum 3TCK] gi|90327317|gb|EAS43681.1| P3TCK_17917 [Photobacterium profundum 3TCK]
  misc_feature (2)..(325): NCBI GI: 87120429 Blast Desc: MED121_09558 [Marinomonas sp. MED121] gi|86164532|gb|EAQ65802.1| MED121_09558 [Marinomonas sp. MED121]
  misc_feature (2)..(325): NCBI GI: 157376740 Blast Desc: oxidoreductase domain-containing protein [Shewanella sediminis HAW-EB3] gi|157319114|gb|ABV38212.1| oxidoreductase domain protein [Shewanella sediminis HAW-EB3]
  misc_feature (2)..(325): NCBI GI: 254471012 Blast Desc: oxidoreductase domain protein [Pseudovibrio sp. JE062] gi|211960154|gb|EEA95351.1| oxidoreductase domain protein [Pseudovibrio sp. JE062]
  misc_feature (2)..(325): NCBI GI: 153831798 Blast Desc: oxidoreductase [Vibrio harveyi HY01] gi|148871796|gb|EDL70619.1| oxidoreductase [Vibrio harveyi HY01]
  misc_feature (2)..(325): NCBI GI: 269963664 Blast Desc: conserved [Vibrio harveyi 1DA3] gi|269831576|gb|EEZ85713.1| conserved [Vibrio harveyi 1DA3]
  misc_feature (2)..(324): NCBI GI: 261251065 Blast Desc: oxidoreductase [Vibrio orientalis CIP 102891] gi|260937938|gb|EEX93926.1| oxidoreductase [Vibrio orientalis CIP 102891]
  misc_feature (3)..(323): SWISSPROT Homolog: EC 1.3.1.20 Trans-1,2-dihydrobenzene-1,2-diol dehydrogenase
  misc_feature (3)..(323): SWISSPROT Homolog: EC 1.1.1.179 D-xylose 1-dehydrogenase (NADP(+))
  misc_feature: Useful for introducing or modulating the production of volatile compounds
MLRWGILGTSFISDVVAKAIIASHDSRISAVFGRNESRLASFAERYSIAAKYTSIDALLDNDSVDVVYVGLPSHKHAEVTIAAAKKGKAILSEKALATTMTDSHAMMDAVKESGVFFLEGLMYLCHPVHEQLVEIIKDGKLGKIKGVSGYYAANIAGKANPLGKGTIYNLGCYPVSLLHLVIDAAYGSDAWERRTVLGHGNLAHNDGVAHVRDAAFTARFDTGALATLQSTDSFGNDFDFKIQGDKAVLRFETNPWLPPAGENILTIKPYNGGIERIVIPSKGDAFACQVKRVEDCFAKGLKEAPRPSPSRADSVKIMNFLTEWEKDIMQRHAQQ

SEQ ID NO: 9242 - DNA, 1266 bp, Muscodor strobelii
  misc_feature: SGI EST ID NO. CUFF.21970.0
  misc_feature: Variant of the nucleotide sequence at SEQ ID NO 9240
cgcgattgaaaactacagtcgttttgtattccgcattctatcttgaattgtttccaataagttgctaactcgcgctgttaacctctcactacagaacatactaggccaacatgttacggtggggtatcttaggaacatcctttatttccgatgtggtagccaaggctataatcgcatctcatgactcgcgaatttccgcagtatttggacgcaatgagagtcgactcgcttcttttgcggagaggtacagcattgcagcgaagtacacaagcattgacgctctactcgacaatgacagcgtagatgtggtgtacgtggggctgccaagccacaaacatgccgaagtcacgattgcagctgcaaagaagggaaaggcgatcttgagtgagaaagcacttgcgaccactatgacagatagtcatgcgatgatggacgcggtaaaagagagcggggtgttcttcctcgaaggtctgatgtatctttgtcaccctgtgcatgagcaactcgtggagatcatcaaggacggcaaattgggcaagatcaagggcgtatcaggatactatgcggcaaacattgcagggaaagcaaatccgcttggtaaagggacgatatacaatctcgggtgctatcctgtctctttactgcacctggtgatcgacgctgcctacggatccgatgcatgggagagacggacagtgctggggcatggaaacttagcacacaatgatggagttgcgcatgtccgagatgctgcattcactgcaagattcgacacgggagctttagctacgcttcaaagcaccgattcgtttggtaacgatttcgatttcaagattcagggcgacaaggcggtgttaagattcgaaaccaatccttggctgccgcccgccggagagaacattctaacgattaagccttacaacggaggaatagagagaattgtgatcccgagcaaaggagatgcctttgcatgccaagtgaagagagtcgaagactgtttcgcgaaggggttgaaggaggctcccagaccaagccccagcagggcggattcagtcaagattatgaacttccttaccgagtgggaaaaagacatcatgcaaagacacgcgcagcagtaagatatcggattcaaagttgtaaatatagtagataacgcttataggacgtgtctacggcgagagacgcaacgtagacagcggcgatcatcaatctacaagcaaccgctcgctagctattcggcatgaatcctgttaacagttgagcaag

SEQ ID NO: 9243 - DNA, 1419 bp, Muscodor strobelii
  misc_feature: SGI cDNA ID NO. 562882
  misc_feature: Elevated expression when VOC is produced
  misc_feature: Encodes the peptide sequence at SEQ ID NO 9244
atgccgacgcctcctgacggctcttcgctcataaactcaacggcgacggagcggttcaatgtgacttatcccggtcctacatacaatggcattggaggccctgtaaatatctgcgatgttgaagtatttttgacccatggcgatgctggcgatgctgttcgattctccatttacctaccacttgatggatggaatggcaggtggcagggcacaggcggaggtggtttcgcggcgggtgggtttgatttcgagcttattcccgctgcgaccagtggcttttccgccggggcaacggatgctgggacgcccttggatggtaacacggatgggtggtacaatgatccccaattagtcgaaaacttcgtgcatctatcatttcacgaaatgacggtccttggtaaggatttgtccgagaaattctatggaaagaagccggagtatagctattggtttgggtgtagcacgggcggtaggcaggggatgagtgaagcccaacgctacccagatgactatgatggtattctcgcagccgccccggctattaattggggtaggctacttgtcgctgattacttcccactcactgcacaaagccaaggcggcgagccggtgccactgtgcaaattgggcgcaatcggaaatgcgagtgttgatgcatgcgacatgcttgacggtgctgctgatggattaatcagtaatcctctcaagtgcaagttcgatgcgctgagtatcgtgggcatggaagtctcctgcaacggaaatacgactgttaccatcactgagcgagacgcagccgtctggaatgaaattcgagacgggttcaaagacgagggcgaaaactttctgtggtatggactacaacccggtactgacctgaacacgcaagccatacaacctggatttctcctgccgaggcagtggattgcggattggttactcgatgaccctagcgccgatgtcagcgatattcggcaaagcgagctcgtgaaactattccatcagtctgtctcacaatttgatgctctctggggaactgataaccctgatctttccgcttttcagagtcatggaggcaagctactgacatggcatgggtgggccgacgagcttatcacacctcaggggacactggattactggcaacgtgtggtagacttggttggcggagtggacaagactgatgagttttatcgcatcttcatggctccaggtttaggccactgcgggaatggacctggcccccagatcccacatgacaacctggcacctcttgtagattgggtcgaaaacggcaatcctcctcagacgatattgttctctggaaacgggcagtcaagaaacctttgcaagtttcccatggaactacaatacaaaggggacggcaacatgagcgactctgcaagttggcattgtgtatga

SEQ ID NO: 9244 - protein, 472 aa, Muscodor strobelii
  misc_feature: SGI Peptide ID NO. 562882
  misc_feature (38)..(472): Pfam Id: PF07519 Pfam Desc: Tannase and feruloyl esterase
  misc_feature (38)..(280): Pfam Id: PF07519 Pfam Desc: Tannase and feruloyl esterase
  misc_feature (344)..(472): Pfam Id: PF07519 Pfam Desc: Tannase and feruloyl esterase
  misc_feature (37)..(471): NCBI GI: 261354791 Blast Desc: feruloyl esterase B [Verticillium albo-atrum VaMs.102]
  misc_feature (1)..(471): NCBI GI: 115437138 Blast Desc: [Aspergillus terreus NIH2624] gi|114188550|gb|EAU30250.1| [Aspergillus terreus NIH2624]
  misc_feature (7)..(472): NCBI GI: 242767670 Blast Desc: feruloyl esterase, [Talaromyces stipitatus ATCC 10500] gi|218724610|gb|EED24027.1| feruloyl esterase, [Talaromyces stipitatus ATCC 10500]
  misc_feature (7)..(472): NCBI GI: 212542935 Blast Desc: feruloyl esterase, [Penicillium marneffei ATCC 18224] gi|210066529|gb|EEA20622.1| feruloyl esterase, [Penicillium marneffei ATCC 18224]
  misc_feature (35)..(471): NCBI GI: 169773349 Blast Desc: [Aspergillus oryzae RIB40] gi|83769004|dbj|BAE59141.1| protein product [Aspergillus oryzae]
  misc_feature (35)..(471): NCBI GI: 238491318 Blast Desc: conserved [Aspergillus flavus NRRL3357] gi|220697309|gb|EED53650.1| conserved [Aspergillus flavus NRRL3357]
  misc_feature (38)..(472): NCBI GI: 256675066 Blast Desc: Tannase and feruloyl esterase [Streptomyces sp. SPB78]
  misc_feature (35)..(471): NCBI GI: 156045982 Blast Desc: SS1G_09267 [Sclerotinia sclerotiorum 1980] gi|154693663|gb|EDN93401.1| SS1G_09267 [Sclerotinia sclerotiorum 1980]
  misc_feature (7)..(471): NCBI GI: 238844363 Blast Desc: feruloyl esterase B [Microsporum canis CBS 113480]
  misc_feature (5)..(472): NCBI GI: 256396237 Blast Desc: Tannase [Catenulispora acidiphila DSM 44928] gi|256362463|gb|ACU75960.1| Tannase [Catenulispora acidiphila DSM 44928]
  misc_feature (88)..(472): SWISSPROT Homolog: EC 3.1.1.73 Feruloyl esterase
  misc_feature: Useful for introducing or modulating the production of volatile compounds
MPTPPDGSSLINSTATERFNVTYPGPTYNGIGGPVNICDVEVFLTHGDAGDAVRFSIYLPLDGWNGRWQGTGGGGFAAGGFDFELIPAATSGFSAGATDAGTPLDGNTDGWYNDPQLVENFVHLSFHEMTVLGKDLSEKFYGKKPEYSYWFGCSTGGRQGMSEAQRYPDDYDGILAAAPAINWGRLLVADYFPLTAQSQGGEPVPLCKLGAIGNASVDACDMLDGAADGLISNPLKCKFDALSIVGMEVSCNGNTTVTITERDAAVWNEIRDGFKDEGENFLWYGLQPGTDLNTQAIQPGFLLPRQWIADWLLDDPSADVSDIRQSELVKLFHQSVSQFDALWGTDNPDLSAFQSHGGKLLTWHGWADELITPQGTLDYWQRVVDLVGGVDKTDEFYRIFMAPGLGHCGNGPGPQIPHDNLAPLVDWVENGNPPQTILFSGNGQSRNLCKFPMELQYKGDGNMSDSASWHCV

SEQ ID NO: 9245 - DNA, 3747 bp, Muscodor strobelii
  misc_feature: SGI EST ID NO. CUFF.21997.0
  misc_feature: Variant of the nucleotide sequence at SEQ ID NO 9243
ccatgggtaggttacgcacaagaatcacgtactacagaatcatattgagagcattcttacttccaagcatctgcagaccctcaaaccgttgtgagtcgtgcttcctcaatgcatcaaggctgccttcgacgccaaggggcttgagtttcaagatatcaagaatgggttctcttgctgtcgggtcaccgtcaaggcgcccgagaagcttgatagcgccgcgcacctcctcgggtagatcatgatcctgttcggcagctaggatcttgcattcgtatttgtgttcgcgtttccaagctttgctttggcaggatctggaacaataacagacctttcggcaacctgtacaggctttcacctcgacgtttgggaacccaatggcagaggctcgctgctgttcatttgaatcggcgggcgcacgctgcaggcaccaaccgcaggtgtccctgattcggtcgttgtcaagctcggcaagcaagggacggtccagcgacaagattatttcgcctgggcaaaggctctcagtgcgaataggccacggccagcgccactaattagagccttcttgacctcaacattgctcgtatccctcgacattgtggaaacactcaaaatctcgcttgtgcaatgacgcgaccaggggacttttcccaagcccggtcacgaattatcagtgctagcggggtgaccacgcgacccctctcgggtttatcggtctgatgtcggcgacggcccactgatacgcctaagagtgacgagggtctgttgctcggctcgcaacataacgcctggaatgaggtggaatttgaaattccgacaagcttcaaggcatccatcgaatcaatgaccatccagtgcctcagagtatactacatattggatcgctttatacaaaaagcattttgaatatgactaaaacccgtgtttctcaagttcatgtgtctactcttgagtccagagctgacgatgcggaactcgtctaggctatgatttgcttctagtgtcgcaagccagacgaatgccaaagtgacgcaggcagaaccaaggagccgggaaggactgcttccaagcaatcggaatgagcttcgctttgcactggcaggggcgaaaccaagccgttaacaccaatctgtgctctaacgggcacttggatcatcgcatttgatacgcattggggtgcttcgcttagggaagcggccggttcttcttggatgaacgcttattaactcgataagagagtgcctaaatctaagcattataggagctgtcattattggtctctagctacacacgttaattcaactgcgtcctctatccacgagcagctgtataatgagggtatgcctgtattgggggcctacctggtaagtgcctacagtagtcccgcccgtaagctaaagatcgcgcttttgcagccacgtcctcacctgacattctcgaaacgggcgacgcctccatattagcaggccattctgttatggtctgggaacttcaacgtgtgacattgcatatggatttggtgcttctcgacaatccggtgtcctcgatccagcgatacgaatgcaattgtaggatcaattatggaaggatcaacatcctcgtcgttcaattatcagacaacggctccacgctctgtccacactccaacgccaactagaaccatgtcgattaacccggcgtattttcccgtattgcatggagtcttgacagtaaacacggctggggctctagaaatgcggagagatgaatgtgatcatgggggaactctgctttcatcgtgcgaggcgtttactctacaagcccagtactgagtctcacggcggtaggattctgcgctttacgtgttcttaaaaacactacaccgagtcgttggctttcacgtgcgcccgtctctgtatcgagtttctcaagcgctccgctctgtgaccagtacaatgcgctcactcatcgtcgcttgcattgcactcacggcttgtgctccagtatgcctaggcgcctatgctccgatcgtctcttgctcttctctaatgccgacgcctcctgacggctcttcgctcataaactcaacggcgacggagcggttcaatgtgacttatcccggtcctacatacaatggcattggaggccctgtaaatatctgcgatgttgaagtatttttgacccatggcgatgctggcgatgctgttcgattctccatttacctaccacttgatggatggaatggcaggtggcagggcacaggcggaggtggtttcgcggcgggtgggtttgatttcgagcttattcccgctgcgaccagtggcttttccgccggggcaacggatgctgggacgcccttggatggtaacacggatgggtggtacaatgatccccaattagtcgaaaacttcgtgcatctatcatttcacgaaatgacggtccttggtaaggatttgtccgagaaattctatggaaagaagccggagtatagctattggtttgggtgtagcacgggcggtaggcaggggatgagtgaagcccaacgctacccagatgactatgatggtattctcgcagccgccccggctattaattggggtaggctacttgtcgctgattacttcccactcactgcacaaagccaaggcggcgagccggtgccactgtgcaaattgggcgcaatcggaaatgcgagtgttgatgcatgcgacatgcttgacggtgctgctgatggattaatcagtaatcctctcaagtgcaagttcgatgcgctgagtatcgtgggcatggaagtctcctgcaacggaaatacgactgttaccatcactgagcgagacgcagccgtctggaatgaaattcgagacgggttcaaagacgagggcgaaaactttctgtggtatggactacaacccggtactgacctgaacacgcaagccatacaacctggatttctcctgccgaggcagtggattgcggattggttactcgatgaccctagcgccgatgtcagcgatattcggcaaagcgagctcgtgaaactattccatcagtctgtctcacaatttgatgctctctggggaactgataaccctgatctttccgcttttcagagtcatggaggcaagctactgacatggcatgggtgggccgacgagcttatcacacctcaggggacactggattactggcaacgtgtggtagacttggttggcggagtggacaagactgatgagttttatcgcatcttcatggctccaggtttaggccactgcgggaatggacctggcccccagatcccacatgacaacctggcacctcttgtagattgggtcgaaaacggcaatcctcctcagacgatattgttctctggaaacgggcagtcaagaaacctttgcaagtttcccatggaactacaatacaaaggggacggcaacatgagcgactctgcaagttggcattgtgtatgagcccatgaattaacgctatcaataatttagaccggacgcacaacgaataatcttcttatacgatcgttcacgtttccgcttggtgacttgagtatcggaatgcgctcgaaatccaccgacttctgcaacagtgtcccaaaaattctcgggcgagcaaatgaggcaggccagcccggttgggatggcttctggtaggcctagttagtttgtacattgaatcgttcgactactgtagcccattattctattgcggtgcagtactgcataggtaatatcgctttccatcggtcgtactgtgttgcca

SEQ ID NO: 9246 - DNA, 1269 bp, Muscodor strobelii
  misc_feature: SGI cDNA ID NO. 562883
  misc_feature: Elevated expression when VOC is produced
  misc_feature: Encodes the peptide sequence at SEQ ID NO 9247
atggatctgaaaccagaggccatcgcaatcatcggtgttgcatgcagatttgcgggtgccgacaccccttctgcattctggaagctgctcgagaacccgcaggatctgtccacacgagtgccagcaagcagattcaacattgacgatttttaccacgctgatcctactcaccacggcactagcaatgcaaccaagtcctactttctcgagcaggatatcgccaaatttgataacaacttctttggcattctgccagttgaaagcgaggccattgatccacaacagcgtctccttctcgaaactgtttatgagtccatctccgacgctggcttgccaatggtgaagcttagaggtacgcagaccgctgtctacgtgggaatgatgtgcgatgactggcattcaatggtttcacgagacattgaatatatactgaaatatgctgcgacgggtgcggcacgaagcattgcttccaatcgcatctcctacttctttgattggcgtggaccttctatgacgattgataccgcttgctcttcttctcttgttgctgttcatcatgccgtccgggctctccgcactagagaatctcccgttgccgttgtggccgggaccaatctcatcttaagtcctgatatgtacattaaagagtccaatctccgcatgttatctcctcgtggacattgtgcaatgtgggatgcggatgcggatggctatgctcgcggagagggagtcgcggccgttgtgctaaagcctctaagtcaagcattagagaatggggaccctatcagaggcattatacgagagacttatgtgaaccaggatggtcacacagctgggttgaccgtacccagcagcgaagcccaagcagccttgattcgcgagacgtatcgacgggctggcctcgatctagcaaaagccgaagatcgaccccaattcttccaagcacatggcacaggcactcaagctggcgaccttcgagaagctgcggccatctcatcgtctttctctcacgaaggactgtgtttcaggcagaaactctatgttgggtctgtgaaaacagtcataggccacacagagggctctgccggccttgcgtcattgattgggacatgcctagcaatgcaacaagacacgatacctccgaatctccacttcacccgcctcagtcccaaaatcgagccatacatcgacaatatcttaatcccgacccgaagctgtcccttggcccactccacttcctggaggtgtcaagcgtgcaagtatcaatag

SEQ ID NO: 9247 - protein, 422 aa, Muscodor strobelii
  misc_feature: SGI Peptide ID NO. 562883
  misc_feature (6)..(255): Pfam Id: PF00109 Pfam Desc: Beta-ketoacyl synthase, N-terminal domain
  misc_feature (263)..(386): Pfam Id: PF02801 Pfam Desc: Beta-ketoacyl synthase, C-terminal domain
  misc_feature (315)..(386): Pfam Id: PF02801 Pfam Desc: Beta-ketoacyl synthase, C-terminal domain
  misc_feature (263)..(302): Pfam Id: PF02801 Pfam Desc: Beta-ketoacyl synthase, C-terminal domain
  misc_feature (6)..(416): NCBI GI: 40806913 Blast Desc: polyketide synthase [Gibberella moniliformis]
  misc_feature (6)..(407): NCBI GI: 55823917 Blast Desc: equisetin synthetase [Fusarium heterosporum]
  misc_feature (5)..(407): NCBI GI: 238846085 Blast Desc: polyketide synthase [Microsporum canis CBS 113480]
  misc_feature (6)..(405): NCBI GI: 15020820 Blast Desc: polyketide synthase [Gibberella fujikuroi]
  misc_feature (1)..(405): NCBI GI: 238837915 Blast Desc: polyketide synthase [Microsporum canis CBS 113480]
  misc_feature (6)..(407): NCBI GI: 116206162 Blast Desc: CHGG_02374 [Chaetomium globosum CBS 148.51] gi|88182971|gb|EAQ90439.1| CHGG_02374 [Chaetomium globosum CBS 148.51]
  misc_feature (6)..(407): NCBI GI: 121701571 Blast Desc: equisetin synthetase, [Aspergillus clavatus NRRL 1] gi|119397193|gb|EAW07624.1| equisetin synthetase, [Aspergillus clavatus NRRL 1]
  misc_feature (6)..(407): NCBI GI: 154290835 Blast Desc: BC1G_15479 [Botryotinia fuckeliana B05.10] gi|150847369|gb|EDN22562.1| BC1G_15479 [Botryotinia fuckeliana B05.10]
  misc_feature (6)..(407): NCBI GI: 40787334 Blast Desc: polyketide synthase [Botryotinia fuckeliana]
  misc_feature (6)..(407): NCBI GI: 116191281 Blast Desc: CHGG_05358 [Chaetomium globosum CBS 148.51] gi|88181271|gb|EAQ88739.1| CHGG_05358 [Chaetomium globosum CBS 148.51]
  misc_feature (6)..(405): SWISSPROT Homolog: EC 2.3.1.161 Lovastatin nonaketide synthase
  misc_feature: Useful for fungicidal and/or biocontrol applications
  misc_feature: Useful for introducing or modulating the production of volatile compounds
MDLKPEAIAIIGVACRFAGADTPSAFWKLLENPQDLSTRVPASRFNIDDFYHADPTHHGTSNATKSYFLEQDIAKFDNNFFGILPVESEAIDPQQRLLLETVYESISDAGLPMVKLRGTQTAVYVGMMCDDWHSMVSRDIEYILKYAATGAARSIASNRISYFFDWRGPSMTIDTACSSSLVAVHHAVRALRTRESPVAVVAGTNLILSPDMYIKESNLRMLSPRGHCAMWDADADGYARGEGVAAVVLKPLSQALENGDPIRGIIRETYVNQDGHTAGLTVPSSEAQAALIRETYRRAGLDLAKAEDRPQFFQAHGTGTQAGDLREAAAISSSFSHEGLCFRQKLYVGSVKTVIGHTEGSAGLASLIGTCLAMQQDTIPPNLHFTRLSPKIEPYIDNILIPTRSCPLAHSTSWRCQACKYQ

SEQ ID NO: 9248 - DNA, 5179 bp, Muscodor strobelii
  misc_feature: SGI EST ID NO. CUFF.22071.0
  misc_feature: Variant of the nucleotide sequence at SEQ ID NO 9246
cgacgccgcatgaccacataggcacgcgccctttctaacaccaacttgttaagtctcattcatagacttcgtcctcctattttttcacatcctcaatcaaaagattgaaagggatcacgagctagtccgtccaagaccatcataagcaagagcaacatcctagtccatgttaggtcgccttccgtttccttcggcgtgacatatagcctctttattcattgtatgaagatcacatggtactgcctcggctatgctatgtgatttcattgttgttgtacacggtcgtggagaaagcttactgaacagctcattgcacaatatgtcgacgtatacacgcattggctggggatcagacaaagatatcctaatctaaccaggccaacatgcagctaaccttgagttgatgcttagttggctcatgtaaacatctgactagagctaagcaacgagaaacgagggcacatggggcagttcagctcgttcggtggcaccacctgctcataaatttcatattatctcgtacatgttcaagttgagcaattttaaacattctacagtcgttaattctgaaggcactcaatggtctgcggaagctatatgaggcaccatggatctgaaaccagaggccatcgcaatcatcggtgttgcatgcagatttgcgggtgccgacaccccttctgcattctggaagctgctcgagaacccgcaggatctgtccacacgagtgccagcaagcagattcaacattgacgatttttaccacgctgatcctactcaccacggcactagcaatgcaaccaagtcctactttctcgagcaggatatcgccaaatttgataacaacttctttggcattctgccagttgaaagcgaggccattgatccacaacagcgtctccttctcgaaactgtttatgagtccatctccgacgctggcttgccaatggtgaagcttagaggtacgcagaccgctgtctacgtgggaatgatgtgcgatgactggcattcaatggtttcacgagacattgaatatatactgaaatatgctgcgacgggtgcggcacgaagcattgcttccaatcgcatctcctacttctttgattggcgtggaccttctatgacgattgataccgcttgctcttcttctcttgttgctgttcatcatgccgtccgggctctccgcactagagaatctcccgttgccgttgtggccgggaccaatctcatcttaagtcctgatatgtacattaaagagtccaatctccgcatgttatctcctcgtggacattgtgcaatgtgggatgcggatgcggatggctatgctcgcggagagggagtcgcggccgttgtgctaaagcctctaagtcaagcattagagaatggggaccctatcagaggcattatacgagagacttatgtgaaccaggatggtcacacagctgggttgaccgtacccagcagcgaagcccaagcagccttgattcgcgagacgtatcgacgggctggcctcgatctagcaaaagccgaagatcgaccccaattcttccaagcacatggcacaggcactcaagctggcgaccttcgagaagctgcggccatctcatcgtctttctctcacgaaggactgtgtttcaggcagaaactctatgttgggtctgtgaaaacagtcataggccacacagagggctctgccggccttgcgtcattgattgggacatgcctagcaatgcaacaagacacgatacctccgaatctccacttcacccgcctcagtcccaaaatcgagccatacatcgacaatatcttaatcccgacccgaagctgtcccttggcccactccacttcctggaggtgtcaagcgtgcaagtatcaatagtttcggcttcggaggaacaaattgtcatgtaatcattgagtctgttgaagaaaataccgaggaaggaatcgatgatagtccggcaccgcttttcattcctcttacattttccgccagctctgagaccgccatcgcgtcaatgctgtcgcgctactcgacatatttggagagatctccagacctgagacttgacaatcttgcctggacgttgtgtcagcggcagtctatcttcgcctatcgtaaagctgtctgtgggcctggaagaaacgatgggcgccgcgctggtcgagtcctctgtttttatgcaagcaagactttctgatctcgacaaatctcttcattgtcttccgcaagaagaccgaccatattggactattcaagacgagctccttaggtcgcctgagacatctcgatgcaatgaaccgcaactgtctcaacccttgtgcactgcggtacagattttgctcgtcgatatccttcgtgaagctggaattgagctctccgtagttgtgggacattcatcaggggaaatcgctgccgcgtacgctgccgggtttgtttcaagtagcgacgccattcgtattgcctattatcgtggtcgttgcggcaatctcgccgtttcggagagcggctctaaaggtgccatgatggctgtcggactgtctcatgaagatgcgctcaagtattgcgagcaacaagtctacaatggtcgcatcaatgttgctgcggtgaactcgccgtccagtgtcactctatccggtgacattgacacaatcgacaaagcaatggcagagctgaacgaaaagcagagttttgctcgcaagttgaaagtaggtattgcttatcactcggctcacatgctcccatgcagtgctccatacttacaggccttaagaggagtcctagacaacaaggtccctggcgaaacctcagcagtttggatatcggccaccaaaccggggcaggtgatgtccactgatttactcgatgagtcttactgggtagagaatatgtgcaatcctgtacttttctcgtcagccctatcacgtgcagcatcagaatgtgcttttgatgtcgcgattgaaattggtccccatccggcattgagaagtccagcaaaagcgtgtcttcaagagttgggcctcgatatgccgtacgcaagtgcgctttcgagaggcaaaaatgacatacgcgagcttgccacgcttcttggatttctttgggtccatttaggatccgatcacgtcaatctcccagccgttcaatcgcttctatccggaaataaaaggccacggacgattgtacaagatctgccaccatatcctttcgatcacaatcggaattactggcccctgggaaagggttacagtactggcgatgacgcccgaaaatccctaaatcccattcttggtaagctctgcttggagagtgttacgacgcaagagatgcaatggaggaatctcctttacgcaagcgaaaccagttggctcgagggacaccagttagaaggccagatagttttccctgcgacggcatatatatccatggctttcgaagcgatgcagtatgtggttgacaagagcccgatcaagctgttcaaaatcatggatatcgaggttagccgcgcattactactcagtaaggacggtacttgcattgagacatacttcagtctcagctccattgagaagacgagtgatgctatgttggccagctttgcttgctacacctgccctggaggagacaagaagcgttcgctaaatgcccaaggcaaagttcaggtccagctcggtactgcaacggacgattccttacctcgtgcatcagctcatgattacaacttgattgacgtacagccgggcatattctacgagagcttaaagaaagttggttacgattactcatgtccatttgatgggataactcggatcagccgcaggcacggatattctaccggattggtaaatgatcaatctggttctgcgtgggaagataagcttgtcgttcatcctagtatgcttgatgcggccctgcaaacggcatttgcagcgtggtcttttccgggcgatggacaaatagggacaattcatgttccaacacatatctcgtctattagcatcaatccttacttcatcacggccctctctactaggcaaaaagagtttatgtataggtcatttgtcactaagcgctccggatcgtcaacagaagctgacgtgtacctcctgaacgcagagggatcaatctctttcgtaaaatttgaaggaatttgagtattttctgtccagcccaaatagtgcccttgtgcctagtgggctgtctcccgactgtcaagagattgaaaaccattggtttggcaacgtggcaagacagattgcctgtcgctacccgggtctcaatgtgctagaaattggtgctgatactggcgatattacaaacactgtcctctctcagttgggaaattctttttcgtcctacacgttcacaaatatttctggttcgtccttttctgcggcacaagaacgccttgtaggattcaatagtcgcatggtattccagactctagatcatcagtactcgccacttgaacaggggtataatgaagggtcttacgatatcgtcattgctgctcatgcactgagtactttgccctatacagagaagtctattgtagggatgcgtcagcttttgaggccagggggatatctgctcgggatgattctaatgcacaacaatccaaatatcgacaagtccatgctatcgacaggcctaatgctcgacgctgaaagcaaagcaccagaatcaaatccagattccatcgtatgggacggagtcctacaaagatgtgggttctcctctatcgatagtgctcgacccagcatgagacctcatatgtccttcttcatcagtcaagcgctagaccatcgagtacagcttcttcgtgatcctttggcgacagcttcggcgagattaattggttctgatatgttagttatcatcggaggaacaacactaagaacatatctccttgtggatagtgtcaataagaagctctcaagacatttttctgccattatcaggttcaactcgccaattgagctaatccaggccgcgcaaatactgccgaaggacttgagtgttcttgttctgacagagctcgatatgccaatcatggaaaaattctctctagaaaagttcgaaagcctcaaatacctctggagggtgtctcgagtagtcctctgggtcacccacaatgcgagagacgagcaagctcattcttatatgatgctgggtgtgggacgg

SEQ ID NO: 9249 - DNA, 5643 bp, Muscodor strobelii
  misc_feature: SGI cDNA ID NO. 562884
  misc_feature: Elevated expression when VOC is produced
  misc_feature: Encodes the peptide sequence at SEQ ID NO 9250
atgctgtcgcgctactcgacatatttggagagatctccagacctgagacttgacaatcttgcctggacgttgtgtcagcggcagtctatcttcgcctatcgtaaagctgtctgtgggcctggaagaaacgagttagtaaatgaactggccctgttcgagagcccatcacccgagcagcatccagaactaagtatacgtcacgcaccactcttgatgggcgccgcgctggtcgagtcctctgtttttatgcaagcaagactttctgatctcgacaaatctcttcattgtcttccgcaagaagaccgaccatattggactattcaagacgagctccttaggtcgcctgagacatctcgatgcaatgaaccgcaactgtctcaacccttgtgcactgcggtacagattttgctcgtcgatatccttcgtgaagctggaattgagctctccgtagttgtgggacattcatcaggggaaatcgctgccgcgtacgctgccgggtttgtttcaagtagcgacgccattcgtattgcctattatcgtggtcgttgcggcaatctcgccgtttcggagagcggctctaaaggtgccatgatggctgtcggactgtctcatgaagatgcgctcaagtattgcgagcaacaagtctacaatggtcgcatcaatgttgctgcggtgaactcgccgtccagtgtcactctatccggtgacattgacacaatcgacaaagcaatggcagagctgaacgaaaagcagagttttgctcgcaagttgaaagtaggtattgcttatcactcggctcacatgctcccatgcagtgctccatacttacaggccttaagaggagtcctagacaacaaggtccctggcgaaacctcagcagtttggatatcggccaccaaaccggggcaggtgatgtccactgatttactcgatgagtcttactgggtagagaatatgtgcaatcctgtacttttctcgtcagccctatcacgtgcagcatcagaatgtgcttttgatgtcgcgattgaaattggtccccatccggcattgagaagtccagcaaaagcgtgtcttcaagagttgggcctcgatatgccgtacgcaagtgcgctttcgagaggcaaaaatgacatacgcgagcttgccacgcttcttggatttctttgggtccatttaggatccgatcacgtcaatctcccagccgttcaatcgcttctatccggaaataaaaggccacggacgattgtacaagatctgccaccatatcctttcgatcacaatcggaattactggcccctgggaaagggttacagtactggcgatgacgcccgaaaatccctaaatcccattcttggtaagctctgcttggagagtgttacgacgcaagagatgcaatggaggaatctcctttacgcaagcgaaaccagttggctcgagggacaccagttagaaggccagatagttttccctgcgacggcatatatatccatggctttcgaagcgatgcagtatgtggttgacaagagcccgatcaagctgttcaaaatcatggatatcgaggttagccgcgcattactactcagtaaggacggtacttgcattgagacatacttcagtctcagctccattgagaagacgagtgatgctatgttggccagctttgcttgctacacctgccctggaggagacaagaagcgttcgctaaatgcccaaggcaaagttcaggtccagctcggtactgcaacggacgattccttacctcgtgcatcagctcatgattacaacttgattgacgtacagccgggcatattctacgagagcttaaagaaagttggttacgattactcatgtccatttgatgggataactcggatcagccgcaggcacggatattctaccggattggtaaatgatcaatctggttctgcgtgggaagataagcttgtcgttcatcctagtatgcttgatgcggccctgcaaacggcatttgcagcgtggtcttttccgggcgatggacaaatagggacaattcatgttccaacacatatctcgtctattagcatcaatccttacttcatcacggccctctctactaggcaaaaagagtttatgtataggtcatttgtcactaagcgctccggatcgtcaacagaagctgacgtgtacctcctgaacgcagagggatcaatctctttcgtaaaatttgaaggagtgcagctcaggcccttctcacctgtctctgcagcaagcgatgtcctaatgttctctagatttgagtattttctgtccagcccaaatagtgcccttgtgcctagtgggctgtctcccgactgtcaagagattgaaaaccattggtttggcaacgtggcaagacagattgcctgtcgctacccgggtctcaatgtgctagaaattggtgctgatactggcgatattacaaacactgtcctctctcagttgggaaattctttttcgtcctacacgttcacaaatatttctggttcgtccttttctgcggcacaagaacgccttgtaggattcaatagtcgcatggtattccagactctagatcatcagtactcgccacttgaacaggggtataatgaagggtcttacgatatcgtcattgctgctcatgcactgagtactttgccctatacagagaagtctattgtagggatgcgtcagcttttgaggccagggggatatctgctcgggatgattctaatgcacaacaatccaaatatcgacaagtccatgctatcgacaggcctaatgctcgacgctgaaagcaaagcaccagaatcaaatccagattccatcgtatgggacggagtcctacaaagatgtgggttctcctctatcgatagtgctcgacccagcatgagacctcatatgtccttcttcatcagtcaagcgctagaccatcgagtacagcttcttcgtgatcctttggcgacagcttcggcgagattaattggttctgatatgttagttatcatcggaggaacaacactaagaacatatctccttgtggatagtgtcaataagaagctctcaagacatttttctgccattatcaggttcaactcgccaattgagctaatccaggccgcgcaaatactgccgaaggacttgagtgttcttgttctgacagagctcgatatgccaatcatggaaaaattctctctagaaaagttcgaaagcctcaaatacctctggagggtgtctcgagtagtcctctgggtcacccacaatgcgagagacgagcaagctcattcttatatgatgctgggtgtgggacggactatacgattagaataccctcatcttcgcctccagttcctcgatatcgactctgtacagtgggaaacgtcgcgaatcatagccaaagctctccttcgacttcaattttttgaacagtgggaagacacacatgatctcctttggacgagtgagcccgaaatcacgatacgaaatgggcaaacgctaatcacaagacttctcccaagtcaagataagaacggtcgctacaattctcaacgaaggactttataccgagatgttgatccaaatgttgagctcgtttgtctcagctgggttgatgagctgccaatggtgctattaccatcacctctactactgcccgctgatgtccaagaagagacttgtactattcgtgtcagattttcacttctgaggtctatcaaggttggtaaggttggctttttgaggctatgctctggcattgatacagaaaccaataatactgtagtcgcatttgtggacacagaagattctctagtcactgtcccacgccaatggtgtcatcgcatagcactttatgactcgccctcataccttaccacatttgcggcacatcatattgccatgagcgtggtcgacttagtagcaacaaacgacatccttctggtacacgaactagacccaagcctaatacctatattccgacatatagccaggatcatgaaggtcaagaccgttttcacatcggctctcccttctgtcgacccgggtctagtaataattcatcctgaattatcatgctccatcatacaacaattgataccgtcttcgataggggctttgattagcttcgctaatgacaaagcgtccattgcggttcattatgccttgatcaaatgcgtttcgtcccgatgcaccgtcgtgcaacctccgtccctattagggcgctcggtcgaatgcaatgcgggtacagacttcaactccgtcgcagaaaaactacgccgcacatgccaatctcttgacatgacaggcgaatacatccgtggagctaaggtcgtgtctcttgcagatattgctgtcgcatctggaagcaaagaagatctcactgtcgtcgactggaacgtaggtcctgtcaatgctcaaatcctccctgttgcctctggctcactcttccgggccgacaaaacatatctgctagttggtatggccggcgggctcggccactcgctgtgcggttggatggtgacacacggggccagaaatgtcattttgtgtagcaggagcccaattgtcgatacgagattcgtcgatgatatgaagaagtgtggcgctaagattatatatttgcctctcgacataacctgccgctcatccgtttttagtacactgacaaacatcacagctttgatgcccagcattgccggtgtcgtcaacggtgcaatgattctacatgatggcttattcgatggtctcacttatgagcagttccagaaagtcatcttaccgaaagtcgacgggacaaagtttctggacgagtacttctactccaccccactcgagtttttcatcgctacctcctcgatctctgcagttattggcaatgctgggcagagcaattacgcagcagcaaattcgtttatgactgcacttgtacagcaacgaaagaagaggggcttcgctgggtcatccatggtcatccctccagtagtcggggctggatatggcgtccgtaataagctggattatgaacaattttcatccagaggcctactaaacatatctgagcccgatttcttcattttatttgcagaggcaattgcgtcaggaagaccagattcaagtgaggaatccgaggttattgcaggcataaactacatccctgcaaggcttgatataaacgaaatcgatcgccgcgacccacgattttctcatttcatttcgtacgaagaacaaaatatcacttcaaatgccactccgatatctcacaacattaagactcgactccgtttagctacgagcaagacagatagtgcaagcattcttaaagaggcattttcagccaagttaagacacatccttcgaatgtccgagaatgataagatcgatgatgcacagccgttactcgatcagggaattgattcggtgttggcagtagagatccgtgcatggttgttgaaggagctcgatgtcgacctgcctgtgctgaagattctgagtggaatatctgttttagacatactcgaggtcgcggtcgagcaaatcctaaacgacctgaccccagttggtgccccagttggcaacccagccggtgcacagccgatggagtctgcaccgtcagaggtcgttctggcgctcctgcaaaccaaatctgtttag

SEQ ID NO: 9250 - protein, 1880 aa, Muscodor strobelii
  misc_feature: SGI Peptide ID NO. 562884
  misc_feature (72)..(396): Pfam Id: PF00698 Pfam Desc: Acyl transferase domain
  misc_feature (1484)..(1648): Pfam Id: PF00106 Pfam Desc: short chain dehydrogenase
  misc_feature (1485)..(1661): Pfam Id: PF08659 Pfam Desc: KR domain
  misc_feature (803)..(906): Pfam Id: PF08241 Pfam Desc: Methyltransferase domain
  misc_feature (803)..(904): Pfam Id: PF08242 Pfam Desc: Methyltransferase domain
  misc_feature (127)..(350): Pfam Id: PF00698 Pfam Desc: Acyl transferase domain
  misc_feature (1)..(1846): NCBI GI: 238498044 Blast Desc: polyketide synthase, [Aspergillus flavus NRRL3357] gi|220693531|gb|EED49876.1| polyketide synthase, [Aspergillus flavus NRRL3357]
  misc_feature (1)..(1846): NCBI GI: 169768724 Blast Desc: [Aspergillus oryzae RIB40] gi|83766690|dbj|BAE56830.1| protein product [Aspergillus oryzae]
  misc_feature (1)..(1870): NCBI GI: 238837915 Blast Desc: polyketide synthase [Microsporum canis CBS 113480]
  misc_feature (1)..(1847): NCBI GI: 189196478 Blast Desc: lovastatin nonaketide synthase [Pyrenophora tritici-repentis Pt-1C-BFP] gi|187980456|gb|EDU47082.1| lovastatin nonaketide synthase [Pyrenophora tritici-repentis
  misc_feature (778)..(1868): NCBI GI: 238846085 Blast Desc: polyketide synthase [Microsporum canis CBS 113480]
  misc_feature (1)..(790): NCBI GI: 238846085 Blast Desc: polyketide synthase [Microsporum canis CBS 113480]
  misc_feature (780)..(1843): NCBI GI: 121701571 Blast Desc: equisetin synthetase, [Aspergillus clavatus NRRL 1] gi|119397193|gb|EAW07624.1| equisetin synthetase, [Aspergillus clavatus NRRL 1]
  misc_feature (8)..(770): NCBI GI: 40806897 Blast Desc: polyketide synthase [Gibberella moniliformis]
  misc_feature (8)..(777): NCBI GI: 55823917 Blast Desc: equisetin synthetase [Fusarium heterosporum]
  misc_feature (2)..(780): NCBI GI: 121701571 Blast Desc: equisetin synthetase, [Aspergillus clavatus NRRL 1] gi|119397193|gb|EAW07624.1| equisetin synthetase, [Aspergillus clavatus NRRL 1]
  misc_feature: Useful for fungicidal and/or biocontrol applications
  misc_feature: Useful for introducing or modulating the production of volatile compounds
MLSRYSTYLERSPDLRLDNLAWTLCQRQSIFAYRKAVCGPGRNELVNELALFESPSPEQHPELSIRHAPLLMGAALVESSVFMQARLSDLDKSLHCLPQEDRPYWTIQDELLRSPETSRCNEPQLSQPLCTAVQILLVDILREAGIELSVVVGHSSGEIAAAYAAGFVSSSDAIRIAYYRGRCGNLAVSESGSKGAMMAVGLSHEDALKYCEQQVYNGRINVAAVNSPSSVTLSGDIDTIDKAMAELNEKQSFARKLKVGIAYHSAHMLPCSAPYLQALRGVLDNKVPGETSAVWISATKPGQVMSTDLLDESYWVENMCNPVLFSSALSRAASECAFDVAIEIGPHPALRSPAKACLQELGLDMPYASALSRGKNDIRELATLLGFLWVHLGSDHVNLPAVQSLLSGNKRPRTIVQDLPPYPFDHNRNYWPLGKGYSTGDDARKSLNPILGKLCLESVTTQEMQWRNLLYASETSWLEGHQLEGQIVFPATAYISMAFEAMQYVVDKSPIKLFKIMDIEVSRALLLSKDGTCIETYFSLSSIEKTSDAMLASFACYTCPGGDKKRSLNAQGKVQVQLGTATDDSLPRASAHDYNLIDVQPGIFYESLKKVGYDYSCPFDGITRISRRHGYSTGLVNDQSGSAWEDKLVVHPSMLDAALQTAFAAWSFPGDGQIGTIHVPTHISSISINPYFITALSTRQKEFMYRSFVTKRSGSSTEADVYLLNAEGSISFVKFEGVQLRPFSPVSAASDVLMFSRFEYFLSSPNSALVPSGLSPDCQEIENHWFGNVARQIACRYPGLNVLEIGADTGDITNTVLSQLGNSFSSYTFTNISGSSFSAAQERLVGFNSRMVFQTLDHQYSPLEQGYNEGSYDIVIAAHALSTLPYTEKSIVGMRQLLRPGGYLLGMILMHNNPNIDKSMLSTGLMLDAESKAPESNPDSIVWDGVLQRCGFSSIDSARPSMRPHMSFFISQALDHRVQLLRDPLATASARLIGSDMLVIIGGTTLRTYLLVDSVNKKLSRHFSAIIRFNSPIELIQAAQILPKDLSVLVLTELDMPIMEKFSLEKFESLKYLWRVSRVVLWVTHNARDEQAHSYMMLGVGRTIRLEYPHLRLQFLDIDSVQWETSRIIAKALLRLQFFEQWEDTHDLLWTSEPEITIRNGQTLITRLLPSQDKNGRYNSQRRTLYRDVDPNVELVCLSWVDELPMVLLPSPLLLPADVQEETCTIRVRFSLLRSIKVGKVGFLRLCSGIDTETNNTVVAFVDTEDSLVTVPRQWCHRIALYDSPSYLTTFAAHHIAMSVVDLVATNDILLVHELDPSLIPIFRHIARIMKVKTVFTSALPSVDPGLVIIHPELSCSIIQQLIPSSIGALISFANDKASIAVHYALIKCVSSRCTVVQPPSLLGRSVECNAGTDFNSVAEKLRRTCQSLDMTGEYIRGAKVVSLADIAVASGSKEDLTVVDWNVGPVNAQILPVASGSLFRADKTYLLVGMAGGLGHSLCGWMVTHGARNVILCSRSPIVDTRFVDDMKKCGAKIIYLPLDITCRSSVFSTLTNITALMPSIAGVVNGAMILHDGLFDGLTYEQFQKVILPKVDGTKFLDEYFYSTPLEFFIATSSISAVIGNAGQSNYAAANSFMTALVQQRKKRGFAGSSMVIPPVVGAGYGVRNKLDYEQFSSRGLLNISEPDFFILFAEAIASGRPDSSEESEVIAGINYIPARLDINEIDRRDPRFSHFISYEEQNITSNATPISHNIKTRLRLATSKTDSASILKEAFSAKLRHILRMSENDKIDDAQPLLDQGIDSVLAVEIRAWLLKELDVDLPVLKILSGISVLDILEVAVEQILNDLTPVGAPVGNPAGAQPMESAPSEVVLALLQTKSV

SEQ ID NO: 9251 - DNA, 5179 bp, Muscodor strobelii; identical to SEQ ID NO: 9248
  misc_feature: SGI EST ID NO. CUFF.22071.0
  misc_feature: Variant of the nucleotide sequence at SEQ ID NO 9249

SEQ ID NO: 9252 - DNA, 975 bp, Muscodor strobelii
  misc_feature: SGI cDNA ID NO. 562885
  misc_feature: Encodes the peptide sequence at SEQ ID NO 9253
atgggtatcctccaatacgtcctccacgcgacaaatttccgctccccattcctccgcaccgtagtccccagcgtagcagccgccttcgcgatccaaaccgcagtagccataccctctatcccattacaatccgagcgattctacgacgcctcaggctcggccacattcctcacctgcactttactctcactctacctcccgagtatacgagttcgcgcagcagctgccgcagcaggactacccaagcccgcatttcctagcatactagagactctcacgaaaggcaatggacccttgaattggagacaggtagcgctcagcgccgcggtagtattctggagcgcgcggttgggatcctacctcttcgcccgcattctaaaatctggccacgactcccgtttcgacgagatcaagaagtcaccagccaaattctcaggtgcgtggttcggccaagcgacatgggtttcactatgtctcatgcccgtgatggccgtcaacgccgtgcccgccgctgccttcgcatctggtatcatggcctctgatatactgggtcttacacttttcgcgggcggctttgcgtttgagatcgcggctgatagacagaagaataagtggctggacgagaagaggaataagcagcatgacgaggagtttctaaccagaggactgtggggccggagtcaattcccgaattacttcggtgaatgcacgctctggaccggtatcgcgacgaccgctgcaggtgttttgttatcacgccaagtccaggtcggacttggattctccggtggcgctgcgagcaagttggctacagtggcattgtgctacatcagccctgcgttcgtgagcttcttgctattgaaggtcactggtgtgccgttaagcgagaagaagtatgataagcgatatggcgatcgcaaggattaccaggagtggaagaagaatactcctaagttcttcccgaagttgttctag

SEQ ID NO: 9253 - protein, 324 aa, Muscodor strobelii
  misc_feature: SGI Peptide ID NO. 562885
  misc_feature (28)..(316): Pfam Id: PF06966 Pfam Desc: Domain of function (DUF1295)
  misc_feature (101)..(252): Pfam Id: PF06966 Pfam Desc: Domain of function (DUF1295)
  misc_feature (265)..(316): Pfam Id: PF06966 Pfam Desc: Domain of function (DUF1295)
  misc_feature (1)..(324): NCBI GI: 261359672 Blast Desc: conserved [Verticillium albo-atrum VaMs.102]
  misc_feature (3)..(324): NCBI GI: 39974789 Blast Desc: MGG_00459 [Magnaporthe grisea 70-15] gi|145018648|gb|EDK02927.1| MGG_00459 [Magnaporthe grisea 70-15]
  misc_feature (1)..(324): NCBI GI: 169606750 Blast Desc: SNOG_06423 [Phaeosphaeria nodorum SN15] gi|111065134|gb|EAT86254.1| SNOG_06423 [Phaeosphaeria nodorum SN15]
  misc_feature (17)..(324): NCBI GI: 256727726 Blast Desc: NECHADRAFT_32181 [Nectria haematococca mpVI 77-13-4]
  misc_feature (1)..(322): NCBI GI: 189190786 Blast Desc: conserved [Pyrenophora tritici-repentis Pt-1C-BFP] gi|187973338|gb|EDU40837.1| conserved [Pyrenophora tritici-repentis Pt-1C-BFP]
  misc_feature (1)..(321): NCBI GI: 85089705 Blast Desc: NCU10010 [Neurospora crassa OR74A] gi|28919389|gb|EAA28835.1| conserved [Neurospora crassa OR74A]
  misc_feature (12)..(308): NCBI GI: 156040818 Blast Desc: SS1G_11387 [Sclerotinia sclerotiorum 1980] gi|154695771|gb|EDN95509.1| SS1G_11387 [Sclerotinia sclerotiorum 1980]
  misc_feature (57)..(298): NCBI GI: 154303908 Blast Desc: BC1G_08838 [Botryotinia fuckeliana B05.10] gi|150854422|gb|EDN29614.1| BC1G_08838 [Botryotinia fuckeliana B05.10]
  misc_feature (21)..(321): NCBI GI: 170099419 Blast Desc: [Laccaria bicolor S238N-H82] gi|164644453|gb|EDR08703.1| [Laccaria bicolor S238N-H82]
  misc_feature (21)..(312): NCBI GI: 169859507 Blast Desc: CC1G_12573 [Coprinopsis cinerea okayama7#130] gi|116502539|gb|EAU85434.1| CC1G_12573 [Coprinopsis cinerea okayama7#130]
MGILQYVLHATNFRSPFLRTVVPSVAAAFAIQTAVAIPSIPLQSERFYDASGSATFLTCTLLSLYLPSIRVRAAAAAAGLPKPAFPSILETLTKGNGPLNWRQVALSAAVVFWSARLGSYLFARILKSGHDSRFDEIKKSPAKFSGAWFGQATWVSLCLMPVMAVNAVPAAAFASGIMASDILGLTLFAGGFAFEIAADRQKNKWLDEKRNKQHDEEFLTRGLWGRSQFPNYFGECTLWTGIATTAAGVLLSRQVQVGLGFSGGAASKLATVALCYISPAFVSFLLLKVTGVPLSEKKYDKRYGDRKDYQEWKKNTPKFFPKLF

SEQ ID NO: 9254 - DNA, 3627 bp, Muscodor strobelii
  misc_feature: SGI EST ID NO. CUFF.22091.0
  misc_feature: Variant of the nucleotide sequence at SEQ ID NO 9252
cgatcttatagcaaagtcgcatgtcggaactgactcgcacctggttctggagatctcgggtttgaagttggtccgtttcggggtgcccaggacccctagggattcctattgcgtcacgactctcgcatgcatcaccactggctcttgcagctctaacacgtctttgagcaacaccatgaaacttaaagagctcgagaccaggcttaccacgaaagccaattaagacgcgttaccataatcatatcagaaatagtatgaatgtgatcatcttgcacttcattccactcagtgaggagcattgaagcatcaacaattgccccgccatcgtcaaattctattccatctcatcacatccttttggagtctcataaaagcgacaaaaagcgacaacgcgaacaatatgggtatcctccaatacgtcctccacgcgacaaatttccgctccccattcctccgcaccgtagtccccagcgtagcagccgccttcgcgatccaaaccgcagtagccataccctctatcccattacaatccgagcgattctacgacgcctcaggctcggccacattcctcacctgcactttactctcactctacctcccgagtatacgagttcgcgcagcagctgccgcagcaggactacccaagcccgcatttcctagcatactagagactctcacgaaaggcaatggacccttgaattggagacaggtagcgctcagcgccgcggtagtattctggagcgcgcggttgggatcctacctcttcgcccgcattctaaaatctggccacgactcccgtttcgacgagatcaagaagtcaccagccaaattctcaggtgcgtggttcggccaagcgacatgggtttcactatgtctcatgcccgtgatggccgtcaacgccgtgcccgccgctgccttcgcatctggtatcatggcctctgatatactgggtcttacacttttcgcgggcggctttgcgtttgagatcgcggctgatagacagaagaataagtggctggacgagaagaggaataagcagcatgacgaggagtttctaaccagaggactgtggggccggagtcaattcccgaattacttcggtgaatgcacgctctggaccggtatcgcgacgaccgctgcaggtgttttgttatcacgccaagtccaggtcggacttggattctccggtggcgctgcgagcaagttggctacagtggcattgtgctacatcagccctgcgttcgtgagcttcttgctattgaaggtcactggtgtgccgttaagcgagaagaagtatgataagcgatatggcgatcgcaaggattaccaggagtggaagaagaatactcctaagttcttcccgaagttgttctagttgtacttctataagcaaatttttggaaaatcaaaatagagtaggggaacgagacaagtatcgaagttgacgtttctgaatgtttatgaattaattgttatgcgatgtggtgaatgtacatcaaatgcagtgatgctcaagacttccacagtactcagacgtcgcacattactcgctagccccaatctacttgtggaaggccttgactttctcgacttcgtcccaacttcccatgtagatacccgaacggtcgtgtatgctctcaggtacgacctcgagcatacgtttcatgttgctgtcgacagcttgacctccggcttttgatgcattagtctgggtcacggatcaagtcaaggtcagatgttgtcacataccattctcaaataccatggccataggggcacactcgtacagaattcgtagcttgcccttgggactctttttatcggcggggtatgcgaaaataccaccgtataatatcgttcggtaagcatcagcaaccatggaaccgatgtatcgcgagctgtaaggtttgccgttctcagtagggaatttcagagagttgaagtattctttcgtgttgtcctgccagtagagcgagttaccctcgttgacggagtatattgaccgtttcttgggcatcttcatatcgggatgtgtgaggataaactcgccgaacgaattgtcgagtgtgaaaccattgacggtgccacccttcatcgtgatgaccaactgcgcagaggccccgtacatcgtaaatccagcagccagaagatgcgtgccaggcttcaaaatatcctccttcgtccccgtcgagtcatcagcgagcttgtgaataccgaagatagtgcccacggagacaccggcgtccaagttcgagctgccgtcgatagggtcgcaagccacggcatatctagcacccttctggtctttgaagtatatgatctcttcctcctcttccgaaacaagtagcgcacacttcccggaggatttcatggccgcaataaacaagtcatttccaatgacatccagtttcttctggtcatcaccggtggcatttgactgtccggctaaccccgtcaagttgactagcgttgcgcggcggatgtagtacgagatagctttgaacgagaattgcagggcgtggcatagtaatctgcgtcgcaagcaatgtcagtagggtttcttgcaggagcaaagcatgtgatgtgtacctacgtgaagtcaccagttgcctccttgtgtttggactgctcttccgtcaagaatctggtcaatgtgacgatgtcagtgttgacagtggagctctcggccgcgggtatctcgtggtgctccatgatgtcgactatcgtgtattagatgagagtggtgaagtgttcgggggacgagttgaggggtaatccgtgaacaaagacaatgcggctctaaggttcagaggtgggttggaagaccgctttatttttaggagctatggaaggagccagacgtcagagcaaggattggtagatctcgattaaccttaggtcgtgcgtaaatgtatattggtgggaaaatgtttatgagaagcagcaaaagagacaagcgcggtattagtatgacgactcaggcacgtcgcgagagatgccgagggaatacgtgcgagtgtaacagaaagataccgcacccctcctttcctcaggctggtagccgtcccccaaacaccaggaacgcctggccggtagctcagctgggtatcacgatcattgggcacattagctcggtacaacgggtagcgtagggaagatcatctggaagcatgcagagtgtccaggcaaagtcgcccggctttgaccccgcgatgcgcggtccctaacccggccaagaggaaatgtggactttgtgaaggggaaagaggatttcccgggttgagccgcaacggtgtttcggatgagaaacgttgaaatgaccgaccaatggcggtgtccctccaataccgatgcggaagatgtcggccattgtcgtgagagagacaaggatacgtcactgtatggacgcgacaagttcaacttcttatggtcgtgtgagcttcaacccagccatggatttgtcccgcattactaaagggaattggcccatatcacctggcacgcggccgtggcgcaaacagatctggacccaaggcaatctctgcgccgcaggtgacattcatttggcgcgctgggacggcgtcacagaatttggtctggcacgcacatggcgacatggcacggaat

SEQ ID NO: 9255 - DNA, 1032 bp, Muscodor strobelii
  misc_feature: SGI cDNA ID NO. 562886
  misc_feature: Encodes the peptide sequence at SEQ ID NO 9256
atggagcaccacgagatacccgcggccgagagctccactgtcaacactgacatcgtcacattgaccagattcttgacggaagagcagtccaaacacaaggaggcaactggtgacttcacattactatgccacgccctgcaattctcgttcaaagctatctcgtactacatccgccgcgcaacgctagtcaacttgacggggttagccggacagtcaaatgccaccggtgatgaccagaagaaactggatgtcattggaaatgacttgtttattgcggccatgaaatcctccgggaagtgtgcgctacttgtttcggaagaggaggaagagatcatatacttcaaagaccagaagggtgctagatatgccgtggcttgcgaccctatcgacggcagctcgaacttggacgccggtgtctccgtgggcactatcttcggtattcacaagctcgctgatgactcgacggggacgaaggaggatattttgaagcctggcacgcatcttctggctgctggatttacgatgtacggggcctctgcgcagttggtcatcacgatgaagggtggcaccgtcaatggtttcacactcgacaattcgttcggcgagtttatcctcacacatcccgatatgaagatgcccaagaaacggtcaatatactccgtcaacgagggtaactcgctctactggcaggacaacacgaaagaatacttcaactctctgaaattccctactgagaacggcaaaccttacagctcgcgatacatcggttccatggttgctgatgcttaccgaacgatattatacggtggtattttcgcataccccgccgataaaaagagtcccaagggcaagctacgaattctgtacgagtgtgcccctatggccatggtatttgagaatgccggaggtcaagctgtcgacagcaacatgaaacgtatgctcgaggtcgtacctgagagcatacacgaccgttcgggtatctacatgggaagttgggacgaagtcgagaaagtcaaggccttccacaagtag

SEQ ID NO: 9256 - protein, 343 aa, Muscodor strobelii
  misc_feature: SGI Peptide ID NO. 562886
  misc_feature (19)..(343): Pfam Id: PF00316 Pfam Desc: Fructose-1-6-bisphosphatase
  misc_feature (19)..(342): Pfam Id: PF00316 Pfam Desc: Fructose-1-6-bisphosphatase
  misc_feature (14)..(343): NCBI GI: 154303870 Blast Desc: fructose-1,6-bisphosphatase [Botryotinia fuckeliana B05.10] gi|150854403|gb|EDN29595.1| fructose-1,6-bisphosphatase [Botryotinia fuckeliana B05.10]
  misc_feature (14)..(343): NCBI GI: 156040782 Blast Desc: conserved [Sclerotinia sclerotiorum 1980] gi|154695753|gb|EDN95491.1| conserved [Sclerotinia sclerotiorum 1980]
  misc_feature (10)..(343): NCBI GI: 171681890 Blast Desc: protein product [Podospora anserina] gi|170940904|emb|CAP66554.1| protein product [Podospora anserina]
  misc_feature (10)..(343): NCBI GI: 256727147 Blast Desc: [Nectria haematococca mpVI 77-13-4]
  misc_feature (9)..(343): NCBI GI: 116202107 Blast Desc: conserved [Chaetomium globosum CBS 148.51] gi|88177456|gb|EAQ84924.1| conserved [Chaetomium globosum CBS 148.51]
  misc_feature (10)..(342): NCBI GI: 261359671 Blast Desc: fructose-1,6-bisphosphatase [Verticillium albo-atrum VaMs.102]
  misc_feature (14)..(342): NCBI GI: 85097320 Blast Desc: fructose-1,6-bisphosphatase [Neurospora crassa OR74A] gi|28921914|gb|EAA31187.1| fructose-1,6-bisphosphatase [Neurospora crassa OR74A]
  misc_feature (10)..(343): NCBI GI: 39954137 Blast Desc: conserved [Magnaporthe grisea 70-15] gi|145021161|gb|EDK05290.1| conserved [Magnaporthe grisea 70-15]
  misc_feature (10)..(343): NCBI GI: 46134281 Blast Desc: FG09280.1 [Gibberella zeae PH-1]
  misc_feature (14)..(343): NCBI GI: 226285140 Blast Desc: fructose-1,6-bisphosphatase [Paracoccidioides brasiliensis Pb01]
  misc_feature (15)..(337): SWISSPROT Homolog: EC 3.1.3.11 Fructose-bisphosphatase
MEHHEIPAAESSTVNTDIVTLTRFLTEEQSKHKEATGDFTLLCHALQFSFKAISYYIRRATLVNLTGLAGQSNATGDDQKKLDVIGNDLFIAAMKSSGKCALLVSEEEEEIIYFKDQKGARYAVACDPIDGSSNLDAGVSVGTIFGIHKLADDSTGTKEDILKPGTHLLAAGFTMYGASAQLVITMKGGTVNGFTLDNSFGEFILTHPDMKMPKKRSIYSVNEGNSLYWQDNTKEYFNSLKFPTENGKPYSSRYIGSMVADAYRTILYGGIFAYPADKKSPKGKLRILYECAPMAMVFENAGGQAVDSNMKRMLEVVPESIHDRSGIYMGSWDEVEKVKAFHK

SEQ ID NO: 9257 - DNA, 3620 bp, Muscodor strobelii
  misc_feature: SGI EST ID NO. CUFF.22092.1
  misc_feature: Variant of the nucleotide sequence at SEQ ID NO 9255
attccgtgccatgtcgccatgtgcgtgccagaccaaattctgtgacgccgtcccagcgcgccaaatgaatgtcacctgcggcgcagagattgccttgggtccagatctgtttgcgccacggccgcgtgccaggtgatatgggccaattccctttagtaatgcgggacaaatccatggctgggttgaagctcacacgaccataagaagttgaacttgtcgcgtccatacagtgacgtatccttgtctctctcacgacaatggccgacatcttccgcatcggtattggagggacaccgccattggtcggtcatttcaacgtttctcatccgaaacaccgttgcggctcaacccgggaaatcctctttccccttcacaaagtccacatttcctcttggccgggttagggaccgcgcatcgcggggtcaaagccgggcgactttgcctggacactctgcatgcttccagatgatcttccctacgctacccgttgtaccgagctaatgtgcccaatgatcgtgatacccagctgagctaccggccaggcgttcctggtgtttgggggacggctaccagcctgaggaaaggaggggtgcggtatctttctgttacactcgcacgtattccctcggcatctctcgcgacgtgcctgagtcgtcatactaataccgcgcttgtctcttttgctgcttctcataaacattttcccaccaatatacatttacgcacgacctaaggttaatcgagatctaccaatccttgctctgacgtctggctccttccatagctcctaaaaataaagcggtcttccaacccacctctgaaccttagagccgcattgtctttgttcacggattacccctcaactcgtcccccgaacacttcaccactctcatctaatacacgatagtcgacatcatggagcaccacgagatacccgcggccgagagctccactgtcaacactgacatcgtcacattgaccagattcttgacggaagagcagtccaaacacaaggaggcaactggtgacttcacattactatgccacgccctgcaattctcgttcaaagctatctcgtactacatccgccgcgcaacgctagtcaacttgacggggttagccggacagtcaaatgccaccggtgatgaccagaagaaactggatgtcattggaaatgacttgtttattgcggccatgaaatcctccgggaagtgtgcgctacttgtttcggaagaggaggaagagatcatatacttcaaagaccagaagggtgctagatatgccgtggcttgcgaccctatcgacggcagctcgaacttggacgccggtgtctccgtgggcactatcttcggtattcacaagctcgctgatgactcgacggggacgaaggaggatattttgaagcctggcacgcatcttctggctgctggatttacgatgtacggggcctctgcgcagttggtcatcacgatgaagggtggcaccgtcaatggtttcacactcgacaattcgttcggcgagtttatcctcacacatcccgatatgaagatgcccaagaaacggtcaatatactccgtcaacgagggtaactcgctctactggcaggacaacacgaaagaatacttcaactctctgaaattccctactgagaacggcaaaccttacagctcgcgatacatcggttccatggttgctgatgcttaccgaacgatattatacggtggtattttcgcataccccgccgataaaaagagtcccaagggcaagctacgaattctgtacgagtgtgcccctatggccatggtatttgagaatgccggaggtcaagctgtcgacagcaacatgaaacgtatgctcgaggtcgtacctgagagcatacacgaccgttcgggtatctacatgggaagttgggacgaagtcgagaaagtcaaggccttccacaagtagattggggctagcgagtaatgtgcgacgtctgagtactgtggaagtcttgagcatcactgcatttgatgtacattcaccacatcgcataacaattaattcataaacattcagaaacgtcaacttcgatacttgtctcgttcccctactctattttgattttccaaaaatttgcttatagaagtacaactagaacaacttcgggaagaacttaggagtattcttcttccactcctggtaatccttgcgatcgccatatcgcttatcatacttcttctcgcttaacggcacaccagtgaccttcaatagcaagaagctcacgaacgcagggctgatgtagcacaatgccactgtagccaacttgctcgcagcgccaccggagaatccaagtccgacctggacttggcgtgataacaaaacacctgcagcggtcgtcgcgataccggtccagagcgtgcattcaccgaagtaattcgggaattgactgcaatcattattagtatctccaccctgatgagtgatctcgaggaacttgaagactcacctccggccccacagtcctctggttagaaactcctcgtcatgctgcttattcctcttctcgtccagccacttattcttctgtctatcagccgcgatctcaaacgcaaagccgcccgcgaaaagtgtaagacccagtatatcagaggccatgataccagatgcgaaggcagcggcgggcacggcgttgacggccatcacgggcatgagacatagtgaaacccatgtcgcttggccgaaccacgcacctgagaatttggctggtgacttcttgatctcgtcgaaacgggagtcgtggccagattttagaatgcgggcgaagaggtaggatcccactgcaattctgttagtcatgtgagactgcgaaagagggcgggtaagatatacaccgcgcgctccagaatactaccgcggcgctgagcgctacctgtctccaattcaagggtccattgcctttcgtgagagtctctagtatgctaggaaatgcgggcttgggtagtcctgctgcggcagctgctgcgcgaactcgtatactcgggaggtagagtgagagtaaagtgcaggtgaggaatgtggccgagcctgaggcgtcgtagaatcgctcggattgtaatgggatagagggtatggctactgcggtttggatcgcgaaggcggctgctacgctggggactacggtgcggaggaatggggagcggaaatttgtcgcgtggaggacgtattggaggatacccatattgttcgcgttgtcgctttttgtcgcttttatgagactccaaaaggatgtgatgagatggaatagaatttgacgatggcggggcaattgttgatgcttcaatgctcctcactgagtggaatgaagtgcaagatgatcacattcatactatttctgatatgattatggtaacgcgtcttaattggctttcgtggtaagcctggtctcgagctctttaagtttcatggtgttgctcaaagacgtgttagagctgcaagagccagtggtgatgcatgcgagagtcgtgacgcaataggaatccctaggggtcctgggcaccccgaaacggaccaacttcaaacccgagatctccagaaccaggtgcgagtcagttccgacatgcgactttgctataagatcg

SEQ ID NO: 9258 - DNA, 1770 bp, Muscodor strobelii
  misc_feature: SGI cDNA ID NO. 562887
  misc_feature: Encodes the peptide sequence at SEQ ID NO 9259
atgtcgtcaagtaatgatcagattgaccttgccgttaacatcatcaccttcattggtgtcccacttgccgtgttgggtgtgctgccaatcttgtacaacactcttgcgacactgaccgcgctttccaagatcaagcgcatgctgaaacatggcaaactcactgccttgacacgaagtgacatcatcaataaagtcatcgaggtggaattgccccgttatgccgttcagccatgggaccgcttcaatcatcgcgatgaatattggcaaatgtcgagagcgccaagctcaattcctgggggcacatggacgacattcaactggaaaacgaacaccatcgggatcaagactcagcgcgtcgagtatgccgatcaattacggcagccccaagttgaggtagccttcgacgagctcgttgcgtatttactagaccttggcgctgtgcccgatccccatggatggcgactgttgagatcaacaggactatggacgcctaatgggtgctgtcttatgaaatctcctgacaacagtcgccatgcgttgacgattgcgccgctagatgactcggatgggcatttgtcgctcaagatcacatgggcaccttcatggaccacacgggatgcctcccatttaccaccatactgggtaagactaccgccgccgccgccgccgccgaaaacccccgaagaggaagatactgcagaggcttcaaataacacacagacaactcaggagacggctgtggcagaggaaaagaaggacgcatcaatgacagcccgggagagtgacaaaccacctgcggaagacaagatcgacaacggtaaagacagcacacccaaggaatcacttgattcaattcagaaagaggcagagaagaacgcagccagccctatcacctgtcagttcacgaccgaaggtctcgtttcggcactgagccaaggccagggacccttaacgtcatcattgaatgtgcacagtctgtttgtcgagcatctgcgggtgaacagcaacaagatgaacggctcctggttcgcaagcgcagcaactgcttacggaacgacgagtcagactatgctatggaactacaagatccccgatgagattctgaactttgcacggaaagataccgtgccttgtggtgttctcgaaatgctcttcatcgtcgatagccatcagacaccggaatgggaaacgacgtacaactcgggtcaggagcaccacgacaattttgtgagaagaaaccaagaacagcgcatcgcaatgatggcagagggacggatgagcccggccgatagggcgaacgctgtcgcggtacggatgcagcgggaaatgcaggatcggatgaatgacatgcaagatcagatgcgccgtgaccgaaaacgacgagacttacgcaaacgcgaggcgctacaaagcccaaagtgggacacgaagcttgtggcagagcactgtctgagcctcctccaaaagcgggaagtggtggccgcagaccttaagatgaaggagatcgtcggcatgctcctccatcgcatggttctcgaagccgagttcgcgagttcaatatgcgaaatacttgatctatggaaatcatgggccgataacggcggcatgcgctcgtcagatcttgacacgcttgacatgcgccgcgacatcttctgccaggctactttactcgtcgcacttattaagaatgcgacgggtgcacacgaaggaacgttatcgatggacttgcaagagtgtttgaggatgtggagggttgttagacttggttag

SEQ ID NO: 9259 - protein, 589 aa, Muscodor strobelii
  misc_feature: SGI Peptide ID NO. 562887
  misc_feature (27)..(589): NCBI GI: 256728129 Blast Desc: NECHADRAFT_54104 [Nectria haematococca mpVI 77-13-4]
  misc_feature (23)..(589): NCBI GI: 116202507 Blast Desc: CHGG_09138 [Chaetomium globosum CBS 148.51] gi|88177656|gb|EAQ85124.1| CHGG_09138 [Chaetomium globosum CBS 148.51]
  misc_feature (11)..(589): NCBI GI: 171682430 Blast Desc: protein product [Podospora anserina] gi|170941174|emb|CAP66824.1| protein product [Podospora anserina]
  misc_feature (17)..(589): NCBI GI: 145610629 Blast Desc: [Magnaporthe grisea 70-15] gi|145018008|gb|EDK02287.1| [Magnaporthe grisea 70-15]
  misc_feature (11)..(589): NCBI GI: 212539418 Blast Desc: conserved [Penicillium marneffei ATCC 18224] gi|210067163|gb|EEA21255.1| conserved [Penicillium marneffei ATCC 18224]
  misc_feature (13)..(589): NCBI GI: 238844530 Blast Desc: conserved [Microsporum canis CBS 113480]
  misc_feature (11)..(589): NCBI GI: 242804573 Blast Desc: conserved [Talaromyces stipitatus ATCC 10500] gi|218717747|gb|EED17168.1| conserved [Talaromyces stipitatus ATCC 10500]
  misc_feature (11)..(516): NCBI GI: 240109214 Blast Desc: CPC735_027190 [Coccidioides posadasii C735 delta SOWgp]
  misc_feature (11)..(460): NCBI GI: 119182251 Blast Desc: CIMG_06165 [Coccidioides immitis RS]
  misc_feature (11)..(161): NCBI GI: 261359446 Blast Desc: conserved [Verticillium albo-atrum VaMs.102]
MSSSNDQIDLAVNIITFIGVPLAVLGVLPILYNTLATLTALSKIKRMLKHGKLTALTRSDIINKVIEVELPRYAVQPWDRFNHRDEYWQMSRAPSSIPGGTWTTFNWKTNTIGIKTQRVEYADQLRQPQVEVAFDELVAYLLDLGAVPDPHGWRLLRSTGLWTPNGCCLMKSPDNSRHALTIAPLDDSDGHLSLKITWAPSWTTRDASHLPPYWVRLPPPPPPPKTPEEEDTAEASNNTQTTQETAVAEEKKDASMTARESDKPPAEDKIDNGKDSTPKESLDSIQKEAEKNAASPITCQFTTEGLVSALSQGQGPLTSSLNVHSLFVEHLRVNSNKMNGSWFASAATAYGTTSQTMLWNYKIPDEILNFARKDTVPCGVLEMLFIVDSHQTPEWETTYNSGQEHHDNFVRRNQEQRIAMMAEGRMSPADRANAVAVRMQREMQDRMNDMQDQMRRDRKRRDLRKREALQSPKWDTKLVAEHCLSLLQKREVVAADLKMKEIVGMLLHRMVLEAEFASSICEILDLWKSWADNGGMRSSDLDTLDMRRDIFCQATLLVALIKNATGAHEGTLSMDLQECLRMWRVVRLG

SEQ ID NO: 9260 - DNA, 3187 bp, Muscodor strobelii
  misc_feature: SGI EST ID NO. CUFF.22000.0
  misc_feature: Variant of the nucleotide sequence at SEQ ID NO 9258
cgacgacgacgacctacgacgcgtgcaaattctcttggctcgtctatgtttctgttactgcgccggatagcagttggaaatcccggcttggccaacgatgtaaatggcccatcatgtcgtcaagtaatgatcagattgaccttgccgttaacatcatcaccttcattggtgtcccacttgccgtgttgggtgtgctgccaatcttgtacaacactcttgcgacactgaccgcgctttccaagatcaagcgcatgctgaaacatggcaaactcactgccttgacacgaagtgacatcatcaataaagtcatcgaggtggaattgccccgttatgccgttcagccatgggaccgcttcaatcatcgcgatgaatattggcaaatgtcgagagcgccaagctcaattcctgggggcacatggacgacattcaactggaaaacgaacaccatcgggatcaagactcagcgcgtcgagtatgccgatcaattacggcagccccaagttgaggtagccttcgacgagctcgttgcgtatttactagaccttggcgctgtgcccgatccccatggatggcgactgttgagatcaacaggactatggacgcctaatgggtgctgtcttatgaaatctcctgacaacagtcgccatgcgttgacgattgcgccgctagatgactcggatgggcatttgtcgctcaagatcacatgggcaccttcatggaccacacgggatgcctcccatttaccaccatactgggtaagactaccgccgccgccgccgccgccgaaaacccccgaagaggaagatactgcagaggcttcaaataacacacagacaactcaggagacggctgtggcagaggaaaagaaggacgcatcaatgacagcccgggagagtgacaaaccacctgcggaagacaagatcgacaacggtaaagacagcacacccaaggaatcacttgattcaattcagaaagaggcagagaagaacgcagccagccctatcacctgtcagttcacgaccgaaggtctcgtttcggcactgagccaaggccagggacccttaacgtcatcattgaatgtgcacagtctgtttgtcgagcatctgcgggtgaacagcaacaagatgaacggctcctggttcgcaagcgcagcaactgcttacggaacgacgagtcagactatgctatggaactacaagatccccgatgagattctgaactttgcacggaaagataccgtgccttgtggtgttctcgaaatgctcttcatcgtcgatagccatcagacaccggaatgggaaacgacgtacaactcgggtcaggagcaccacgacaattttgtgagaagaaaccaagaacagcgcatcgcaatgatggcagagggacggatgagcccggccgatagggcgaacgctgtcgcggtacggatgcagcgggaaatgcaggatcggatgaatgacatgcaagatcagatgcgccgtgaccgaaaacgacgagacttacgcaaacgcgaggcgctacaaagcccaaagtgggacacgaagcttgtggcagagcactgtctgagcctcctccaaaagcgggaagtggtggccgcagaccttaagatgaaggagatcgtcggcatgctcctccatcgcatggttctcgaagccgagttcgcgagttcaatatgcgaaatacttgatctatggaaatcatgggccgataacggcggcatgcgctcgtcagatcttgacacgcttgacatgcgccgcgacatcttctgccaggctactttactcgtcgcacttattaagaatgcgacgggtgcacacgaaggaacgttatcgatggacttgcaagagtgtttgaggatgtggagggttgttagacttggttagtgtgtgtatatcgttagttgggttgcgaaatagccttggcgtttgaaggttgaaaacatctcatgcgcatatatgaattatgtcagcacattacggagatagctttcacgagccgtcttcgaatgtctataagtaccttcacatatgctatcattcaaatcaatatcgggtcgaacattctctgcaacatttgtttgtactgactagtcaaccaaaagcctacaacgagtacctcatctcgcagtactacactacgtcagcttctgagtattcacgcatctcgcatatcaatcataatggatcgctctagtcttgaccctgcgcccatgtcgtgcgtagagaaactccgacgtctgagagagaagaactttgccccgtggcgatttgcgggatattgtccaacgccgccggattctcctacccaaacttcaacaccaccgcaggcagatataacagcaacgaaagcacaccaaacaccgagttcgccgacttaaacttcttactggctacgcagagacccacaaggaaataacggaccacttcaagcactccttaggcgaatgtcgacaacgggttccaatcgcaaaacacagaagctgtcgcgccagcctcttggaaagggtttctttcgatgtaatgtgctaacacaatattgtatcctcgcatacaccgcatactactttctgggtttgacttatgcatgcagccacttgtttgtatagaaatgtcgagataaacatcttcgggaggaataccaccatgccgtctaggcttctcttcatacgctcagctcgtactataaagcatcagcactcggcaggaccgtaacacatgacttgagttttttgcgttgtacacgctgcctgttaggctggagcggagattgccgcgaggaaggattaagggatggtttcaatctcgttcactgcaagaccactatcagaacgagcgacatggatgaggtcgcgctcacatccacactgcaggtatatactctcgatcggagtcgattccattcagagcacaggagaaaaacatctccttcgatgtggcattagattcggcattttggagaaaccatgctgtcacttgacagttgagacaccaatgaggattgggaatgtcttttaggaagcacttagctcattttgtattgcaatattatcgctattcatgagtctatatgcgtgccaatcttgagcagcaaatttcaaacgagatttaagctcgatgccgctatatcattgagtaaagtctctgtgtttgtgcatctggctggcgtagggtacctggcaattgacaac

SEQ ID NO: 9261 - DNA, 939 bp, Muscodor strobelii
  misc_feature: SGI cDNA ID NO. 562888
  misc_feature: Elevated expression when VOC is produced
  misc_feature: Encodes the peptide sequence at SEQ ID NO 9262
atgaagtgcgccggtcgtatcgttcacaaggtcgcgttccgccggcccgtgccgcgcgtgggcttcgtcgcgacccctgtaaaaccactagtaaatccactatcattcaaagcaccatattcttctctttcccgcaaaccagtcgaggataagagcgttatcatcaccggctcgagtcggggcattggaaaggcgatcgcacttcgtctcgcaaatgatgggtacaatgtctgcgtgaacgacatcagcgccaatgaagcgggttgtcacgaggtcgtcgatgagatccggggtatggggaggaaagccgtcaccgccgtggcagacgtgacgaatcggtcgcaagtgaaggatatgatacagacgagtgttcatgaattggggcccttgaacgcgatgatcgcgaatgccggcatcgcgcaagtgaaacaacttcttgaagtcacagaacgagacttccagcgcatgttcgaggtcaacgtgtacggtgtccagaactgcttcgcagaagccgctaagcagatgatcagccagggcaactgcaagccagacgaccccgggaagctgatcgcagccgcctcgatcgtagcattcaagccgtttgcaatgctaccccactacagcgcaagtaaatgggcggttcgcggcttgacgcaagcatatgcgatggacctggccgagcataacatcacggtcaatgcgtatgcgccgggcattgtggggacggcgatgtgggagttgattgacgctggtgttgccgagaaacagggtctgcagaaaggagaagtaatgcggaaaatggtccatgacctgacagcgttggggagggcgagcgttccagaggatgtggccaagttggtgagctttctggcgagtagtgatagtgactttgtcaccgggcagacgcagctcgttgacggcggaattatttattcgtag

SEQ ID NO: 9262 - protein, 312 aa, Muscodor strobelii
  misc_feature: SGI Peptide ID NO. 562888
  misc_feature (51)..(226): Pfam Id: PF00106 Pfam Desc: short chain dehydrogenase
  misc_feature (17)..(312): NCBI GI: 189198109 Blast Desc: 3-oxoacyl-(acyl-carrier-protein) reductase [Pyrenophora tritici-repentis Pt-1C-BFP] gi|187981340|gb|EDU47966.1| 3-oxoacyl-(acyl-carrier-protein)
  misc_feature (49)..(312): NCBI GI: 256723538 Blast Desc: NECHADRAFT_69787 [Nectria haematococca mpVI 77-13-4]
  misc_feature (22)..(312): NCBI GI: 39972549 Blast Desc: MGG_07576 [Magnaporthe grisea 70-15] gi|145016781|gb|EDK01211.1| MGG_07576 [Magnaporthe grisea 70-15]
  misc_feature (51)..(285): NCBI GI: 154308936 Blast Desc: BC1G_07996 [Botryotinia fuckeliana B05.10] gi|150852622|gb|EDN27814.1| BC1G_07996 [Botryotinia fuckeliana B05.10]
  misc_feature (54)..(312): NCBI GI: 238483681 Blast Desc: short chain type dehydrogenase, [Aspergillus flavus NRRL3357] gi|220701129|gb|EED57467.1| short chain type dehydrogenase, [Aspergillus flavus NRRL3357]
  misc_feature (51)..(310): NCBI GI: 156063138 Blast Desc: SS1G_01685 [Sclerotinia sclerotiorum 1980] gi|154697021|gb|EDN96759.1| SS1G_01685 [Sclerotinia sclerotiorum 1980]
  misc_feature (54)..(312): NCBI GI: 260904470 Blast Desc: short chain oxidoreductase [Brevibacterium linens BL2]
  misc_feature (54)..(312): NCBI GI: 169766892 Blast Desc: [Aspergillus oryzae RIB40] gi|83765772|dbj|BAE55915.1| protein product [Aspergillus oryzae]
  misc_feature (51)..(312): NCBI GI: 259485183 Blast Desc: TPA: conserved [Aspergillus nidulans FGSC A4]
  misc_feature (57)..(312): NCBI GI: 115390302 Blast Desc: ATEG_03478 [Aspergillus terreus NIH2624] gi|114195052|gb|EAU36752.1| ATEG_03478 [Aspergillus terreus NIH2624]
  misc_feature (51)..(311): SWISSPROT Homolog: EC 1.1.1.5 Acetoin dehydrogenase
  misc_feature: Useful for introducing or modulating the production of volatile compounds
MKCAGRIVHKVAFRRPVPRVGFVATPVKPLVNPLSFKAPYSSLSRKPVEDKSVIITGSSRGIGKAIALRLANDGYNVCVNDISANEAGCHEVVDEIRGMGRKAVTAVADVTNRSQVKDMIQTSVHELGPLNAMIANAGIAQVKQLLEVTERDFQRMFEVNVYGVQNCFAEAAKQMISQGNCKPDDPGKLIAAASIVAFKPFAMLPHYSASKWAVRGLTQAYAMDLAEHNITVNAYAPGIVGTAMWELIDAGVAEKQGLQKGEVMRKMVHDLTALGRASVPEDVAKLVSFLASSDSDFVTGQTQLVDGGIIYS

SEQ ID NO: 9263 - DNA, 1193 bp, Muscodor strobelii
  misc_feature: SGI EST ID NO. CUFF.22006.0
  misc_feature: Variant of the nucleotide sequence at SEQ ID NO 9261
gagatgaagtgcgccggtcgtatcgttcacaaggtcgcgttccgccggcccgtgccgcgcgtgggcttcgtcgcgacccctgtaaaaccactagtaaatccactatcattcaaagcaccatattcttctctttcccgcaaaccagtcgaggataagagcgttatcatcaccggctcgagtcggggcattggaaaggcgatcgcacttcgtctcgcaaatgatgggtacaatgtctgcgtgaacgacatcagcgccaatgaagcgggttgtcacgaggtcgtcgatgagatccggggtatggggaggaaagccgtcaccgccgtggcagacgtgacgaatcggtcgcaagtgaaggatatgatacagacgagtgttcatgaattggggcccttgaacgcgatgatcgcgaatgccggcatcgcgcaagtgaaacaacttcttgaagtcacagaacgagacttccagcgcatgttcgaggtcaacgtgtacggtgtccagaactgcttcgcagaagccgctaagcagatgatcagccagggcaactgcaagccagacgaccccgggaagctgatcgcagccgcctcgatcgtagcattcaagccgtttgcaatgctaccccactacagcgcaagtaaatgggcggttcgcggcttgacgcaagcatatgcgatggacctggccgagcataacatcacggtcaatgcgtatgcgccgggcattgtggggacggcgatgtgggagttgattgacgctggtgttgccgagaaacagggtctgcagaaaggagaagtaatgcggaaaatggtccatgacctgacagcgttggggagggcgagcgttccagaggatgtggccaagttggtgagctttctggcgagtagtgatagtgactttgtcaccgggcagacgcagctcgttgacggcggaattatttattcgtagcttcctgatattcgcccttctactggaagggccctgattcacgcattgtattgtggtcaagattagcatgctctagcggggatagtcctggttcagggggatggtccctgatcccttacttcgacgagtcgccttggtagtacagcattttctatcacttacgatacctacctgatatcatgggaacgctgattatgtgatatacactgtttcatctcattgagccagcgtttgaaaatattaggaatgcg

SEQ ID NO: 9264 - DNA, 213 bp, Muscodor strobelii
  misc_feature: SGI cDNA ID NO. 562889
  misc_feature: Reduced expression when VOC is produced
  misc_feature: Encodes the peptide sequence at SEQ ID NO 9265
atggccgaacgcgccctgcagcagatcctcaaccaattgcggtccaaccccagcctgcccttcggcgacgcctcgacgctgctgtccaaagccaagatcgccctgctgcagctcaaggcggccacgccatcgcccgccacgccgcccgcacacctcgccctcgcccggcaggtctacgaggcgggcgcgctgctcagcatccgcgccaagagc

SEQ ID NO: 9265 - protein, 71 aa, Muscodor strobelii
  misc_feature: SGI Peptide ID NO. 562889
  misc_feature (1)..(71): NCBI GI: 156050653 Blast Desc: SS1G_07914 [Sclerotinia sclerotiorum 1980] gi|154692314|gb|EDN92052.1| SS1G_07914 [Sclerotinia sclerotiorum 1980]
  misc_feature (1)..(71): NCBI GI: 261358921 Blast Desc: 26S proteasome regulatory subunit rpn12 [Verticillium albo-atrum VaMs.102]
  misc_feature (1)..(71): NCBI GI: 46127121 Blast Desc: FG07938.1 [Gibberella zeae PH-1]
  misc_feature (1)..(71): NCBI GI: 256721603 Blast Desc: [Nectria haematococca mpVI 77-13-4]
  misc_feature (1)..(68): NCBI GI: 225680622 Blast Desc: 26S proteasome non-ATPase regulatory subunit 8 [Paracoccidioides brasiliensis Pb03] gi|226292730|gb|EEH48150.1| 26S proteasome non-ATPase regulatory subunit 8 [Paracoccidioides
  misc_feature (1)..(71): NCBI GI: 189191518 Blast Desc: 26S proteasome non-ATPase regulatory subunit 8 [Pyrenophora tritici-repentis Pt-1C-BFP] gi|187973704|gb|EDU41203.1| 26S proteasome non-ATPase regulatory
  misc_feature (1)..(71): NCBI GI: 169599761 Blast Desc: SNOG_02706 [Phaeosphaeria nodorum SN15] gi|160705318|gb|EAT89437.2| SNOG_02706 [Phaeosphaeria nodorum SN15]
  misc_feature (1)..(68): NCBI GI: 226283072 Blast Desc: 26S proteasome non-ATPase regulatory subunit 8 [Paracoccidioides brasiliensis Pb01]
  misc_feature (21)..(68): NCBI GI: 255944349 Blast Desc: Pc20g03920 [Penicillium chrysogenum Wisconsin 54-1255] gi|211587677|emb|CAP85721.1| Pc20g03920 [Penicillium chrysogenum Wisconsin 54-1255]
  misc_feature (1)..(71): NCBI GI: 85088980 Blast Desc: NCU10067 [Neurospora crassa OR74A] gi|28919143|gb|EAA28646.1| conserved [Neurospora crassa OR74A]
  misc_feature: Useful for introducing or modulating the production of volatile compounds
MAERALQQILNQLRSNPSLPFGDASTLLSKAKIALLQLKAATPSPATPPAHLALARQVYEAGALLSIRAKS

SEQ ID NO: 9266 - DNA, 677 bp, Muscodor strobelii
  misc_feature: SGI EST ID NO. CUFF.22018.0
  misc_feature: Variant of the nucleotide sequence at SEQ ID NO 9264
tggaagtctctgaggagatggaagatgcatgtcgaaaactaccctgaaatgcgaggttgcgaaagagaacaagggtctaggctggcggggctgcgacgtagcttggggccagatgcagctactacctcgacccggttacggtcctggtcgtcagcctttcagcctgttgctcgcctcgcctgctgtatcatcacgcccacgaccacgacaacaatatcgacacctaataccacagactttactataacccgcaaccagcaacaaaaacaacctcccatacgcccaccagacaccacatctctacctcggcccgcagctgtgacgatacatcgtgctgtgcaaacagcatccccatccatccgtgttcctgtcgccggccgcattccgccatccaagccttcgcatcgcccagacagctctgcactagcaccagcaccagcgcctgcacgaccgacaccctccgccatggccgaacgcgccctgcagcagatcctcaaccaattgcggtccaaccccagcctgcccttcggcgacgcctcgacgctgctgtccaaagccaagatcgccctgctgcagctcaaggcggccacgccatcgcccgccacgccgcccgcacacctcgccctcgcccggcaggtctacgaggcgggcgcgctgctcagcatccgcgccaagag

SEQ ID NO: 9267 - DNA, 2679 bp, Muscodor strobelii
  misc_feature: SGI cDNA ID NO. 562890
  misc_feature: Encodes the peptide sequence at SEQ ID NO 9268
atgcctcagttcggagctaccttctacccgggcggcgtcgacgactactacatgcctggccctgaggtgatagctccctcgccgcaacgggttatgccagaggtgccccagaacatgcaacaaggccttcaacgcatggagctggaagccagagaagccgttcagagcaacacaccgtccaataccagcccgcgccacaatcgcgaaccttcgctatcaaccttcatcaacaaccagaacggtggttttgggcagcaatatcaatccgaccggcccaaacccaccaactatagccccgcctccaactttagccccttccccgagccccgggacacaccccgcgtccccgaaaagaacgtgcccgtgatgcacgaagcaccgtccttctcgccgtttcctagagtcacgggcgatcacctgccgcctagcgatgatgagagggagaccgtcctcgccaacagccaggaacatgtgcttcattctaacgaccccgacatgcagatatgttgggctcgagacgtgctgtcccacgtcgaggtagcggccgaggctgctgctcgagaagccgacgctcttcgtaacagcaacgatcgcgatctgccggcgcgaccgcatacgcccaagctggaacatgacctacgcgtcaatgccgtcaacattgtatcttaccttgctgaccaaggccaccccgaggccctgtttatacgcagcaagtggctcgagtttggcaagttcggaaagcgtcaggataaaaaggaagcgtacaccgggtacatgagagctgctcagcaaggctgggcccgcgccgattaccgaatcggcatgctctttgaaaactcaaacgatgtagacaaagccatgcatcattatcagatcggtctcgcagccaaggactcggccgcagcatatcgcctagggatggtcaacctgcttggccagcgaggcaggccaaaggacattgctcggggcctcgacttgattcatcaggccgctgacacggcagacgaggatgccccccagggcgctttcgtctatggcatgttaatcgccagagatctaccagatgtgactatccccgagggcgtacttccttatgacgtagcccaggcgcggcaattcatcgagaaagctgcctatcttggatttgctaaagcccaattgaagatgggtcaggcgtacgagctatgtcagcttggatgcgaattcgaaccatccaagtcgctgcattactacggtcttgcggcccgccaaggtcaggccgaagcctgtctcggtgtcagtcgatggttcctgtttggctacgaaggggaattcgccaagaatgagcaacttgcgttcaagtatgctcagctagcagcaaagacgaaattgccaacaggcgagtttgcgatggggtactactacgagatcggtatttccgtcgagaaagacatacgggaggcccgcagatggtacgagctcgcggcagagcatggaaataaggatgccgtgggtcgtctagagggtctttcacaatctaagactctatcaaaacaagaccacgagacagcaacattgggtcgcatcaagtcgaagcacgggtcacaacgaggacagaggcctgaacgattcaagcaaatgggcggtgccatgcctaccgtctcagaatcgcccagagcgtcgccacaaccatcacctcatgcccagaactttggtcccaacgacggtcggccgcctgctttcactattctccctgatcggacacaatcagcagcgccatatccagaagacgacaggccagcacctctttctttgaaccgaccgacttcagttgcgccctacccagaagatgacgcggcggggctcaagcctcagctctcgcctcatttcaatccaggcattcgaccatcagcaggacctcatgcggatcgccctgggagcgcgtttggtattcgcacgcaatcgcccggcggacctgttaataatatgcgtgtccagtctggtcagctccccgttccgcccaccgggatggatccgaaccgtggtcgtcccgtttccgccggatggcaaccacaagtatccggcggttaccgtcagccaagtcccaattctcgcccacaaggatcaggttacgatcagcgacccgtttcatctacctatgatcgtcctaccggcggcctaccagcgcagcctggccctggaccaaatcgattggtgaaaccaggacccgcaggacccggggccggcagaggaacagcgccaccgtccggctatggtagggaatcaactggtcccgcaggctatgcaccaggccctcgagcttctgctgggcaacttccgtacaatccacatagcggccgctcatctgctgctccgtccggcgcccctgtaatgagtggaggactcgggcagcggatcagttcgaacccaccaggcggcctgcctcagggtggtccggccggcgggagaatcaacaatggagctcgacctagttccggccctggtacgccgttgaaggatgcacctggacgcgccagtgctccgcccacccaagcccgtcccagtcccacacccggcacgccggcttcgactgcttcggccgcttcagcgcctcccaaacctaccaaatctggaccagcaacattcgagcagatgggtattcctcaaggaaaacaggatgatgattgcgtaatcatgtaa

SEQ ID NO: 9268 - protein, 892 aa, Muscodor strobelii
  misc_feature: SGI Peptide ID NO. 562890
  misc_feature (458)..(493): Pfam Id: PF08238 Pfam Desc: Sel1 repeat
  misc_feature (383)..(419): Pfam Id: PF08238 Pfam Desc: Sel1 repeat
  misc_feature (299)..(335): Pfam Id: PF08238 Pfam Desc: Sel1 repeat
  misc_feature (1)..(892): NCBI GI: 261358923 Blast Desc: conserved [Verticillium albo-atrum VaMs.102]
  misc_feature (1)..(892): NCBI GI: 189091940 Blast Desc: [Podospora anserina] gi|188219323|emb|CAP49303.1| protein product [Podospora anserina]
  misc_feature (1)..(890): NCBI GI: 27803079 Blast Desc: protein product [Podospora anserina]
  misc_feature (4)..(892): NCBI GI: 145616158 Blast Desc: MGG_03530 [Magnaporthe grisea 70-15] gi|145009909|gb|EDJ94565.1| MGG_03530 [Magnaporthe grisea 70-15]
  misc_feature (1)..(890): NCBI GI: 85093858 Blast Desc: NCU02351 [Neurospora crassa OR74A] gi|28921226|gb|EAA30536.1| conserved [Neurospora crassa OR74A]
  misc_feature (2)..(651): NCBI GI: 46127119 Blast Desc: FG07937.1 [Gibberella zeae PH-1]
  misc_feature (1)..(890): NCBI GI: 116179494 Blast Desc: CHGG_00375 [Chaetomium globosum CBS 148.51] gi|88184672|gb|EAQ92140.1| CHGG_00375 [Chaetomium globosum CBS 148.51]
  misc_feature (2)..(652): NCBI GI: 256721631 Blast Desc: NECHADRAFT_37440 [Nectria haematococca mpVI 77-13-4]
  misc_feature (2)..(645): NCBI GI: 156050661 Blast Desc: SS1G_07918 [Sclerotinia sclerotiorum 1980] gi|154692318|gb|EDN92056.1| SS1G_07918 [Sclerotinia sclerotiorum 1980]
  misc_feature (2)..(611): NCBI GI: 189200515 Blast Desc: chitin synthase regulator 3 [Pyrenophora tritici-repentis Pt-1C-BFP] gi|187983693|gb|EDU49181.1| chitin synthase regulator 3 [Pyrenophora tritici-repentis Pt-1C-BFP]
MPQFGATFYPGGVDDYYMPGPEVIAPSPQRVMPEVPQNMQQGLQRMELEAREAVQSNTPSNTSPRHNREPSLSTFINNQNGGFGQQYQSDRPKPTNYSPASNFSPFPEPRDTPRVPEKNVPVMHEAPSFSPFPRVTGDHLPPSDDERETVLANSQEHVLHSNDPDMQICWARDVLSHVEVAAEAAAREADALRNSNDRDLPARPHTPKLEHDLRVNAVNIVSYLADQGHPEALFIRSKWLEFGKFGKRQDKKEAYTGYMRAAQQGWARADYRIGMLFENSNDVDKAMHHYQIGLAAKDSAAAYRLGMVNLLGQRGRPKDIARGLDLIHQAADTADEDAPQGAFVYGMLIARDLPDVTIPEGVLPYDVAQARQFIEKAAYLGFAKAQLKMGQAYELCQLGCEFEPSKSLHYYGLAARQGQAEACLGVSRWFLFGYEGEFAKNEQLAFKYAQLAAKTKLPTGEFAMGYYYEIGISVEKDIREARRWYELAAEHGNKDAVGRLEGLSQSKTLSKQDHETATLGRIKSKHGSQRGQRPERFKQMGGAMPTVSESPRASPQPSPHAQNFGPNDGRPPAFTILPDRTQSAAPYPEDDRPAPLSLNRPTSVAPYPEDDAAGLKPQLSPHFNPGIRPSAGPHADRPGSAFGIRTQSPGGPVNNMRVQSGQLPVPPTGMDPNRGRPVSAGWQPQVSGGYRQPSPNSRPQGSGYDQRPVSSTYDRPTGGLPAQPGPGPNRLVKPGPAGPGAGRGTAPPSGYGRESTGPAGYAPGPRASAGQLPYNPHSGRSSAAPSGAPVMSGGLGQRISSNPPGGLPQGGPAGGRINNGARPSSGPGTPLKDAPGRASAPPTQARPSPTPGTPASTASAASAPPKPTKSGPATFEQMGIPQGKQDDDCVIM

SEQ ID NO: 9269 - DNA, 5125 bp, Muscodor strobelii
  misc_feature: SGI EST ID NO. CUFF.22055.0
  misc_feature: Variant of the nucleotide sequence at SEQ ID NO 9267
caaacactcgggcgctcaatcatgaattccatcgaactgctgcaactaaagccaccatcctccctttccaccgcctctcttaaacatgacatctttgattattgcatgacacttctgtcattctcgtggcctcaagacgttgccaaacccagcacattgaatatcactttcacttcccgtgtccttgaagtctcacgggtcccagcaactcactctcatgccttcgacgcaagtcactcaatgagtcgacgatgcaaaaaaccagtttcatggaaacgagctgagttgtcctcaaacccactggttattctgttatctttctagataccaaaactgtgctattgcacagaagacagactggttgcccattggccctgtcgacgccttcaagatgactgcatcggcataccctagcgctcccgccgattttttaggtaagcatcgtctctttcttgcttgacttctggccgtgatgttcgcgaacgacatagcggtggatggatggccgaaacccctctctctctctcgcgactgtgtctcgggcgtaggcacttctttctctgtagcttctggcggtcctcgtgggttcgatgtggtaggatatgatgtcgtcacgcatggcggccgcaacgggttcaaatccaaaggtccgattacacggagttgggtgcggcaactagcttgatcaaccttgcagacgaggccttcaccttgtcttcctttcaggaatctgaatacaatctggccctagcgacttcgacaagttcctcatcatccacgcaaccttctggagcgaatcgtcgcagccaacaacgaagttccaagacaagaacttaagaaggaagtgctctcgatactgcgaacatctgccgtactttccgaatgcatggaccaagcctaggtgaagacagtggatcatctagcatcatgcattgtctggcagcttatcttccgaccgacccagcagctgagtcgagtctgacagcgactgcgccacgattcaggcaatttggcgacaaagaagctcctctgcccatccagatctgatggtgggaaagtcgttcaatcctctgcacagcccgtgccggatgccccctgtatctcaccgctggcccctggaatccaccatctgatggccactctcggtaaatcagctgtggaaacccacgtacactaacttggctggcgccttcggcacactgcgcatcgtctgcggacgcgcaggctacaagaataaccacgagtcggtgttggtctcctttattagctagcaagcgaaaggaagagacccggcgcagtttagcatgagtatgtagaagcctgcgtctcccatggactgagaccctgcttgaccccaccggtcactggccgcacccggaaacaaaagtagagcttcagcgaccttcccggtcaagacattgctttacaaaagtcatttcatctgcaaggcaccaatacctgctgatcgcccagcacgactacttctcagagtgtcagtcataagacaaggacaaagccaacggaacagcactccatcagaatccacaagcggacagaaaagcaagatctcagtcctcgcggaaagagaagagagagagggcccaggcttgcccatccccgcgcgactgctagcagccccgccatagaaaacgattgcttcttgacgcgctgcaacccaggcccttgggagtcctagatattcatatatatcgtctaatcccacgcctccgttccagcggacgagtcgaatcggctagggtgcctgttttggctttttagctctgatttcagcgctaactattgcgttttgcaattcatgcaggctcacccaaatccaaagctgacgattcactcgacatgcctcagttcggagctaccttctacccgggcggcgtcgacgactactacatgcctggccctgaggtgatagctccctcgccgcaacgggttatgccagaggtgccccagaacatgcaacaaggccttcaacgcatggagctggaagccagagaagccgttcagagcaacacaccgtccaataccagcccgcgccacaatcgcgaaccttcgctatcaaccttcatcaacaaccagaacggtggttttgggcagcaatatcaatccgaccggcccaaacccaccaactatagccccgcctccaactttagccccttccccgagccccgggacacaccccgcgtccccgaaaagaacgtgcccgtgatgcacgaagcaccgtccttctcgccgtttcctagagtcacgggcgatcacctgccgcctagcgatgatgagagggagaccgtcctcgccaacagccaggaacatgtgcttcattctaacgaccccgacatgcagatatgttgggctcgagacgtgctgtcccacgtcgaggtagcggccgaggctgctgctcgagaagccgacgctcttcgtaacagcaacgatcgcgatctgccggcgcgaccgcatacgcccaagctggaacatgacctacgcgtcaatgccgtcaacattgtatcttaccttgctgaccaaggccaccccgaggccctgtttatacgcagcaagtggctcgagtttggcaagttcggaaagcgtcaggataaaaaggaagcgtacaccgggtacatgagagctgctcagcaaggctgggcccgcgccgattaccgaatcggcatgctctttgaaaactcaaacgatgtagacaaagccatgcatcattatcagatcggtctcgcagccaaggactcggccgcagcatatcgcctagggatggtcaacctgcttggccagcgaggcaggccaaaggacattgctcggggcctcgacttgattcatcaggccgctgacacggcagacgaggatgccccccagggcgctttcgtctatggcatgttaatcgccagagatctaccagatgtgactatccccgagggcgtacttccttatgacgtagcccaggcgcggcaattcatcgagaaagctgcctatcttggatttgctaaagcccaattgaagatgggtcaggcgtacgagctatgtcagcttggatgcgaattcgaaccatccaagtcgctgcattactacggtcttgcggcccgccaaggtcaggccgaagcctgtctcggtgtcagtcgatggttcctgtttggctacgaaggggaattcgccaagaatgagcaacttgcgttcaagtatgctcagctagcagcaaagacgaaattgccaacaggcgagtttgcgatggggtactactacgagatcggtatttccgtcgagaaagacatacgggaggcccgcagatggtacgagctcgcggcagagcatggaaataaggatgccgtgggtcgtctagagggtctttcacaatctaagactctatcaaaacaagaccacgagacagcaacattgggtcgcatcaagtcgaagcacgggtcacaacgaggacagaggcctgaacgattcaagcaaatgggcggtgccatgcctaccgtctcagaatcgcccagagcgtcgccacaaccatcacctcatgcccagaactttggtcccaacgacggtcggccgcctgctttcactattctccctgatcggacacaatcagcagcgccatatccagaagacgacaggccagcacctctttctttgaaccgaccgacttcagttgcgccctacccagaagatgacgcggcggggctcaagcctcagctctcgcctcatttcaatccaggcattcgaccatcagcaggacctcatgcggatcgccctgggagcgcgtttggtattcgcacgcaatcgcccggcggacctgttaataatatgcgtgtccagtctggtcagctccccgttccgcccaccgggatggatccgaaccgtggtcgtcccgtttccgccggatggcaaccacaagtatccggcggttaccgtcagccaagtcccaattctcgcccacaaggatcaggttacgatcagcgacccgtttcatctacctatgatcgtcctaccggcggcctaccagcgcagcctggccctggaccaaatcgattggtgaaaccaggacccgcaggacccggggccggcagaggaacagcgccaccgtccggctatggtagggaatcaactggtcccgcaggctatgcaccaggccctcgagcttctgctgggcaacttccgtacaatccacatagcggccgctcatctgctgctccgtccggcgcccctgtaatgagtggaggactcgggcagcggatcagttcgaacccaccaggcggcctgcctcagggtggtccggccggcgggagaatcaacaatggagctcgacctagttccggccctggtacgccgttgaaggatgcacctggacgcgccagtgctccgcccacccaagcccgtcccagtcccacacccggcacgccggcttcgactgcttcggccgcttcagcgcctcccaaacctaccaaatctggaccagcaacattcgagcagatgggtattcctcaaggaaaacaggatgatgattgcgtaatcatgtaatgtctgtccttcacggttggtgttgcatttatggatcaacagtgatggtcgccaaacatttcttcgtcataacgttgtctcttttatcatgataccagaactttgcataaaagaagagaggagaaggacggactggatagcgtcacggaacagcagatcgtgtttctcaacatgcaaatcactaagaagtaaaccagcaggtaacatttttagtttcaaaaatggaacctcaagagactttaggtgggatgagatgtatctcggtgggaatgatccattggctttgtatgagtttttgcatccaggctacggagcatggcatctgtttggccgggctggctgtctgtcttattgctcttatcataatcgttgccaggctcatatctagacaaagttactcatctgacggttcttcgagatcccgataagtagatagatctgcatcaaggatgttcaaataggaattgtaaacttaatcacatgtgatgtggtaacgcccaactgatgaatgttgagttgcggttgtaccatgttttagctcgcattcgtgtttgagcacatatagttctttagcgatagtcataccgga

SEQ ID NO: 9270 - DNA, 2712 bp, Muscodor strobelii
  misc_feature: SGI cDNA ID NO. 562891
  misc_feature: Reduced expression when VOC is produced
  misc_feature: Encodes the peptide sequence at SEQ ID NO 9271
atgcctcagttcggagctaccttctacccgggcggcgtcgacgactactacatgcctggccctgaggtgatagctccctcgccgcaacgggttatgccagaggtgccccagaacatgcaacaaggccttcaacgcatggagctggaagccagagaagccgttcagagcaacacaccgtccaataccagcccgcgccacaatcgcgaaccttcgctatcaaccttcatcaacaaccagaacggtggttttgggcagcaatatcaatccgaccggcccaaacccaccaactatagccccgcctccaactttagccccttccccgagccccgggacacaccccgcgtccccgaaaagaacgtgcccgtgatgcacgaagcaccgtccttctcgccgtttcctagagtcacgggcgatcacctgccgcctagcgatgatgagagggagaccgtcctcgccaacagccaggaacatgtgcttcattctaacgaccccgacatgcagatatgttgggctcgagacgtgctgtcccacgtcgaggtagcggccgaggctgctgctcgagaagccgacgctcttcgtaacagcaacgatcgcgatctgccggcgcgaccgcatacgcccaagctggaacatgacctacgcgtcaatgccgtcaacattgtatcttaccttgctgaccaaggccaccccgaggccctgtttatacgcagcaagtggctcgagtttggcaagttcggaaagcgtcaggataaaaaggaagcgtacaccgggtacatgagagctgctcagcaaggctgggcccgcgccgattaccgaatcggcatgctctttgaaaactcaaacgatgtagacaaagccatgcatcattatcagatcggtctcgcagccaaggactcggccgcagcatatcgcctagggatggtcaacctgcttggccagcgaggcaggccaaaggacattgctcggggcctcgacttgattcatcaggccgctgacacggcagacgaggatgccccccagggcgctttcgtctatggcatgttaatcgccagagatctaccagatgtgactatccccgagggcgtacttccttatgacgtagcccaggcgcggcaattcatcgagaaagctgcctatcttggatttgctaaagcccaattgaagatgggtcaggcgtacgagctatgtcagcttggatgcgaattcgaaccatccaagtcgctgcattactacggtcttgcggcccgccaaggtcaggccgaagcctgtctcggtgtcagtcgatggttcctgtttggctacgaaggggaattcgccaagaatgagcaacttgcgttcaagtatgctcagctagcagcaaagacgaaattgccaacaggcgagtttgcgatggggtactactacgagatcggtatttccgtcgagaaagacatacgggaggcccgcagatggtacgagctcgcggcagagcatggaaataaggatgccgtgggtcgtctagagggtctttcacaatctaagactctatcaaaacaagaccacgagacagcaacattgggtcgcatcaagtcgaagcacgggtcacaacgaggacagaggcctgaacgattcaagcaaatgggcggtgccatgcctaccgtctcagaatcgcccagagcgtcgccacaaccatcacctcatgcccagaactttggtcccaacgacggtcggccgcctgctttcactattctccctgatcggacacaatcagcagcgccatatccagaagacgacaggccagcacctctttctttgaaccgaccgacttcagttgcgccctacccagaagatgacgcggcggggctcaagcctcagctctcgcctcatttcaatccaggcattcgaccatcagcaggacctcatgcggatcgccctgggagcgcgtttggtattcgcacgcaatcgcccggcggacctgttaataatatgcgtgtccagtctggtcagctccccgttccgcccaccgggatggatccgaaccgtggtcgtcccgtttccgccggatggcaaccacaagtatccggcggttaccgtcagccaagtcccaattctcgcccacaaggatcaggttacgatcagcgacccgtttcatctacctatgatcgtcctaccggcggcctaccagcgcagcctggccctggaccaaatcgattggtgaaaccaggacccgcaggacccggggccggcagaggaacagcgccaccgtccggctatggtagggaatcaactggtcccgcaggctatgcaccaggccctcgagcttctgctgggcaacttccgtacaatccacatagcggccgctcatctgctgctccgtccggcgcccctgtaatgagtggaggactcgggcagcggatcagttcgaacccaccaggcggcctgcctcagggtggtccggccggcgggagaatcaacaatggagctcgacctagttccggccctggtacgccgttgaaggatgcacctggacgcgccagtgctccgcccacccaagcccgtcccagtcccacacccggcacgccggcttcgactgcttcggccgcttcagcgcctcccaaacctaccaaatctggaccagcaacattcgagcagatgggtattcctcaaggaaaacaggatgatgattgcgtcagtagccccttttccttatcactgccttcatctcgcacttag

SEQ ID NO: 9271 - protein, 903 aa, Muscodor strobelii
  misc_feature: SGI Peptide ID NO. 562891
  misc_feature (458)..(493): Pfam Id: PF08238 Pfam Desc: Sel1 repeat
  misc_feature (383)..(419): Pfam Id: PF08238 Pfam Desc: Sel1 repeat
  misc_feature (299)..(335): Pfam Id: PF08238 Pfam Desc: Sel1 repeat
  misc_feature (1)..(890): NCBI GI: 261358923 Blast Desc: conserved [Verticillium albo-atrum VaMs.102]
  misc_feature (1)..(891): NCBI GI: 27803079 Blast Desc: protein product [Podospora anserina]
  misc_feature (1)..(890): NCBI GI: 189091940 Blast Desc: [Podospora anserina] gi|188219323|emb|CAP49303.1| protein product [Podospora anserina]
  misc_feature (4)..(890): NCBI GI: 145616158 Blast Desc: MGG_03530 [Magnaporthe grisea 70-15] gi|145009909|gb|EDJ94565.1| MGG_03530 [Magnaporthe grisea 70-15]
  misc_feature (1)..(891): NCBI GI: 85093858 Blast Desc: NCU02351 [Neurospora crassa OR74A] gi|28921226|gb|EAA30536.1| conserved [Neurospora crassa OR74A]
  misc_feature (2)..(651): NCBI GI: 46127119 Blast Desc: FG07937.1 [Gibberella zeae PH-1]
  misc_feature (1)..(891): NCBI GI: 116179494 Blast Desc: CHGG_00375 [Chaetomium globosum CBS 148.51] gi|88184672|gb|EAQ92140.1| CHGG_00375 [Chaetomium globosum CBS 148.51]
  misc_feature (2)..(652): NCBI GI: 256721631 Blast Desc: NECHADRAFT_37440 [Nectria haematococca mpVI 77-13-4]
  misc_feature (2)..(645): NCBI GI: 156050661 Blast Desc: SS1G_07918 [Sclerotinia sclerotiorum 1980] gi|154692318|gb|EDN92056.1| SS1G_07918 [Sclerotinia sclerotiorum 1980]
  misc_feature (2)..(611): NCBI GI: 189200515 Blast Desc: chitin synthase regulator 3 [Pyrenophora tritici-repentis Pt-1C-BFP] gi|187983693|gb|EDU49181.1| chitin synthase regulator 3 [Pyrenophora tritici-repentis Pt-1C-BFP]
  misc_feature: Useful for introducing or modulating the production of volatile compounds
MPQFGATFYPGGVDDYYMPGPEVIAPSPQRVMPEVPQNMQQGLQRMELEAREAVQSNTPSNTSPRHNREPSLSTFINNQNGGFGQQYQSDRPKPTNYSPASNFSPFPEPRDTPRVPEKNVPVMHEAPSFSPFPRVTGDHLPPSDDERETVLANSQEHVLHSNDPDMQICWARDVLSHVEVAAEAAAREADALRNSNDRDLPARPHTPKLEHDLRVNAVNIVSYLADQGHPEALFIRSKWLEFGKFGKRQDKKEAYTGYMRAAQQGWARADYRIGMLFENSNDVDKAMHHYQIGLAAKDSAAAYRLGMVNLLGQRGRPKDIARGLDLIHQAADTADEDAPQGAFVYGMLIARDLPDVTIPEGVLPYDVAQARQFIEKAAYLGFAKAQLKMGQAYELCQLGCEFEPSKSLHYYGLAARQGQAEACLGVSRWFLFGYEGEFAKNEQLAFKYAQLAAKTKLPTGEFAMGYYYEIGISVEKDIREARRWYELAAEHGNKDAVGRLEGLSQSKTLSKQDHETATLGRIKSKHGSQRGQRPERFKQMGGAMPTVSESPRASPQPSPHAQNFGPNDGRPPAFTILPDRTQSAAPYPEDDRPAPLSLNRPTSVAPYPEDDAAGLKPQLSPHFNPGIRPSAGPHADRPGSAFGIRTQSPGGPVNNMRVQSGQLPVPPTGMDPNRGRPVSAGWQPQVSGGYRQPSPNSRPQGSGYDQRPVSSTYDRPTGGLPAQPGPGPNRLVKPGPAGPGAGRGTAPPSGYGRESTGPAGYAPGPRASAGQLPYNPHSGRSSAAPSGAPVMSGGLGQRISSNPPGGLPQGGPAGGRINNGARPSSGPGTPLKDAPGRASAPPTQARPSPTPGTPASTASAASAPPKPTKSGPATFEQMGIPQGKQDDDCVSSPFSLSLPSSRT

SEQ ID NO: 9272 - DNA, 5125 bp, Muscodor strobelii; identical to SEQ ID NO: 9269
  misc_feature: SGI EST ID NO. CUFF.22055.0
  misc_feature: Variant of the nucleotide sequence at SEQ ID NO 9270

SEQ ID NO: 9273 - DNA, 1725 bp, Muscodor strobelii
  misc_feature: SGI cDNA ID NO. 562892
  misc_feature: Encodes the peptide sequence at SEQ ID NO 9274
atgtcgactttgctaattcagcctcgtgctgagaataaagaaaacaatgagagtacagttgtatcgactgctgcttcaacaacatctctagagaacattcctccgcttggggaaccagccgagaagaaccaacttttcttttcgcgaataagcaagactgacagggatgcaattgcaactcaacccagtgtgttcgatgaccctgatacggcagataaatatcagccacctcaagaatgggagaattaccaccgctttgacacaaaagcaagatggacatggggagaagagtccgcagttattcgaaaaattgatctccgcatcatgatatgggtctgcctaatggcagttgcccttgagcttgatcgtcaaaatctcatcactgcattgacagatgattttctccaggacttgaagctcacaacagatgattataacctaggaaacacggctttcagggcagcgtttcttgtctcggaactgccatcgcagcttctatctaaatggattggtccggacaggtggattcccatccaaatcactctatggtccctcgtgacgggaagtcagtttttcctgtctggtagatcttctttcatcgcaactcgtgcgcttttaggcgtgttgcagggtggtttcattcctgacattattctttacctgtcatacttctataagagtcatgagttgaccatccgcttgggaattttttggtcagtggttagctttggtgacgtttttacttcgctttttggtgccggaatattgcgcctgcgtggacacttgggttatgctggttggcaatggctatttctacttgagggtctcatcaccatccttgtcggccttttctcgtttgttctgatgccagccggcccttgccagacggcaagttggttccgcggaaagaatggctggttcacggagagagaagagactatcatggtcaatcgcatcattcgagatgacccgagcaaaagcgacatgcacaaccgagagcccattaccctagagcttctctggaaatgtcttacggacttcgacctctggcctgtatatatccttggtcttgtgcaccaaattccggcgacaccacccacgcagtacttcacgttggtcctgagatcgttgaagttcacaaccttgcagaccaacttgctcactatcccgactgttttagttcatgccgtctccgttctcgggttgacttatcttgccgaactcgtagatcagctgtcgttggttgcttcgttaggtcaaatatggatgctgccctttttgacttggctggctgtcgtagatctgggagaagcaagtcgttggacgcagtgggcaatccttaccctattactgggttatcccttagtggatctcaagaaactccaactcagttcgactaaggactgtatctgctgcactatgacccctatcgcgcaatatgctaacttctatcgcaacaatatcttcgtacaagcatctactattatcggctctaacatctaccacacttccgacgctccgtactatcacaaagggaacaagcaattgcttgcaatcttagcagggaacatcgtgatctacggcttgactaagctgtactatgtatggcgaaacaaacagcgcgatcaaaaatggaacgcgatgactccagaggagcaattgcactatatcgcgacaacgacagacaaagggaacaagagattggagttccgcttcaagcactaa

SEQ ID NO: 9274 - protein, 574 aa, Muscodor strobelii
  misc_feature: SGI Peptide ID NO. 562892
  misc_feature (112)..(406): Pfam Id: PF07690 Pfam Desc: Major Facilitator Superfamily
  misc_feature (1)..(574): NCBI GI: 164424070 Blast Desc: NCU07609 [Neurospora crassa OR74A] gi|157070359|gb|EAA33607.2| NCU07609 [Neurospora crassa OR74A]
  misc_feature (1)..(574): NCBI GI: 171688140 Blast Desc: protein product [Podospora anserina] gi|170944032|emb|CAP70142.1| protein product [Podospora anserina]
  misc_feature (8)..(574): NCBI GI: 169784514 Blast Desc: [Aspergillus oryzae RIB40] gi|83775465|dbj|BAE65585.1| protein product [Aspergillus oryzae]
  misc_feature (26)..(574): NCBI GI: 256720673 Blast Desc: NECHADRAFT_49814 [Nectria haematococca mpVI 77-13-4]
  misc_feature (7)..(574): NCBI GI: 70995900 Blast Desc: MFS transporter [Aspergillus fumigatus Af293] gi|66850340|gb|EAL90667.1| MFS transporter, [Aspergillus fumigatus Af293] gi|159131460|gb|EDP56573.1| MFS transporter,
  misc_feature (36)..(574): NCBI GI: 121701311 Blast Desc: MFS transporter, [Aspergillus clavatus NRRL 1] gi|119397063|gb|EAW07494.1| MFS transporter, [Aspergillus clavatus NRRL 1]
  misc_feature (7)..(574): NCBI GI: 119495271 Blast Desc: MFS transporter, [Neosartorya fischeri NRRL 181] gi|119412586|gb|EAW22527.1| MFS transporter, [Neosartorya fischeri NRRL 181]
  misc_feature (1)..(574): NCBI GI: 115491993 Blast Desc: conserved [Aspergillus terreus NIH2624] gi|114197484|gb|EAU39184.1| conserved [Aspergillus terreus NIH2624]
  misc_feature (1)..(574): NCBI GI: 169845255 Blast Desc: CC1G_00526 [Coprinopsis cinerea okayama7#130] gi|116509412|gb|EAU92307.1| CC1G_00526 [Coprinopsis cinerea okayama7#130]
  misc_feature (56)..(574): NCBI GI: 171676603 Blast Desc: protein product [Podospora anserina] gi|170936368|emb|CAP61026.1| protein product [Podospora anserina]
MSTLLIQPRAENKENNESTVVSTAASTTSLENIPPLGEPAEKNQLFFSRISKTDRDAIATQPSVFDDPDTADKYQPPQEWENYHRFDTKARWTWGEESAVIRKIDLRIMIWVCLMAVALELDRQNLITALTDDFLQDLKLTTDDYNLGNTAFRAAFLVSELPSQLLSKWIGPDRWIPIQITLWSLVTGSQFFLSGRSSFIATRALLGVLQGGFIPDIILYLSYFYKSHELTIRLGIFWSVVSFGDVFTSLFGAGILRLRGHLGYAGWQWLFLLEGLITILVGLFSFVLMPAGPCQTASWFRGKNGWFTEREETIMVNRIIRDDPSKSDMHNREPITLELLWKCLTDFDLWPVYILGLVHQIPATPPTQYFTLVLRSLKFTTLQTNLLTIPTVLVHAVSVLGLTYLAELVDQLSLVASLGQIWMLPFLTWLAVVDLGEASRWTQWAILTLLLGYPLVDLKKLQLSSTKDCICCTMTPIAQYANFYRNNIFVQASTIIGSNIYHTSDAPYYHKGNKQLLAILAGNIVIYGLTKLYYVWRNKQRDQKWNAMTPEEQLHYIATTTDKGNKRLEFRFKH

SEQ ID NO: 9275 - DNA, 464 bp, Muscodor strobelii
  misc_feature: SGI EST ID NO. CUFF.22037.0
  misc_feature: Variant of the nucleotide sequence at SEQ ID NO 9273
ttttacttcgctttttggtgccggaatattgcgcctgcgtggacacttgggttatgctggttggcaatggctatttctacttgagggtctcatcaccatccttgtcggccttttctcgtttgttctgatgccagccggcccttgccagacggcaagttggttccgcggaaagaatggctggttcacggagagagaagagactatcatggtcaatcgcatcattcgagatgacccgagcaaaagcgacatgcacaaccgagagcccattaccctagagcttctctggaaatgtcttacggacttcgacctctggcctgtatatatccttggtcttgtgcaccaaattccggcgacaccacccacgcagtacttcacgttggtcctgagatcgttgaagttcacaaccttgcagaccaacttgctcactatcccgactgttttagttcatgccgtctccgttctcg

SEQ ID NO: 9276 - DNA, 954 bp, Muscodor strobelii
  misc_feature: SGI cDNA ID NO. 562893
  misc_feature: Encodes the peptide sequence at SEQ ID NO 9277
atgcctaggattgacacatttgaagacgaggagttaggagtcgtggtcgacaagactgaagctcttgcccttcattcgaagcggaccgagcgttcccgcaggaagcagcaaaggagagcaaagaaggaaaaggattccggagacgggcttctcggcttaccatatgagttgttgatgaacatcctgtcgcttctgagaccgagcgatgtattcatcttgcagagaacgagcaaatccttccataatttcattagtcaagaagaaactagacttgctcgcagcatcaagtcatttcgttactcatgtctggagagatgctttcggctgcccgtgctgattgcagagcttgatccttccatccattatctgcttcagagaccggagcgacaagaaattcttactatccataagaagccatatcagcacattaagcctcccgatccgaaagaaaatcatttggataagggcgagcccatccctattataccacggggtagatttcctcagtggaaccaggagctcataaccgcgcatgcgagcattgtgcgcaaggcgctgcacagtcctctgtggcatgcgcggctattagaggctcacctagattcgattacacgttctatagctcgacatgctgcaaacaaggggaacaagcggagacggtttcgcatgacctgtgaagatgtgaggtccaagaccgatgtctttttggaacggagcggtccagcctctctcgatattccttaccaccgtgacaactattatttattggaatgttacatgccaaatcgtggctggagtcaggaaaattcgagatggctatatcttcctgccgaacagcacgacacggacgtcaaagccgtggttatttgggagcggcggaggatcgccgcacttgaacaagagaaaaaaggtggtgagacatcgagacatgatgtggctagcatacaaacataa

SEQ ID NO: 9277 - protein, 317 aa, Muscodor strobelii
  misc_feature: SGI Peptide ID NO. 562893
  misc_feature (48)..(95): Pfam Id: PF00646 Pfam Desc: F-box domain
  misc_feature (22)..(287): NCBI GI: 261352845 Blast Desc: conserved [Verticillium albo-atrum VaMs.102]
  misc_feature (15)..(294): NCBI GI: 85110125 Blast Desc: NCU08403 [Neurospora crassa OR74A] gi|164423978|ref|XP_001728102.1| NCU10833 [Neurospora crassa OR74A] gi|28924949|gb|EAA34039.1| [Neurospora crassa OR74A]
  misc_feature (1)..(293): NCBI GI: 189193911 Blast Desc: conserved [Pyrenophora tritici-repentis Pt-1C-BFP] gi|187978858|gb|EDU45484.1| conserved [Pyrenophora tritici-repentis Pt-1C-BFP]
  misc_feature (8)..(284): NCBI GI: 116205625 Blast Desc: CHGG_10696 [Chaetomium globosum CBS 148.51] gi|88176824|gb|EAQ84292.1| CHGG_10696 [Chaetomium globosum CBS 148.51]
  misc_feature (1)..(256): NCBI GI: 169601968 Blast Desc: SNOG_03861 [Phaeosphaeria nodorum SN15] gi|160706046|gb|EAT89066.2| SNOG_03861 [Phaeosphaeria nodorum SN15]
  misc_feature (2)..(306): NCBI GI: 256728143 Blast Desc: NECHADRAFT_87648 [Nectria haematococca mpVI 77-13-4]
  misc_feature (15)..(288): NCBI GI: 171677213 Blast Desc: protein product [Podospora anserina] gi|170936674|emb|CAP61333.1| protein product [Podospora anserina]
  misc_feature (150)..(306): NCBI GI: 145604557 Blast Desc: MGG_07785 [Magnaporthe grisea 70-15] gi|145012560|gb|EDJ97214.1| MGG_07785 [Magnaporthe grisea 70-15]
  misc_feature (5)..(117): NCBI GI: 145604557 Blast Desc: MGG_07785 [Magnaporthe grisea 70-15] gi|145012560|gb|EDJ97214.1| MGG_07785 [Magnaporthe grisea 70-15]
MPRIDTFEDEELGVVVDKTEALALHSKRTERSRRKQQRRAKKEKDSGDGLLGLPYELLMNILSLLRPSDVFILQRTSKSFHNFISQEETRLARSIKSFRYSCLERCFRLPVLIAELDPSIHYLLQRPERQEILTIHKKPYQHIKPPDPKENHLDKGEPIPIIPRGRFPQWNQELITAHASIVRKALHSPLWHARLLEAHLDSITRSIARHAANKGNKRRRFRMTCEDVRSKTDVFLERSGPASLDIPYHRDNYYLLECYMPNRGWSQENSRWLYLPAEQHDTDVKAVVIWERRRIAALEQEKKGGETSRHDVASIQT

SEQ ID NO: 9278 - DNA, 1139 bp, Muscodor strobelii
  misc_feature: SGI EST ID NO. CUFF.22049.0
  misc_feature: Variant of the nucleotide sequence at SEQ ID NO 9276
gccagtgattttttgccactgggtttctccagggtaggcgcacctatccttcatggctaacttcgcgcgagctggagcggggcctagaccttcgcatatgtcaagctgtgtgcctctcggctatattgttgggaatcgttcgtgatcccgaattagaactgaagtatcacaacactgtctggcactacacacctgcgtggcgatgcctaggattgacacatttgaagacgaggagttaggagtcgtggtcgacaagactgaagctcttgcccttcattcgaagcggaccgagcgttcccgcaggaagcagcaaaggagagcaaagaaggaaaaggattccggagacgggcttctcggcttaccatatgagttgttgatgaacatcctgtcgcttctgagaccgagcgatgtattcatcttgcagagaacgagcaaatccttccataatttcattagtcaagaagaaactagacttgctcgcagcatcaagtcatttcgttactcatgtctggagagatgctttcggctgcccgtgctgattgcagagcttgatccttccatccattatctgcttcagagaccggagcgacaagaaattcttactatccataagaagccatatcagcacattaagcctcccgatccgaaagaagtatgcacatgcctgacatgcatgctgcgttggtcagccctttgcttaattgttgattttggacattggcagaatcatttggataagggcgagcccatccctattataccacggggtagatttcctcagtggaaccaggagctcataaccgcgcatgcgagcattgtgcgcaaggcgctgcacagtcctctgtggcatgcgcggctattagaggctcacctagattcgattacacgttctatagctcgacatgctgcaaacaaggggaacaagcggagacggtttcgcatgacctgtgaagatgtgaggtccaagaccgatgtctttttggaacggagcggtccagcctctctcgatattccttaccaccgtgacaactattatttattggaatgttacatgccaaatcgtggctggagtcaggaaaattcgagatggctatagtgagttttcttagaagatactcttcgatcaacccctgatcgca

SEQ ID NO: 9279 - DNA, 1356 bp, Muscodor strobelii
  misc_feature: SGI cDNA ID NO. 562894
  misc_feature: Encodes the peptide sequence at SEQ ID NO 9280
atggctcttctactactagtcaacttgactaatggtatcaccactatcccactaaataggctattggagaagcggctctgtcgacaattcttcgacaatgataacgatgtagacgaggaactttgcaagatagaccaagtgcaaaagagactggcttggatcatgggagcatttgacactctatggattgttggtgatttcgtgaccacaataccgctgactttcgtttccgaaaactatggccggaaatttaccctctggctgaatattgtcccaaggttctttatgctatgttggatcttgagtgtgagctatttcgagaataatttaccaccacgcgctgcgattgccggagccgctctatcagtgctcggtggtgatactgtatttaactccctcatctattcactcgcatccagtcttacagacgacagtgttgtccgggctgtgtacttcagcaggatgcaagccttgacgtctgtcctggggtttctcagccctgcaattgcgtctgccacgatgacagtccgattgacactaccattctggctcgggcttcttttccttgttcttgcgattgcaatcatctcaattttacccgatacaggcacgaaaatgggtgatgcgagtgacgcaggacgtccactgatttcatcgcccactttgaaggctcaggtatcacgcgaatcactcattacctcgatcagcaaccgcgtcggtgagcttatatcttgtgtgggaacgtttcaattggcactgttactcctatcaatgtttctcactagccttgcaagctccgacacgaagctgcttgcgcaatacatctcaaagcgataccattggacatttgccgccgccggctacctcctttccgctaaagcaggattcaactttatagtgctcagtattatcgttccgcttctcctgtcgaaccgtggccgtacgtcccagagtttgtccgacaaagcgcatctacgctatgcaaggctttgtgtcattgcgtctgtcttcggcgcattcgccattggggtatccgctagcgtatggatattgtttccaagtctacttatatatgcgatcggagtacctctctcaatattcactctctctcttgcaaactcgcctagcctatggcttcgcgaccaaagccttgaagccggaacagcaaatccacagactcacatattttctattatcatgatgaccaagacgcttgggtctctgattggtgcaccacttatggcagctctctggtacttcggtatcgacgtaggaatttacggcagtccgtatgttgcctcatcggtgatatatcttttggcctttgtcgtgatgtccagaattcatatagtttga

SEQ ID NO: 9280 - protein, 451 aa, Muscodor strobelii
  misc_feature: SGI Peptide ID NO. 562894
  misc_feature (16)..(450): NCBI GI: 256725339 Blast Desc: NECHADRAFT_45792 [Nectria haematococca mpVI 77-13-4]
  misc_feature (16)..(438): NCBI GI: 46115740 Blast Desc: FG03712.1 [Gibberella zeae PH-1]
  misc_feature (16)..(451): NCBI GI: 39964174 Blast Desc: MGG_09821 [Magnaporthe grisea 70-15] gi|145011124|gb|EDJ95780.1| MGG_09821 [Magnaporthe grisea 70-15]
  misc_feature (15)..(443): NCBI GI: 189202880 Blast Desc: conserved [Pyrenophora tritici-repentis Pt-1C-BFP] gi|187984875|gb|EDU50363.1| conserved [Pyrenophora tritici-repentis Pt-1C-BFP]
  misc_feature (16)..(405): NCBI GI: 85089861 Blast Desc: NCU09292 [Neurospora crassa OR74A] gi|28919473|gb|EAA28908.1| NCU09292 [Neurospora crassa OR74A]
  misc_feature (90)..(450): NCBI GI: 169596020 Blast Desc: SNOG_00758 [Phaeosphaeria nodorum SN15] gi|111071133|gb|EAT92253.1| SNOG_00758 [Phaeosphaeria nodorum SN15]
  misc_feature (16)..(425): NCBI GI: 116214443 Blast Desc: CHGG_11062 [Chaetomium globosum CBS 148.51] gi|88175417|gb|EAQ82886.1| CHGG_11062 [Chaetomium globosum CBS 148.51]
  misc_feature (16)..(200): NCBI GI: 171680048 Blast Desc: protein product [Podospora anserina] gi|170939650|emb|CAP64877.1| protein product [Podospora anserina]
  misc_feature (1)..(445): NCBI GI: 119485270 Blast Desc: MFS transporter, [Neosartorya fischeri NRRL 181] gi|119410323|gb|EAW20270.1| MFS transporter, [Neosartorya fischeri NRRL 181]
  misc_feature (1)..(425): NCBI GI: 67540348 Blast Desc: AN6344.2 [Aspergillus nidulans FGSC A4] gi|40739538|gb|EAA58728.1| AN6344.2 [Aspergillus nidulans FGSC A4] gi|259479437|tpe|CBF69657.1| TPA: MFS transporter, nidulans
MALLLLVNLTNGITTIPLNRLLEKRLCRQFFDNDNDVDEELCKIDQVQKRLAWIMGAFDTLWIVGDFVTTIPLTFVSENYGRKFTLWLNIVPRFFMLCWILSVSYFENNLPPRAAIAGAALSVLGGDTVFNSLIYSLASSLTDDSVVRAVYFSRMQALTSVLGFLSPAIASATMTVRLTLPFWLGLLFLVLAIAIISILPDTGTKMGDASDAGRPLISSPTLKAQVSRESLITSISNRVGELISCVGTFQLALLLLSMFLTSLASSDTKLLAQYISKRYHWTFAAAGYLLSAKAGFNFIVLSIIVPLLLSNRGRTSQSLSDKAHLRYARLCVIASVFGAFAIGVSASVWILFPSLLIYAIGVPLSIFTLSLANSPSLWLRDQSLEAGTANPQTHIFSIIMMTKTLGSLIGAPLMAALWYFGIDVGIYGSPYVASSVIYLLAFVVMSRIHIV

SEQ ID NO: 9281 - DNA, 2379 bp, Muscodor strobelii
  misc_feature: SGI EST ID NO. CUFF.22061.1
  misc_feature: Variant of the nucleotide sequence at SEQ ID NO 9279
cgggcacgcatgttcaactcagcaccctacacggtggtagctctcgcgaagtcgaagtgtgcgattgcatcatgaacccgcgatagagcatgtatgagagtatctctcctgcaagcgtggccgaggcctcgcatcggatggcatcccaaagatctcgccgatcttcgattgatcatgctcgcccgtctcataccgccatctaccttgtcatggctcttctactactagtcaacttgactaatggtatcaccactatcccactaaataggctattggagaagcggctctgtcgacaattcttcgacaatgataacgatgtagacgaggaactttgcaagatagaccaagtgcaaaagagactggcttggatcatgggagcatttgacactctatggattgttggtgatttcgtgaccacaataccgctgactttcgtttccgaaaactatggccggaaatttaccctctggctgaatattgtcccaaggttctttatgctatgttggatcttgagtgtgagctatttcgagaataatttaccaccacgcgctgcgattgccggagccgctctatcagtgctcggtggtgatactgtatttaactccctcatctattcactcgcatccagtcttacagacgacagtgttgtccgggctgtgtacttcagcaggatgcaagccttgacgtctgtcctggggtttctcagccctgcaattgcgtctgccacgatgacagtccgattgacactaccattctggctcgggcttcttttccttgttcttgcgattgcaatcatctcaattttacccgatacaggcacgaaaatgggtgatgcgagtgacgcaggacgtccactgatttcatcgcccactttgaaggctcaggtatcacgcgaatcactcattacctcgatcagcaaccgcgtcggtgagcttatatcttgtgtgggaacgtttcaattggcactgttactcctatcaatgtttctcactagccttgcaagctccgacacgaagctgcttgcgcaatacatctcaaagcgataccattggacatttgccgccgccggctacctcctttccgctaaagcaggattcaactttatagtgctcagtattatcgttccgcttctcctgtcgaaccgtggccgtacgtcccagagtttgtccgacaaagcgcatctacgctatgcaaggctttgtgtcattgcgtctgtcttcggcgcattcgccattggggtatccgctagcgtatggatattgtttccaagtctacttatatatgcgatcggagtacctctctcaatattcactctctctcttgcaaactcgcctagcctatggcttcgcgaccaaagccttgaagccggaacagcaaatccacagactcacatattttctattatcatgatgaccaagacgcttgggtctctgattggtgcaccacttatggcagctctctggtacttcggtatcgacgtaggaatttacggcagtccgtatgttgcctcatcggtgatatatcttttggcctttgtcgtgatgtccagaattcatatagtttgaaattgtctcaaccgcggcactaaccccattaatctcaacgacgagggctactgtgtgataatacatatacaagagtatatttataagcccccacgattctatcataatcaaagtatcgacagcaatttcatcgtcaatcgtatgaattgcaggaattgggttaatgaacgtctctaccacttaatagatcacgatggcaagaaacgctgtgcttactcacgttactgttgttcgaattcctgtttttatggtcactgtgatgctaaatagcatctcatgcaggtgaatggccccactttattaggttgtttccgagtgtcacaacaccaggactgtcacatcctcgacatattctttctagaattgccataaacgatggaatgaagaatagcttagctttgctgaacatctcatggtcagtttcattctatttatgtaatgctaggtttgatgatcccagaggatttgtttcagagctgaagtcagggtatatactccgccgccccattacaacaccatcaggaaagcttggcaatccaggcaaggcaagatgttgccttgagcacgattcgacgccgcacctttcccaagtgggttttttttttgtccgtctttattattttcattacagtttccagaaaattggccacaatacatcaggttatacactatcactatgatcaaagtgctgcctccgtcaagaccggtgataccggaacctcctgaaggccaggtatggcacatcgcacccgcgggttcagagctctggctcgaggaccccgaatactttgacgagatgggtagagatccactg

SEQ ID NO: 9282 - DNA, 1854 bp, Muscodor strobelii
  misc_feature: SGI cDNA ID NO. 562895
  misc_feature: Encodes the peptide sequence at SEQ ID NO 9283
atgatcaaagtgctgcctccgtcaagaccggtgataccggaacctcctgaaggccaggtatggcacatcgcacccgcgggttcagagctctggctcgaggaccccgaatactttgacgagatgggtagagatccactgcagcgggctgggatatggcttatctctaaccctacaagacgcattgagaagcttaatgaggtcctcgatgagtatccgaaggcatctcacaaacggaagctgttattccgtgcagtagtaagaggtgacgatgctatgacccgctgtattgttaagactgggttgaaggttcagccgcatataccgggagtggatgaagagaccgacaatgaaggggaagagcaagagaacgaaaacgacgaccgagacgaaggtactctggtagacgacgatgatccaagtatcgtacctattcacgcagctgcattccacgggcacctgagttgcgtgaagattttgatagaagagggtaatgtcgacgtgaatgcgcgtgatgaaaccggacgcacaccattgatcgctgctgcagacaagccagagacattagcatatcttctggaccaaggcgccgatatctctatacgtattgcaagcgataatatgtttggacatcccggtgccaatgtgcttgagtatgccgctgcttacggtaacatgaaatcgttgaagctgttattggaacgaatcccagatgattctatgaagagctggataacaccattggctatacgaggcgcggcgtcggctcctgaaggaggatttgaggcactcaagttgctcctggataagggcgggtttccatgggaagacaaagacggcaagtcaaaacgcgagcttctcactacagagcagcgagaaatcatcaaaaatgccttgccagatacagtcgatgcaggcgaactgaaagccatgttcttgctcatgagctatcaatacccaagtgacgaagagggaactccgaccaacttcgaagtacccgacgacctccacaaaagttttgtgtatggtgcgtatggtgcgatgaagaaaaatagactcgataagttcgagttcattcatggactcggtgttcgggagcacgatgccatgtcattggataaattaccagaaggtcaaaccctcaatttacaacgcctcctcgaggacgctgctgaagcaggttcactcgattgcgttaagctcttgatcgagaagtatggtgccaaacctaatggacacagattaccacctggcatccagccgttgtacgctgctgcttcgcgggatcagacagaggttgttagttatcttttagagaaccatcatgctgatatccacatcggtaatgggcgatatgcatcaggacctacggcattgtggagtgccatccatctgaaagcttttcactgtgtatcactcttgctcaagcacggagggccggtcgatcacatagatgaggaaattatccatatcgaagcgccttgtcgggctgtgttgagagcagtattcccatcaccaggctcaggacccaaggtgcgtctggaaacagaggaacacgcaaaagagtacctcaatacggcccaccatgattggaagaacatgaacccgggatatatttggctagaacttagcacagaagacgatgattggctcgctgctctacagtttcggaaaacggtagtagcagaagagaacgacagagcagacacagcagggttagatggagagacggcgcggcgggcgatggtcccaatgccaacgtatgcggatatcgtagcaaagctgaagaacgacgaagacattatcccggaatttgagccatacgcaagcgtaccgcagcctatggtccatttctag

SEQ ID NO: 9283 - protein, 617 aa, Muscodor strobelii
  misc_feature: SGI Peptide ID NO. 562895
  misc_feature (143)..(172): Pfam Id: PF00023 Pfam Desc: Ankyrin repeat
  misc_feature (416)..(449): Pfam Id: PF00023 Pfam Desc: Ankyrin repeat
  misc_feature (1)..(607): NCBI GI: 256724140 Blast Desc: NECHADRAFT_86402 [Nectria haematococca mpVI 77-13-4]
  misc_feature (1)..(606): NCBI GI: 169623618 Blast Desc: SNOG_15053 [Phaeosphaeria nodorum SN15] gi|111056476|gb|EAT77596.1| SNOG_15053 [Phaeosphaeria nodorum SN15]
  misc_feature (135)..(480): NCBI GI: 189502104 Blast Desc: Aasi_0703 [Candidatus Amoebophilus asiaticus 5a2] gi|189497545|gb|ACE06092.1| Aasi_0703 [Candidatus Amoebophilus asiaticus 5a2]
  misc_feature (141)..(484): NCBI GI: 72134394 Blast Desc: : similar to ankyrin 2,3/unc44, partial [Strongylocentrotus purpuratus] gi|115755843|ref|XP_001199940.1| : similar to ankyrin 2,3/unc44, partial [Strongylocentrotus
  misc_feature (143)..(481): NCBI GI: 242760147 Blast Desc: Pfs, NACHT and Ankyrin domain protein [Talaromyces stipitatus ATCC 10500] gi|218723125|gb|EED22542.1| Pfs, NACHT and Ankyrin domain protein [Talaromyces stipitatus ATCC 10500]
  misc_feature (142)..(474): NCBI GI: 115694505 Blast Desc: : similar to ankyrin 2,3/unc44 [Strongylocentrotus purpuratus] gi|115969651|ref|XP_001189875.1| : similar to ankyrin 2,3/unc44 [Strongylocentrotus purpuratus]
  misc_feature (141)..(486): NCBI GI: 115940805 Blast Desc: : similar to ankyrin 2,3/unc44 [Strongylocentrotus purpuratus]
  misc_feature (108)..(486): NCBI GI: 115965313 Blast Desc: : similar to ankyrin 2,3/unc44 [Strongylocentrotus purpuratus]
  misc_feature (142)..(486): NCBI GI: 189502738 Blast Desc: Aasi_1435 [Candidatus Amoebophilus asiaticus 5a2] gi|189498179|gb|ACE06726.1| Aasi_1435 [Candidatus Amoebophilus asiaticus 5a2]
  misc_feature (135)..(485): NCBI GI: 115694499 Blast Desc: : similar to ankyrin 2,3/unc44 [Strongylocentrotus purpuratus] gi|115969657|ref|XP_001190089.1| : similar to ankyrin 2,3/unc44 [Strongylocentrotus purpuratus]
MIKVLPPSRPVIPEPPEGQVWHIAPAGSELWLEDPEYFDEMGRDPLQRAGIWLISNPTRRIEKLNEVLDEYPKASHKRKLLFRAVVRGDDAMTRCIVKTGLKVQPHIPGVDEETDNEGEEQENENDDRDEGTLVDDDDPSIVPIHAAAFHGHLSCVKILIEEGNVDVNARDETGRTPLIAAADKPETLAYLLDQGADISIRIASDNMFGHPGANVLEYAAAYGNMKSLKLLLERIPDDSMKSWITPLAIRGAASAPEGGFEALKLLLDKGGFPWEDKDGKSKRELLTTEQREIIKNALPDTVDAGELKAMFLLMSYQYPSDEEGTPTNFEVPDDLHKSFVYGAYGAMKKNRLDKFEFIHGLGVREHDAMSLDKLPEGQTLNLQRLLEDAAEAGSLDCVKLLIEKYGAKPNGHRLPPGIQPLYAAASRDQTEVVSYLLENHHADIHIGNGRYASGPTALWSAIHLKAFHCVSLLLKHGGPVDHIDEEIIHIEAPCRAVLRAVFPSPGSGPKVRLETEEHAKEYLNTAHHDWKNMNPGYIWLELSTEDDDWLAALQFRKTVVAEENDRADTAGLDGETARRAMVPMPTYADIVAKLKNDEDIIPEFEPYASVPQPMVHF

SEQ ID NO: 9284 - DNA, 1750 bp, Muscodor strobelii
  misc_feature: SGI EST ID NO. CUFF.22058.0
  misc_feature: Variant of the nucleotide sequence at SEQ ID NO 9282
aggcatctcacaaacggaagctgttattccgtgcagtagtaagaggtgacgatgctatgacccgctgtattgttaagactgggttgaaggttcagccgcatataccgggagtggatgaagagaccgacaatgaaggggaagagcaagagaacgaaaacgacgaccgagacgaaggtactctggtagacgacgatgatccaagtatcgtacctattcacgcagctgcattccacgggcacctgagttgcgtgaagattttgatagaagagggtaatgtcgacgtgaatgcgcgtgatgaaaccggacgcacaccattgatcgctgctgcagacaagccagagacattagcatatcttctggaccaaggcgccgatatctctatacgtattgcaagcgataatatgtttggacatcccggtgccaatgtgcttgagtatgccgctgcttacggtaacatgaaatcgttgaagctgttattggaacgaatcccagatgattctatgaagagctggataacaccattggctatacgaggcgcggcgtcggctcctgaaggaggatttgaggcactcaagttgctcctggataagggcgggtttccatgggaagacaaagacggcaagtcaaaacgcgagcttctcactacagagcagcgagaaatcatcaaaaatgccttgccagatacagtcgatgcaggcgaactgaaagccatgttcttgctcatgagctatcaatacccaagtgacgaagagggaactccgaccaacttcgaagtacccgacgacctccacaaaagttttgtgtatggtgcgtatggtgcgatgaagaaaaatagactcgataagttcgagttcattcatggactcggtgttcgggagcacgatgccatgtcattggataaattaccagaaggtcaaaccctcaatttacaacgcctcctcgaggacgctgctgaagcaggttcactcgattgcgttaagctcttgatcgagaagtatggtgccaaacctaatggacacagattaccacctggcatccagccgttgtacgctgctgcttcgcgggatcagacagaggttgttagttatcttttagagaaccatcatgctgatatccacatcggtaatgggcgatatgcatcaggacctacggcattgtggagtgccatccatctgaaagcttttcactgtgtatcactcttgctcaagcacggagggccggtcgatcacatagatgaggaaattatccatatcgaagcgccttgtcgggctgtgttgagagcagtattcccatcaccaggctcaggacccaaggtgcgtctggaaacagaggaacacgcaaaagagtacctcaatacggcccaccatgattggaagaacatgaacccgggatatatttggctagaacttagcacagaagacgatgattggctcgctgctctacagtttcggaaaacggtagtagcagaagagaacgacagagcagacacagcagggttagatggagagacggcgcggcgggcgatggtcccaatgccaacgtatgcggatatcgtagcaaagctgaagaacgacgaagacattatcccggaatttgagccatacgcaagcgtaccgcagcctatggtccatttctagagaggacttctcctgatctgccatatacatagaacaaatcgtaaatgctagtacatagtcgaatacgtctagacgaaacagaaagacccttgaagtaaccagctaatgttata

SEQ ID NO: 9285 - DNA, 3882 bp, Muscodor strobelii
  misc_feature: SGI cDNA ID NO. 562896
  misc_feature: Reduced expression when VOC is produced
  misc_feature: Encodes the peptide sequence at SEQ ID NO 9286
atggctgcacaaccgatcaacggcagcgtggggatggatggccgagacacgccctccgcagcccagccggacgtccttgccaggatccacacggccctcgacatcgtctacggcccctcctccaacgacgagcgcaaagacgcccagatcttcctcgagcagctcaaggactctcccgacgcgccctccaacggcttccagctggcctcagaccgcagccagtcccccatcgtccggcactacgccctctccctgctcgagcatgccatcaagcataagtgggcgcagtactcgggccacgagaccgccaacctgcgccaatgggtcctcgacctttcccagggtgttgtcaagactgaccccccctacctgagaaacaagattgcgctgctgtgggtggagatcgcgaagaggagctggggcgcagagtggatggacatggactctctgctggtccagctgtggcaggtccccgactcggccgtccacaaggagctggtcctgaccatcctcgagaccctgtcggacgagatcttcaacggcgacgatgcagtcgttgagctgcgggagaaggtgctcagcaaggcctcggtcgagatcttcacgccctcggccgtcctgctcggcgactttcccaagagggaggccggccccgaggtgcgatcgggggacgagggctggctggccaggatcgtggacctgctgcgccagtgcctctcgggcgacgtccagaacaacgacgaggttcgtagctgcaccctccggggccttgccgtcatcactgcccttatgccatgggtcatccccaaagccgccgctgtcacgcaagccgtgcctgtcatctgcgacggtctcggcgcatcccacctcgatgttcaaaaggcatcgcttgaagcgttgcatgcgctatatggtcgcacgagtctgacagagaaggacttcctaagcctggtggtccctctgtatagccctaaatatgtcacccttttcaggcaacttttcgagtggtctgttatcgaccccgatgatattgatgacgataaataccagctttccaagaagctctctgaattcttgtccttcctcggaaactacctagagcgccaattcctcagcctgcccatcgactcgtcacaagctgacatcattgcattcttgcaactactgctgctggtcacgcagagccagagcctggtcgtgtctattcctgtacttgtcacatggacccgacttttaagtcaccctgccttagggagcagcatcgcgtcgatgcatcctgtgattgggccgctgctggaatgttgcagcactcggcttcttcggtatgagaacctcccggaagatagcgaggatccaacactccgcctgctactcgaagacacagacactatcccagagcgccacgccttcttgggtaattatcgacgttacagctcacaggtcatcgagagtgtcgttctactcaaggtttccgatgctatgcagcatattctagggcaagccgagaacgttctatcacacctctacgataacgcaccccctttcgatatggccaactactcaaagacctctcctcccgttctgcgcatcgacgcgcaggcgacagtcatcgaggcagcactgaaaggcttcggtaaatggcgcagcaagaaaggcgcatctgatgccgaagagatcagtgctctggagaacaccttcgagacgtggtgcaaccgcttgcttgagatgaagttcgaggaccctcttatccggaaacgcatcctgcagctgctggtggccttttccacctcggctcttgacaagaacccgtccttcatgctgaaagtgcttgagcatattcttgtcacttggccggccacacatccagcccataagacttacacggatgcgatcaaagagctgcagagtgagagtctagtcgagctacagagacttgcttccaggatgcctgatcatcttctggacgtttatgatcagatcgctgcaaaggtcgaggagatggttgctacgggcaccctggacgaaaagcgtcatattacgtatcagactttcttattcactatcgtacaccgatctcgccgtctcgataatgcgaccaaggtccagaaacttgagcgctttctcgaaccgattaatattcagtggcgagatactcgactcaagcagagcctcgcctctcacgctgggttttgtgaactcatggctttggacaaggcccaagattatgtcgtccgtaagaggttggaccagatatccgactggggatccgtagaattagacgacgaaggcaaagctttacaagccgaacttgaagcacggcaaggggctctgcctcttcgccttaccaagtcattcctcacttgctccgttgataaggtcgaaaagtctcaggaccccttccaggtgtcatgcatgctttggcaagagtgtttccccatcatcttgccagagcttctcaactttctcaaccatgcacatgcctcacactctcctaacaactggacaattctgcctccagagatgagacacctcgtcaatcagatccttaccgatagattttggcaagctgggatatccgagggaagcaaagatgacttctacgcgcgcgtatcgggaaagaaacacacttttgaaggtcttgcctcgacgatacgtggttccatccgatttgtccgggaatcttgctacgcaatcatctactgcatgacacgtctcgatgtgcagttctatggatttagcgagctccccgggccgctagcacatgctctacttgcagatgccggtagcttgtcgcctcatcaactgatcaatctcctcaacctagtgagatacctcgtcgacaactgcccagttcctcttcgggatcattttttgcctcccatacttgaggcatgtttccgtcagatggatgcgcgggtgaacggagaatggatgagactggacgagcagcagagcctgaagactgggggaacggcgttgacggaagagatgaagaacgagagcattctccgccaactgacttacacatctgtcatgctggtggctgatttcttggatccagctcggaagagtaaagttaccttagacccgatgcaccacgtggctttcactaactttggggttgcagatgccaattccatgcaggaacaccaggccatgctccgtgatacgcagaagtatccttcgctacggaacttctgtctcatgcattcctctgtcgtggagccacttctcatattctgtacccacgccatacggatgcgtgactcacggtcctgtagcataatgctccgcgttctacgaactatcgtcgtagactttgatgggacagaaagcacggaagagggcacaacgggcaatgaatggataccggccgagacggctcgggtgattcgtgaatacatctcatccgacatcatcaaggcttgcatctcatcactccacgagggctatttcgtagagcaacagaaggaattggcgacacttattgctacgatcgtggtcgcatacaatggactgacgaccacggctcgggacattcttgtttcattacctaatataaaggcggcggacgtggatgcagggatcgagttcatgaccaagggcacgtccagctcccgcacacagagaggcgtgatcctggacctgttgcgggacctcaagggcgtctcggtttcggagttggggaaggtgagcaagagcatcgggagcatcgggctcatgtcgacgccgcagaagaagacgatgacacgcagcaagatggcgcagaagttcatgacggcgcccgaagccacgacgggagcgaacggaggaggcataggcaacagcaatggcgacggcacggaggccctggatgggctcgcggggctttttgagtcgtga

SEQ ID NO: 9286 - protein, 1293 aa, Muscodor strobelii
  misc_feature: SGI Peptide ID NO. 562896
  misc_feature (48)..(107): Pfam Id: PF03810 Pfam Desc: Importin-beta N-terminal domain
  misc_feature (121)..(180): Pfam Id: PF08389 Pfam Desc: Exportin 1-like protein
  misc_feature (1)..(1292): NCBI GI: 189091810 Blast Desc: [Podospora anserina] gi|27803015|emb|CAD60718.1| protein product [Podospora anserina] gi|188219258|emb|CAP49238.1| protein product [Podospora anserina]
  misc_feature (25)..(1291): NCBI GI: 116179632 Blast Desc: CHGG_00444 [Chaetomium globosum CBS 148.51] gi|88184741|gb|EAQ92209.1| CHGG_00444 [Chaetomium globosum CBS 148.51]
  misc_feature (13)..(1292): NCBI GI: 256732889 Blast Desc: [Nectria haematococca mpVI 77-13-4]
  misc_feature (25)..(1268): NCBI GI: 46124003 Blast Desc: FG06379.1 [Gibberella zeae PH-1]
  misc_feature (355)..(1293): NCBI GI: 261361183 Blast Desc: MSN5 [Verticillium albo-atrum VaMs.102]
  misc_feature (16)..(1291): NCBI GI: 212546471 Blast Desc: nuclear import and export protein Msn5, [Penicillium marneffei ATCC 18224] gi|210064909|gb|EEA19004.1| nuclear import and export protein Msn5, [Penicillium marneffei ATCC 18224]
  misc_feature (294)..(1289): NCBI GI: 164427076 Blast Desc: NCU02387 [Neurospora crassa OR74A] gi|157071596|gb|EAA30471.2| conserved [Neurospora crassa OR74A]
  misc_feature (29)..(1291): NCBI GI: 115384822 Blast Desc: conserved [Aspergillus terreus NIH2624] gi|114196650|gb|EAU38350.1| conserved [Aspergillus terreus NIH2624]
  misc_feature (14)..(1291): NCBI GI: 258564160 Blast Desc: conserved [Uncinocarpus reesii 1704] gi|237908332|gb|EEP82733.1| conserved [Uncinocarpus reesii 1704]
  misc_feature (17)..(1291): NCBI GI: 242823223 Blast Desc: nuclear import and export protein Msn5, [Talaromyces stipitatus ATCC 10500] gi|218712963|gb|EED12388.1| nuclear import and export protein Msn5, [Talaromyces stipitatus ATCC 10500]
  misc_feature: Useful for introducing or modulating the production of volatile compounds
MAAQPINGSVGMDGRDTPSAAQPDVLARIHTALDIVYGPSSNDERKDAQIFLEQLKDSPDAPSNGFQLASDRSQSPIVRHYALSLLEHAIKHKWAQYSGHETANLRQWVLDLSQGVVKTDPPYLRNKIALLWVEIAKRSWGAEWMDMDSLLVQLWQVPDSAVHKELVLTILETLSDEIFNGDDAVVELREKVLSKASVEIFTPSAVLLGDFPKREAGPEVRSGDEGWLARIVDLLRQCLSGDVQNNDEVRSCTLRGLAVITALMPWVIPKAAAVTQAVPVICDGLGASHLDVQKASLEALHALYGRTSLTEKDFLSLVVPLYSPKYVTLFRQLFEWSVIDPDDIDDDKYQLSKKLSEFLSFLGNYLERQFLSLPIDSSQADIIAFLQLLLLVTQSQSLVVSIPVLVTWTRLLSHPALGSSIASMHPVIGPLLECCSTRLLRYENLPEDSEDPTLRLLLEDTDTIPERHAFLGNYRRYSSQVIESVVLLKVSDAMQHILGQAENVLSHLYDNAPPFDMANYSKTSPPVLRIDAQATVIEAALKGFGKWRSKKGASDAEEISALENTFETWCNRLLEMKFEDPLIRKRILQLLVAFSTSALDKNPSFMLKVLEHILVTWPATHPAHKTYTDAIKELQSESLVELQRLASRMPDHLLDVYDQIAAKVEEMVATGTLDEKRHITYQTFLFTIVHRSRRLDNATKVQKLERFLEPINIQWRDTRLKQSLASHAGFCELMALDKAQDYVVRKRLDQISDWGSVELDDEGKALQAELEARQGALPLRLTKSFLTCSVDKVEKSQDPFQVSCMLWQECFPIILPELLNFLNHAHASHSPNNWTILPPEMRHLVNQILTDRFWQAGISEGSKDDFYARVSGKKHTFEGLASTIRGSIRFVRESCYAIIYCMTRLDVQFYGFSELPGPLAHALLADAGSLSPHQLINLLNLVRYLVDNCPVPLRDHFLPPILEACFRQMDARVNGEWMRLDEQQSLKTGGTALTEEMKNESILRQLTYTSVMLVADFLDPARKSKVTLDPMHHVAFTNFGVADANSMQEHQAMLRDTQKYPSLRNFCLMHSSVVEPLLIFCTHAIRMRDSRSCSIMLRVLRTIVVDFDGTESTEEGTTGNEWIPAETARVIREYISSDIIKACISSLHEGYFVEQQKELATLIATIVVAYNGLTTTARDILVSLPNIKAADVDAGIEFMTKGTSSSRTQRGVILDLLRDLKGVSVSELGKVSKSIGSIGLMSTPQKKTMTRSKMAQKFMTAPEATTGANGGGIGNSNGDGTEALDGLAGLFES

SEQ ID NO: 9287 - DNA, 5651 bp, Muscodor strobelii
  misc_feature: SGI EST ID NO. CUFF.22320.1
  misc_feature: Variant of the nucleotide sequence at SEQ ID NO 9285
gtctgcccgcgccctcttcccacacaagctgcctgccatatgaaccctcgtgtgcttccgttctctgtgccaaagtccttgctgccgtaacatctacactacctatttttcatgtttggacagtaccagcatctttgacatcttgcatcttgcatcttgcatcttgcgccttgccatcccaccttcctgccatccttccttctttttgcgttcaccgcgtagtccctgactcccgttgtccttctgccctcttttgttctcgcttctactctggcctgatgattcacatctaagacaagggaacagagtaggatcggtgctgccgcacaccgcccctccaccagcttcagcctcacctgccgaccgttaggtgcccccctcgcccacgccgcgcccgcaccagcgccagcgccgtcccccgtgtgtgtgccccccgccgcgatggctgcacaaccgatcaacggcagcgtggggatggatggccgagacacgccctccgcagcccagccggacgtccttgccaggatccacacggccctcgacatcgtctacggcccctcctccaacgacgagcgcaaagacgcccagatcttcctcgagcagctcaaggactctcccgacgcgccctccaacggcttccagctggcctcagaccgcagccagtcccccatcgtccggcactacgccctctccctgctcgagcatgccatcaagcataagtgggcgcagtactcgggccacgagaccgccaacctgcgccaatgggtcctcgacctttcccagggtgttgtcaagactgaccccccctacctgagaaacaagattgcgctgctgtgggtggagatcgcgaagaggagctggggcgcagagtggatggacatggactctctgctggtccagctgtggcaggtccccgactcggccgtccacaaggagctggtcctgaccatcctcgagaccctgtcggacgagatcttcaacggcgacgatgcagtcgttgagctgcgggagaaggtgctcagcaaggcctcggtcgagatcttcacgccctcggccgtcctgctcggcgactttcccaagagggaggccggccccgaggtgcgatcgggggacgagggctggctggccaggatcgtggacctgctgcgccagtgcctctcgggcgacgtccagaacaacgacgaggttcgtagctgcaccctccggggccttgccgtcatcactgcccttatgccatgggtcatccccaaagccgccgctgtcacgcaagccgtgcctgtcatctgcgacggtctcggcgcatcccacctcgatgttcaaaaggcatcgcttgaagcgttgcatgcgctatatggtcgcacgagtctgacagagaaggacttcctaagcctggtggtccctctgtatagccctaaatatgtcacccttttcaggcaacttttcgagtggtctgttatcgaccccgatgatattgatgacgataaataccagctttccaagaagctctctgaattcttgtccttcctcggaaactacctagagcgccaattcctcagcctgcccatcgactcgtcacaagctgacatcattgcattcttgcaactactgctgctggtcacgcagagccagagcctggtcgtgtctattcctgtacttgtcacatggacccgacttttaagtcaccctgccttagggagcagcatcgcgtcgatgcatcctgtgattgggccgctgctggaatgttgcagcactcggcttcttcggtatgagaacctcccggaagatagcgaggatccaacactccgcctgctactcgaagacacagacactatcccagagcgccacgccttcttgggtaattatcgacgttacagctcacaggtcatcgagagtgtcgttctactcaaggtttccgatgctatgcagcatattctagggcaagccgagaacgttctatcacacctctacgataacgcaccccctttcgatatggccaactactcaaagacctctcctcccgttctgcgcatcgacgcgcaggcgacagtcatcgaggcagcactgaaaggcttcggtaaatggcgcagcaagaaaggcgcatctgatgccgaagagatcagtgctctggagaacaccttcgagacgtggtgcaaccgcttgcttgagatgaagttcgaggaccctcttatccggaaacgcatcctgcagctgctggtggccttttccacctcggctcttgacaagaacccgtccttcatgctgaaagtgcttgagcatattcttgtcacttggccggccacacatccagcccataagacttacacggatgcgatcaaagagctgcagagtgagagtctagtcgagctacagagacttgcttccaggatgcctgatcatcttctggacgtttatgatcagatcgctgcaaaggtcgaggagatggttgctacgggcaccctggacgaaaagcgtcatattacgtatcagactttcttattcactatcgtacaccgatctcgccgtctcgataatgcgaccaaggtccagaaacttgagcgctttctcgaaccgattaatattcagtggcgagatactcgactcaagcagagcctcgcctctcacgctgggttttgtgaactcatggctttggacaaggcccaagattatgtcgtccgtaagaggttggaccagatatccgactggggatccgtagaattagacgacgaaggcaaagctttacaagccgaacttgaagcacggcaaggggctctgcctcttcgccttaccaagtcattcctcacttgctccgttgataaggtcgaaaagtctcaggaccccttccaggtgtcatgcatgctttggcaagagtgtttccccatcatcttgccagagcttctcaactttctcaaccatgcacatgcctcacactctcctaacaactggacaattctgcctccagagatgagacacctcgtcaatcagatccttaccgatagattttggcaagctgggatatccgagggaagcaaagatgacttctacgcgcgcgtatcgggaaagaaacacacttttgaaggtcttgcctcgacgatacgtggttccatccgatttgtccgggaatcttgctacgcaatcatctactgcatgacacgtctcgatgtgcagttctatggatttagcgagctccccgggccgctagcacatgctctacttgcagatgccggtagcttgtcgcctcatcaactgatcaatctcctcaacctagtgagatacctcgtcgacaactgcccagttcctcttcgggatcattttttgcctcccatacttgaggcatgtttccgtcagatggatgcgcgggtgaacggagaatggatgagactggacgagcagcagagcctgaagactgggggaacggcgttgacggaagagatgaagaacgagagcattctccgccaactgacttacacatctgtcatgctggtggctgatttcttggatccagctcggaagaatgccaattccatgcaggaacaccaggccatgctccgtgatacgcagaagtatccttcgctacggaacttctgtctcatgcattcctctgtcgtggagccacttctcatattctgtacccacgccatacggatgcgtgactcacggtcctgtagcataatgctccgcgttctacgaactatcgtcgtagactttgatgggacagaaagcacggaagagggcacaacgggcaatgaatggataccggccgagacggctcgggtgattcgtgaatacatctcatccgacatcatcaaggcttgcatctcatcactccacgagggctatttcgtagagcaacagaaggaattggcgacacttattgctacgatcgtggtcgcatacaatggactgacgaccacggctcgggacattcttgtttcattacctaatataaaggcggcggacgtggatgcagggatcgagttcatgaccaagggcacgtccagctcccgcacacagagaggcgtgatcctggacctgttgcgggacctcaagggcgtctcggtttcggagttggggaaggtgagcaagagcatcgggagcatcgggctcatgtcgacgccgcagaagaagacgatgacacgcagcaagatggcgcagaagttcatgacggcgcccgaagccacgacgggagcgaacggaggaggcataggcaacagcaatggcgacggcacggaggccctggatgggctcgcggggctttttgagtcgtgatgttgcatagagcgatgtttgtgctttgatcaaaagcgttatacccaaatcttacatacgagaattacatactctggattgcccacgtcatgcgtgggggaggaggccgtggacagaggtacggttccttcaatagattcgggggacatggcaaatggggttctagcatggagcggtaatgaacccattgtttgatagacaaaaatggtgccaacaggatctcgcgaggtagcctatactggccttgcagtagatggtccgacacataatagattcagtaaaaaggaacatcaatgttattaaagcaatgtgtgtggtctgtccgacggatcatattccactgtcttgagatctgacgtttcgtattcgacagtacgggtgaaggcgatcatcttcaacctactggtatcaatcaagatgcatgcaaacaagatgtcctatggttgacggcctcaatctgggatttattggactttcttgtctactatgaataccattcaagtagctcctatccgtcccttgggacctcactgaaatcaagccattttttctcccttttctcatcatcctttcttataaccttgtcccttctctcaccatccgctcctctgaccttccttgtctctaacctgtttctcctccgatcttttcttctccaaagccgtctcctatagcaaattgtcgagcagtgatttccttgagcttgccacttctagctatcgctatctgagtgtttagactgacttgctttctgctaagtgggacattagatgaatgccccgtccctcgacatgttcttgatgggcttcaacttgcctgaaactcagccgatccggtgacgacgacatccttcctatgttggtttcgtatgcggtgtgttctcagaatacgacatcccagactctaacccgagcatactggcgcagcatcactatgactgtaccctcatgcccatcgtggcattgcataagtgcagggccaagctctcatcatccaagattctctgtgtctcactaatcgaatagtatgttgacgggtctgtcgagaagttgaagatttccgcatgagaacgcatctcaagagcgtatgcgttatgttatccgcatctgaaatcggtgcctctattgcgttgacaagatagagcatccctctgctgcacgcaatgcgttgtgatatgtgccgtgaatggacttttcttctcgagtttcggggtggtacactagtccatcttcggtggcagtcagatttgaaagcaagccagtattcgtctaaacatcgttgtctatcccatgtggggtatttggcggataacatttttcgtagctatgccgagggctctaggactttgcgtgaccgtgcagagggccagtataggcggcatttga

SEQ ID NO: 9288 - DNA, 3825 bp, Muscodor strobelii
  misc_feature: SGI cDNA ID NO. 562897
  misc_feature: Encodes the peptide sequence at SEQ ID NO 9289
atggctgcacaaccgatcaacggcagcgtggggatggatggccgagacacgccctccgcagcccagccggacgtccttgccaggatccacacggccctcgacatcgtctacggcccctcctccaacgacgagcgcaaagacgcccagatcttcctcgagcagctcaaggactctcccgacgcgccctccaacggcttccagctggcctcagaccgcagccagtcccccatcgtccggcactacgccctctccctgctcgagcatgccatcaagcataagtgggcgcagtactcgggccacgagaccgccaacctgcgccaatgggtcctcgacctttcccagggtgttgtcaagactgaccccccctacctgagaaacaagattgcgctgctgtgggtggagatcgcgaagaggagctggggcgcagagtggatggacatggactctctgctggtccagctgtggcaggtccccgactcggccgtccacaaggagctggtcctgaccatcctcgagaccctgtcggacgagatcttcaacggcgacgatgcagtcgttgagctgcgggagaaggtgctcagcaaggcctcggtcgagatcttcacgccctcggccgtcctgctcggcgactttcccaagagggaggccggccccgaggtgcgatcgggggacgagggctggctggccaggatcgtggacctgctgcgccagtgcctctcgggcgacgtccagaacaacgacgaggttcgtagctgcaccctccggggccttgccgtcatcactgcccttatgccatgggtcatccccaaagccgccgctgtcacgcaagccgtgcctgtcatctgcgacggtctcggcgcatcccacctcgatgttcaaaaggcatcgcttgaagcgttgcatgcgctatatggtcgcacgagtctgacagagaaggacttcctaagcctggtggtccctctgtatagccctaaatatgtcacccttttcaggcaacttttcgagtggtctgttatcgaccccgatgatattgatgacgataaataccagctttccaagaagctctctgaattcttgtccttcctcggaaactacctagagcgccaattcctcagcctgcccatcgactcgtcacaagctgacatcattgcattcttgcaactactgctgctggtcacgcagagccagagcctggtcgtgtctattcctgtacttgtcacatggacccgacttttaagtcaccctgccttagggagcagcatcgcgtcgatgcatcctgtgattgggccgctgctggaatgttgcagcactcggcttcttcggtatgagaacctcccggaagatagcgaggatccaacactccgcctgctactcgaagacacagacactatcccagagcgccacgccttcttgggtaattatcgacgttacagctcacaggtcatcgagagtgtcgttctactcaaggtttccgatgctatgcagcatattctagggcaagccgagaacgttctatcacacctctacgataacgcaccccctttcgatatggccaactactcaaagacctctcctcccgttctgcgcatcgacgcgcaggcgacagtcatcgaggcagcactgaaaggcttcggtaaatggcgcagcaagaaaggcgcatctgatgccgaagagatcagtgctctggagaacaccttcgagacgtggtgcaaccgcttgcttgagatgaagttcgaggaccctcttatccggaaacgcatcctgcagctgctggtggccttttccacctcggctcttgacaagaacccgtccttcatgctgaaagtgcttgagcatattcttgtcacttggccggccacacatccagcccataagacttacacggatgcgatcaaagagctgcagagtgagagtctagtcgagctacagagacttgcttccaggatgcctgatcatcttctggacgtttatgatcagatcgctgcaaaggtcgaggagatggttgctacgggcaccctggacgaaaagcgtcatattacgtatcagactttcttattcactatcgtacaccgatctcgccgtctcgataatgcgaccaaggtccagaaacttgagcgctttctcgaaccgattaatattcagtggcgagatactcgactcaagcagagcctcgcctctcacgctgggttttgtgaactcatggctttggacaaggcccaagattatgtcgtccgtaagaggttggaccagatatccgactggggatccgtagaattagacgacgaaggcaaagctttacaagccgaacttgaagcacggcaaggggctctgcctcttcgccttaccaagtcattcctcacttgctccgttgataaggtcgaaaagtctcaggaccccttccaggtgtcatgcatgctttggcaagagtgtttccccatcatcttgccagagcttctcaactttctcaaccatgcacatgcctcacactctcctaacaactggacaattctgcctccagagatgagacacctcgtcaatcagatccttaccgatagattttggcaagctgggatatccgagggaagcaaagatgacttctacgcgcgcgtatcgggaaagaaacacacttttgaaggtcttgcctcgacgatacgtggttccatccgatttgtccgggaatcttgctacgcaatcatctactgcatgacacgtctcgatgtgcagttctatggatttagcgagctccccgggccgctagcacatgctctacttgcagatgccggtagcttgtcgcctcatcaactgatcaatctcctcaacctagtgagatacctcgtcgacaactgcccagttcctcttcgggatcattttttgcctcccatacttgaggcatgtttccgtcagatggatgcgcgggtgaacggagaatggatgagactggacgagcagcagagcctgaagactgggggaacggcgttgacggaagagatgaagaacgagagcattctccgccaactgacttacacatctgtcatgctggtggctgatttcttggatccagctcggaagaatgccaattccatgcaggaacaccaggccatgctccgtgatacgcagaagtatccttcgctacggaacttctgtctcatgcattcctctgtcgtggagccacttctcatattctgtacccacgccatacggatgcgtgactcacggtcctgtagcataatgctccgcgttctacgaactatcgtcgtagactttgatgggacagaaagcacggaagagggcacaacgggcaatgaatggataccggccgagacggctcgggtgattcgtgaatacatctcatccgacatcatcaaggcttgcatctcatcactccacgagggctatttcgtagagcaacagaaggaattggcgacacttattgctacgatcgtggtcgcatacaatggactgacgaccacggctcgggacattcttgtttcattacctaatataaaggcggcggacgtggatgcagggatcgagttcatgaccaagggcacgtccagctcccgcacacagagaggcgtgatcctggacctgttgcgggacctcaagggcgtctcggtttcggagttggggaaggtgagcaagagcatcgggagcatcgggctcatgtcgacgccgcagaagaagacgatgacacgcagcaagatggcgcagaagttcatgacggcgcccgaagccacgacgggagcgaacggaggaggcataggcaacagcaatggcgacggcacggaggccctggatgggctcgcggggctttttgagtcgtga

SEQ ID NO: 9289 - protein, 1274 aa, Muscodor strobelii
  misc_feature: SGI Peptide ID NO. 562897
  misc_feature (48)..(107): Pfam Id: PF03810 Pfam Desc: Importin-beta N-terminal domain
  misc_feature (121)..(180): Pfam Id: PF08389 Pfam Desc: Exportin 1-like protein
  misc_feature (1)..(1273): NCBI GI: 189091810 Blast Desc: [Podospora anserina] gi|27803015|emb|CAD60718.1| protein product [Podospora anserina] gi|188219258|emb|CAP49238.1| protein product [Podospora anserina]
  misc_feature (25)..(1272): NCBI GI: 116179632 Blast Desc: CHGG_00444 [Chaetomium globosum CBS 148.51] gi|88184741|gb|EAQ92209.1| CHGG_00444 [Chaetomium globosum CBS 148.51]
  misc_feature (13)..(1273): NCBI GI: 256732889 Blast Desc: [Nectria haematococca mpVI 77-13-4]
  misc_feature (25)..(1249): NCBI GI: 46124003 Blast Desc: FG06379.1 [Gibberella zeae PH-1]
  misc_feature (355)..(1274): NCBI GI: 261361183 Blast Desc: MSN5 [Verticillium albo-atrum VaMs.102]
  misc_feature (16)..(1272): NCBI GI: 212546471 Blast Desc: nuclear import and export protein Msn5, [Penicillium marneffei ATCC 18224] gi|210064909|gb|EEA19004.1| nuclear import and export protein Msn5, [Penicillium marneffei ATCC 18224]
  misc_feature (294)..(1270): NCBI GI: 164427076 Blast Desc: NCU02387 [Neurospora crassa OR74A] gi|157071596|gb|EAA30471.2| conserved [Neurospora crassa OR74A]
  misc_feature (29)..(1272): NCBI GI: 115384822 Blast Desc: conserved [Aspergillus terreus NIH2624] gi|114196650|gb|EAU38350.1| conserved [Aspergillus terreus NIH2624]
  misc_feature (14)..(1272): NCBI GI: 258564160 Blast Desc: conserved [Uncinocarpus reesii 1704] gi|237908332|gb|EEP82733.1| conserved [Uncinocarpus reesii 1704]
  misc_feature (17)..(1272): NCBI GI: 242823223 Blast Desc: nuclear import and export protein Msn5, [Talaromyces stipitatus ATCC 10500] gi|218712963|gb|EED12388.1| nuclear import and export protein Msn5, [Talaromyces stipitatus ATCC 10500]
MAAQPINGSVGMDGRDTPSAAQPDVLARIHTALDIVYGPSSNDERKDAQIFLEQLKDSPDAPSNGFQLASDRSQSPIVRHYALSLLEHAIKHKWAQYSGHETANLRQWVLDLSQGVVKTDPPYLRNKIALLWVEIAKRSWGAEWMDMDSLLVQLWQVPDSAVHKELVLTILETLSDEIFNGDDAVVELREKVLSKASVEIFTPSAVLLGDFPKREAGPEVRSGDEGWLARIVDLLRQCLSGDVQNNDEVRSCTLRGLAVITALMPWVIPKAAAVTQAVPVICDGLGASHLDVQKASLEALHALYGRTSLTEKDFLSLVVPLYSPKYVTLFRQLFEWSVIDPDDIDDDKYQLSKKLSEFLSFLGNYLERQFLSLPIDSSQADIIAFLQLLLLVTQSQSLVVSIPVLVTWTRLLSHPALGSSIASMHPVIGPLLECCSTRLLRYENLPEDSEDPTLRLLLEDTDTIPERHAFLGNYRRYSSQVIESVVLLKVSDAMQHILGQAENVLSHLYDNAPPFDMANYSKTSPPVLRIDAQATVIEAALKGFGKWRSKKGASDAEEISALENTFETWCNRLLEMKFEDPLIRKRILQLLVAFSTSALDKNPSFMLKVLEHILVTWPATHPAHKTYTDAIKELQSESLVELQRLASRMPDHLLDVYDQIAAKVEEMVATGTLDEKRHITYQTFLFTIVHRSRRLDNATKVQKLERFLEPINIQWRDTRLKQSLASHAGFCELMALDKAQDYVVRKRLDQISDWGSVELDDEGKALQAELEARQGALPLRLTKSFLTCSVDKVEKSQDPFQVSCMLWQECFPIILPELLNFLNHAHASHSPNNWTILPPEMRHLVNQILTDRFWQAGISEGSKDDFYARVSGKKHTFEGLASTIRGSIRFVRESCYAIIYCMTRLDVQFYGFSELPGPLAHALLADAGSLSPHQLINLLNLVRYLVDNCPVPLRDHFLPPILEACFRQMDARVNGEWMRLDEQQSLKTGGTALTEEMKNESILRQLTYTSVMLVADFLDPARKNANSMQEHQAMLRDTQKYPSLRNFCLMHSSVVEPLLIFCTHAIRMRDSRSCSIMLRVLRTIVVDFDGTESTEEGTTGNEWIPAETARVIREYISSDIIKACISSLHEGYFVEQQKELATLIATIVVAYNGLTTTARDILVSLPNIKAADVDAGIEFMTKGTSSSRTQRGVILDLLRDLKGVSVSELGKVSKSIGSIGLMSTPQKKTMTRSKMAQKFMTAPEATTGANGGGIGNSNGDGTEALDGLAGLFES

SEQ ID NO: 9290 - DNA, 5651 bp, Muscodor strobelii; identical to SEQ ID NO: 9287
  misc_feature: SGI EST ID NO. CUFF.22320.1
  misc_feature: Variant of the nucleotide sequence at SEQ ID NO 9288

SEQ ID NO: 9291 - DNA, 3102 bp, Muscodor strobelii
  misc_feature: SGI cDNA ID NO. 562898
  misc_feature: Encodes the peptide sequence at SEQ ID NO 9292
atggaggaccagctcgtgcagattctcgccaacacgcagtcacgcgacgagggccccaggaagcaagcagagcttgaccttaagcaggccaggtctagtccttccttccctgtgtacctcaccaacatcgcccgccatacctctgttgcccccggagtccggcaggctgctctctccacgctgcgccgcttcatcgaagacaactgggctggcgacaacgacgacggccccgccattgccattgacgatgctgtcagaacccagatcagacctctgttgctggaccttgcgttgaactcagaggacgaccacaagatcaaggtcgctgcaagttatgctgtaggcaaaatcgccaacgtcgatttccccgagcaatggcccgacctcctccccacactgctcagcatcatcccgacaggcacaccgggccagatccacggcgcactcaaggtgctcagcgacttagtggaggagagcttgagtgacgaccagttcttttccatggcccagagcatcgtcaaggtggtctacgatgttgcggccaacgagagccagaagccccttctgcgtgctctcgccgttgccgtcttccgcggttgcttcgatctcatggatacggtcaaggaggaacatcccaaggaagtctcgtcgttcgccgaggacgccctcaagggctggctgcccttctgcctcaacatcatcaagctcccgctgccaccccatgaaggcagctccgacgagcaacccaaatcctggaacggcctggtcgcgctgaagctgcaggtcgtcaagtgcttgctcaaggtcaagtccgtcttcgcaaaccttctgctacctcatactccccacttctttcaggcagtctgggaagagctgtcgaccctggagccatcgtacgctgctttatatatagattctgaggcgcagggccggctcgaggattccgacgggctgccttataccctcgatttcctcgtcctcgaagagcttgacttcttgaacggctgtttgaaagccccgccggtcaggaaggagcttgaggcccagttggctgcccgtgcaggcgctcatgagaccccgtgggtactggatctttgcaagctggccacgtcatacggccagatcacgcacgagcaggagcaactatggttcttcgatgtttcactatacttgagcgaggagcagtcagtcagtgccaactatacccctcgaacagcttgcggagatcttttgatcaagctgggcgagtggttgaaccagaaatctctagagggactctatgcatataccaagtctctactcacacaagaagcctacacagacgacgttgcttggagaaaacaagagtccgtgctctatctgcttaatatgctgttgacggatttcttggaatgcagcagaccagtttccccacagctgaccgaggcatatcttgaactcgtcaactatgcgatcgagcgaccggataagccgcttctccgagccagaggttacctcgtgtctggcgtcttgtgtcagtgcaacggcgttgcttccaatctcctccaccgaaccatagacggtattacttccgaggaagaagaaattgtacaggcggcttgcatcaaagctgtgcagggtttcattagcagcgatgttgaggggatcgcgggcaacacacagttgcaagccaaagtcgtcagcgctgtcaaccaatggatgtcatccaaggacatgactgaactcgccgacagcgaggatctgctcagcacacttgccgaggccatccgagccgcgattgatattgataagtcggttgccgtgtccagcgagatccccgccctcgatcttctgtttctgattgcgaaacatggcgccaacaattggcaggtgactatgctcatctgcgagacattcgaggacattgtacagacaatgtctaaccctgccgcctaccaagctctctgcgaaaaggttcttccttctctgatcggtgccttcaacgtcgccgacgtcacctctgacaacccattagtcacttttgctacagagttaatgacttcactaacacaatatggatcggaacccatgccgcccggattcgtgtccgctactttgcccaagttgacaagacttttgatggaaagcaatgaaggcgaaattcttagacccggagccgagtctgtaaaatatctacttgctcatgaccatgaacaagtattcaactatcatgacgagaacaatcgatcaggtcttgaagtctgcctacacatcatagaccgtctactgggaactgcgattgaagataatgcggcctctgaagtgggtggactggccgccgaacttgtcgagaaagccggccacgaaaggctcggcccctttttacctcagctgctccaggctgtggcaactcgtctggccactgccgaaactgctaccttcatccagtctctcatcctcgttttcgcgagactgtcacttgttggtgcccatgatgtggtagaattcctcagcacggtgcagatcaacggccagagtggcttgcaagttgtactaagcaagtggctcgagaattccgtcaacttcgctggatatgacgaaataaggcaaaatgtcattgctttatccaagctctatactctcaatgacccccgtgttgctcaaactacggtgaagggtgatatgatcatgcctaccagcgatagaatcatgactcggtctcgtacaagacaaaaccctgaccgatatgacatcatacccgcaccccagaagatccttaaagttttgatcgaggagctcctttcggcatcgggcgtgatcagtgcaagcgccgccgccgctgcagcggcagccgagttcgccgatgaggagaacgatgacgatggatgggaagacgacccggatactattgatcttagcctcggtagcaccaaggctgatctgatgggctatctggagtcaagcaacatgcgacaccgcgatgacgagacacagcaatatctcgtggagttcttcgtcaatgctgcgagagataacgttgccgggttcgccacttggtacgagaagttcacgccggaggaaaaggccaagttggctgagatggcaaatggccagccgtcttag

SEQ ID NO: 9292 - protein, 1033 aa, Muscodor strobelii
  misc_feature: SGI Peptide ID NO. 562898
  misc_feature (23)..(99): Pfam Id: PF03810 Pfam Desc: Importin-beta N-terminal domain
  misc_feature (1)..(1031): NCBI GI: 256726821 Blast Desc: NECHADRAFT_90822 [Nectria haematococca mpVI 77-13-4]
  misc_feature (1)..(1028): NCBI GI: 145613383 Blast Desc: MGG_11165 [Magnaporthe grisea 70-15] gi|145020464|gb|EDK04593.1| MGG_11165 [Magnaporthe grisea 70-15]
  misc_feature (2)..(1030): NCBI GI: 154301634 Blast Desc: BC1G_10144 [Botryotinia fuckeliana B05.10] gi|150855806|gb|EDN30998.1| BC1G_10144 [Botryotinia fuckeliana B05.10]
  misc_feature (1)..(1029): NCBI GI: 46121797 Blast Desc: FG05276.1 [Gibberella zeae PH-1]
  misc_feature (2)..(1030): NCBI GI: 156032762 Blast Desc: SS1G_13786 [Sclerotinia sclerotiorum 1980] gi|154699189|gb|EDN98927.1| SS1G_13786 [Sclerotinia sclerotiorum 1980]
  misc_feature (1)..(1028): NCBI GI: 261352825 Blast Desc: KapG [Verticillium albo-atrum VaMs.102]
  misc_feature (1)..(1017): NCBI GI: 85105327 Blast Desc: NCU06578 [Neurospora crassa OR74A] gi|28923525|gb|EAA32702.1| conserved [Neurospora crassa OR74A]
  misc_feature (1)..(1028): NCBI GI: 171691004 Blast Desc: protein product [Podospora anserina] gi|170945450|emb|CAP71562.1| protein product [Podospora anserina]
  misc_feature (1)..(1028): NCBI GI: 258573361 Blast Desc: conserved [Uncinocarpus reesii 1704] gi|237901128|gb|EEP75529.1| conserved [Uncinocarpus reesii 1704]
  misc_feature (1)..(1027): NCBI GI: 145251265 Blast Desc: An15g06180 [Aspergillus niger] gi|134082676|emb|CAK42570.1| protein product [Aspergillus niger]
MEDQLVQILANTQSRDEGPRKQAELDLKQARSSPSFPVYLTNIARHTSVAPGVRQAALSTLRRFIEDNWAGDNDDGPAIAIDDAVRTQIRPLLLDLALNSEDDHKIKVAASYAVGKIANVDFPEQWPDLLPTLLSIIPTGTPGQIHGALKVLSDLVEESLSDDQFFSMAQSIVKVVYDVAANESQKPLLRALAVAVFRGCFDLMDTVKEEHPKEVSSFAEDALKGWLPFCLNIIKLPLPPHEGSSDEQPKSWNGLVALKLQVVKCLLKVKSVFANLLLPHTPHFFQAVWEELSTLEPSYAALYIDSEAQGRLEDSDGLPYTLDFLVLEELDFLNGCLKAPPVRKELEAQLAARAGAHETPWVLDLCKLATSYGQITHEQEQLWFFDVSLYLSEEQSVSANYTPRTACGDLLIKLGEWLNQKSLEGLYAYTKSLLTQEAYTDDVAWRKQESVLYLLNMLLTDFLECSRPVSPQLTEAYLELVNYAIERPDKPLLRARGYLVSGVLCQCNGVASNLLHRTIDGITSEEEEIVQAACIKAVQGFISSDVEGIAGNTQLQAKVVSAVNQWMSSKDMTELADSEDLLSTLAEAIRAAIDIDKSVAVSSEIPALDLLFLIAKHGANNWQVTMLICETFEDIVQTMSNPAAYQALCEKVLPSLIGAFNVADVTSDNPLVTFATELMTSLTQYGSEPMPPGFVSATLPKLTRLLMESNEGEILRPGAESVKYLLAHDHEQVFNYHDENNRSGLEVCLHIIDRLLGTAIEDNAASEVGGLAAELVEKAGHERLGPFLPQLLQAVATRLATAETATFIQSLILVFARLSLVGAHDVVEFLSTVQINGQSGLQVVLSKWLENSVNFAGYDEIRQNVIALSKLYTLNDPRVAQTTVKGDMIMPTSDRIMTRSRTRQNPDRYDIIPAPQKILKVLIEELLSASGVISASAAAAAAAAEFADEENDDDGWEDDPDTIDLSLGSTKADLMGYLESSNMRHRDDETQQYLVEFFVNAARDNVAGFATWYEKFTPEEKAKLAEMANGQPS

SEQ ID NO: 9293 - DNA, 3858 bp, Muscodor strobelii
  misc_feature: SGI EST ID NO. CUFF.22137.1
  misc_feature: Variant of the nucleotide sequence at SEQ ID NO 9291
cgccgatcgcctagccgcatgtgtactatcgccagcagccagacagcacatcactgcagtctgcatagcacagacttctatctgatgtgaattgcaggtgtttacttggcctctgtctctgctgttgttttgtttctttcttcacactcgtagacatacagtatatcaacctaatacactggcatcgtgtcttgcccctcccccaaggcaaagctatttctggtagccagacaacggtgcttgaccacttacttataacagagagaacctctctaacctctctgcaccgtcgccaacactcttattgcttcttctcccatctgaatccaccctctgcctacgcaccctcgagccgcaacgacagaccccgtgcagccatcggcctcggcggtctgaagcttgcctaccatggaggaccagctcgtgcagattctcgccaacacgcagtcacgcgacgagggccccaggaagcaagcagagcttgaccttaagcaggccaggtctagtccttccttccctgtgtacctcaccaacatcgcccgccatacctctgttgcccccggagtccggcaggctgctctctccacgctgcgccgcttcatcgaagacaactgggctggcgacaacgacgacggccccgccattgccattgacgatgctgtcagaacccagatcagacctctgttgctggaccttgcgttgaactcagaggacgaccacaagatcaaggtcgctgcaagttatgctgtaggcaaaatcgccaacgtcgatttccccgagcaatggcccgacctcctccccacactgctcagcatcatcccgacaggcacaccgggccagatccacggcgcactcaaggtgctcagcgacttagtggaggagagcttgagtgacgaccagttcttttccatggcccagagcatcgtcaaggtggtctacgatgttgcggccaacgagagccagaagccccttctgcgtgctctcgccgttgccgtcttccgcggttgcttcgatctcatggatacggtcaaggaggaacatcccaaggaagtctcgtcgttcgccgaggacgccctcaagggctggctgcccttctgcctcaacatcatcaagctcccgctgccaccccatgaaggcagctccgacgagcaacccaaatcctggaacggcctggtcgcgctgaagctgcaggtcgtcaagtgcttgctcaaggtcaagtccgtcttcgcaaaccttctgctacctcatactccccacttctttcaggcagtctgggaagagctgtcgaccctggagccatcgtacgctgctttatatatagattctgaggcgcagggccggctcgaggattccgacgggctgccttataccctcgatttcctcgtcctcgaagagcttgacttcttgaacggctgtttgaaagccccgccggtcaggaaggagcttgaggcccagttggctgcccgtgcaggcgctcatgagaccccgtgggtactggatctttgcaagctggccacgtcatacggccagatcacgcacgagcaggagcaactatggttcttcgatgtttcactatacttgagcgaggagcagtcagtcagtgccaactatacccctcgaacagcttgcggagatcttttgatcaagctgggcgagtggttgaaccagaaatctctagagggactctatgcatataccaagtctctactcacacaagaagcctacacagacgacgttgcttggagaaaacaagagtccgtgctctatctgcttaatatgctgttgacggatttcttggaatgcagcagaccagtttccccacagctgaccgaggcatatcttgaactcgtcaactatgcgatcgagcgaccggataagccgcttctccgagccagaggttacctcgtgtctggcgtcttgtgtcagtgcaacggcgttgcttccaatctcctccaccgaaccatagacggtattacttccgaggaagaagaaattgtacaggcggcttgcatcaaagctgtgcagggtttcattagcagcgatgttgaggggatcgcgggcaacacacagttgcaagccaaagtcgtcagcgctgtcaaccaatggatgtcatccaaggacatgactgaactcgccgacagcgaggatctgctcagcacacttgccgaggccatccgagccgcgattgatattgataagtcggttgccgtgtccagcgagatccccgccctcgatcttctgtttctgattgcgaaacatggcgccaacaattggcaggtgactatgctcatctgcgagacattcgaggacattgtacagacaatgtctaaccctgccgcctaccaagctctctgcgaaaaggttcttccttctctgatcggtgccttcaacgtcgccgacgtcacctctgacaacccattagtcacttttgctacagagttaatgacttcactaacacaatatggatcggaacccatgccgcccggattcgtgtccgctactttgcccaagttgacaagacttttgatggaaagcaatgaaggcgaaattcttagacccggagccgagtctgtaaaatatctacttgctcatgaccatgaacaagtattcaactatcatgacgagaacaatcgatcaggtcttgaagtctgcctacacatcatagaccgtctactgggaactgcgattgaagataatgcggcctctgaagtgggtggactggccgccgaacttgtcgagaaagccggccacgaaaggctcggcccctttttacctcagctgctccaggctgtggcaactcgtctggccactgccgaaactgctaccttcatccagtctctcatcctcgttttcgcgagactgtcacttgttggtgcccatgatgtggtagaattcctcagcacggtgcagatcaacggccagagtggcttgcaagttgtactaagcaagtggctcgagaattccgtcaacttcgctggatatgacgaaataaggcaaaatgtcattgctttatccaagctctatactctcaatgacccccgtgttgctcaaactacggtgaagggtgatatgatcatgcctaccagcgatagaatcatgactcggtctcgtacaagacaaaaccctgaccgatatgacatcatacccgcaccccagaagatccttaaagttttgatcgaggagctcctttcggcatcgggcgtgatcagtgcaagcgccgccgccgctgcagcggcagccgagttcgccgatgaggagaacgatgacgatggatgggaagacgacccggatactattgatcttagcctcggtagcaccaaggctgatctgatgggctatctggagtcaagcaacatgcgacaccgcgatgacgagacacagcaatatctcgtggagttcttcgtcaatgctgcgagagataacgttgccgggttcgccacttggtacgagaagttcacgccggaggaaaaggccaagttggctgagatggcaaatggccagccgtcttagaaagagcagtgccaggatgtcagatttccagctaaggctaaaggaagggcatggaaagcgtccactagtctcaattgaaggactgattatctgttgcgaattcattacgttagagtggtgagtgggttagcatgtctagacggcgtggttttacgctgaatagtcgctacatgctctgcgaagacttaggtccgccaggctggggaggaatggagagcactcccttacttagatatgtgaataaggatccagatcagagataagagaaaaagaacaagaattaccaacatagtcatgataatttctcacagaggtgagactggtgatcatggaagcttatagtagtgc

SEQ ID NO: 9294 - DNA, 3111 bp, Muscodor strobelii
  misc_feature: SGI cDNA ID NO. 562899
  misc_feature: Encodes the peptide sequence at SEQ ID NO 9295
atggaggaccagctcgtgcagattctcgccaacacgcagtcacgcgacgagggccccaggaagcaagcagagcttgaccttaagcaggccaggtctagtccttccttccctgtgtacctcaccaacatcgcccgccatacctctgttgcccccggagtccggcaggctgctctctccacgctgcgccgcttcatcgaagacaactgggctggcgacaacgacgacggccccgccattgccattgacgatgctgtcagaacccagatcagacctctgttgctggaccttgcgttgaactcagaggacgaccacaagatcaaggtcgctgcaagttatgctgtaggcaaaatcgccaacgtcgatttccccgagcaatggcccgacctcctccccacactgctcagcatcatcccgacaggcacaccgggccagatccacggcgcactcaaggtgctcagcgacttagtggaggagagcttgagtgacgaccagttcttttccatggcccagagcatcgtcaaggtggtctacgatgttgcggccaacgagagccagaagccccttctgcgtgctctcgccgttgccgtcttccgcggttgcttcgatctcatggatacggtcaaggaggaacatcccaaggaagtctcgtcgttcgccgaggacgccctcaagggctggctgcccttctgcctcaacatcatcaagctcccgctgccaccccatgaaggcagctccgacgagcaacccaaatcctggaacggcctggtcgcgctgaagctgcaggtcgtcaagtgcttgctcaaggtcaagtccgtcttcgcaaaccttctgctacctcatactccccacttctttcaggcagtctgggaagagctgtcgaccctggagccatcgtacgctgctttatatatagattctgaggcgcagggccggctcgaggattccgacgggctgccttataccctcgatttcctcgtcctcgaagagcttgacttcttgaacggctgtttgaaagccccgccggtcaggaaggagcttgaggcccagttggctgcccgtgcaggcgctcatgagaccccgtgggtactggatctttgcaagctggccacgtcatacggccagatcacgcacgagcaggagcaactatggttcttcgatgtttcactatacttgagcgaggagcagtcagtcagtgccaactatacccctcgaacagcttgcggagatcttttgatcaagctgggcgagtggttgaaccagaaatctctagagggactctatgcatataccaagtctctactcacacaagaagcctacacagacgacgttgcttggagaaaacaagagtccgtgctctatctgcttaatatgctgttgacggatttcttggaatgcagcagaccagtttccccacagctgaccgaggcatatcttgaactcgtcaactatgcgatcgagcgaccggataagccgcttctccgagccagaggttacctcgtgtctggcgtcttgtgtcagtgcaacggcgttgcttccaatctcctccaccgaaccatagacggtattacttccgaggaagaagaaattgtacaggcggcttgcatcaaagctgtgcagggtttcattagcagcgatgttgaggggatcgcgggcaacacacagttgcaagccaaagtcgtcagcgctgtcaaccaatggatgtcatccaaggacatgactgaactcgccgacagcgaggatctgctcagcacacttgccgaggccatccgagccgcgattgatattgataagtcggttgccgtgtccagcgagatccccgccctcgatcttctgtttctgattgcgaaacatggcgccaacaattggcaggtgactatgctcatctgcgagacattcgaggacattgtacagacaatgtctaaccctgccgcctaccaagctctctgcgaaaaggttcttccttctctgatcggtgccttcaacgtcgccgacgtcacctctgacaacccattagtcactgtaggttgttttgctacagagttaatgacttcactaacacaatatggatcggaacccatgccgcccggattcgtgtccgctactttgcccaagttgacaagacttttgatggaaagcaatgaaggcgaaattcttagacccggagccgagtctgtaaaatatctacttgctcatgaccatgaacaagtattcaactatcatgacgagaacaatcgatcaggtcttgaagtctgcctacacatcatagaccgtctactgggaactgcgattgaagataatgcggcctctgaagtgggtggactggccgccgaacttgtcgagaaagccggccacgaaaggctcggcccctttttacctcagctgctccaggctgtggcaactcgtctggccactgccgaaactgctaccttcatccagtctctcatcctcgttttcgcgagactgtcacttgttggtgcccatgatgtggtagaattcctcagcacggtgcagatcaacggccagagtggcttgcaagttgtactaagcaagtggctcgagaattccgtcaacttcgctggatatgacgaaataaggcaaaatgtcattgctttatccaagctctatactctcaatgacccccgtgttgctcaaactacggtgaagggtgatatgatcatgcctaccagcgatagaatcatgactcggtctcgtacaagacaaaaccctgaccgatatgacatcatacccgcaccccagaagatccttaaagttttgatcgaggagctcctttcggcatcgggcgtgatcagtgcaagcgccgccgccgctgcagcggcagccgagttcgccgatgaggagaacgatgacgatggatgggaagacgacccggatactattgatcttagcctcggtagcaccaaggctgatctgatgggctatctggagtcaagcaacatgcgacaccgcgatgacgagacacagcaatatctcgtggagttcttcgtcaatgctgcgagagataacgttgccgggttcgccacttggtacgagaagttcacgccggaggaaaaggccaagttggctgagatggcaaatggccagccgtcttag

SEQ ID NO: 9295 - protein, 1036 aa, Muscodor strobelii
  misc_feature: SGI Peptide ID NO. 562899
  misc_feature (23)..(99): Pfam Id: PF03810 Pfam Desc: Importin-beta N-terminal domain
  misc_feature (1)..(1034): NCBI GI: 256726821 Blast Desc: NECHADRAFT_90822 [Nectria haematococca mpVI 77-13-4]
  misc_feature (1)..(1031): NCBI GI: 145613383 Blast Desc: MGG_11165 [Magnaporthe grisea 70-15] gi|145020464|gb|EDK04593.1| MGG_11165 [Magnaporthe grisea 70-15]
  misc_feature (2)..(1033): NCBI GI: 154301634 Blast Desc: BC1G_10144 [Botryotinia fuckeliana B05.10] gi|150855806|gb|EDN30998.1| BC1G_10144 [Botryotinia fuckeliana B05.10]
  misc_feature (1)..(1032): NCBI GI: 46121797 Blast Desc: FG05276.1 [Gibberella zeae PH-1]
  misc_feature (2)..(1033): NCBI GI: 156032762 Blast Desc: SS1G_13786 [Sclerotinia sclerotiorum 1980] gi|154699189|gb|EDN98927.1| SS1G_13786 [Sclerotinia sclerotiorum 1980]
  misc_feature (1)..(1031): NCBI GI: 261352825 Blast Desc: KapG [Verticillium albo-atrum VaMs.102]
  misc_feature (1)..(1020): NCBI GI: 85105327 Blast Desc: NCU06578 [Neurospora crassa OR74A] gi|28923525|gb|EAA32702.1| conserved [Neurospora crassa OR74A]
  misc_feature (1)..(1031): NCBI GI: 171691004 Blast Desc: protein product [Podospora anserina] gi|170945450|emb|CAP71562.1| protein product [Podospora anserina]
  misc_feature (1)..(1031): NCBI GI: 258573361 Blast Desc: conserved [Uncinocarpus reesii 1704] gi|237901128|gb|EEP75529.1| conserved [Uncinocarpus reesii 1704]
  misc_feature (1)..(1030): NCBI GI: 145251265 Blast Desc: An15g06180 [Aspergillus niger] gi|134082676|emb|CAK42570.1| protein product [Aspergillus niger]
MEDQLVQILANTQSRDEGPRKQAELDLKQARSSPSFPVYLTNIARHTSVAPGVRQAALSTLRRFIEDNWAGDNDDGPAIAIDDAVRTQIRPLLLDLALNSEDDHKIKVAASYAVGKIANVDFPEQWPDLLPTLLSIIPTGTPGQIHGALKVLSDLVEESLSDDQFFSMAQSIVKVVYDVAANESQKPLLRALAVAVFRGCFDLMDTVKEEHPKEVSSFAEDALKGWLPFCLNIIKLPLPPHEGSSDEQPKSWNGLVALKLQVVKCLLKVKSVFANLLLPHTPHFFQAVWEELSTLEPSYAALYIDSEAQGRLEDSDGLPYTLDFLVLEELDFLNGCLKAPPVRKELEAQLAARAGAHETPWVLDLCKLATSYGQITHEQEQLWFFDVSLYLSEEQSVSANYTPRTACGDLLIKLGEWLNQKSLEGLYAYTKSLLTQEAYTDDVAWRKQESVLYLLNMLLTDFLECSRPVSPQLTEAYLELVNYAIERPDKPLLRARGYLVSGVLCQCNGVASNLLHRTIDGITSEEEEIVQAACIKAVQGFISSDVEGIAGNTQLQAKVVSAVNQWMSSKDMTELADSEDLLSTLAEAIRAAIDIDKSVAVSSEIPALDLLFLIAKHGANNWQVTMLICETFEDIVQTMSNPAAYQALCEKVLPSLIGAFNVADVTSDNPLVTVGCFATELMTSLTQYGSEPMPPGFVSATLPKLTRLLMESNEGEILRPGAESVKYLLAHDHEQVFNYHDENNRSGLEVCLHIIDRLLGTAIEDNAASEVGGLAAELVEKAGHERLGPFLPQLLQAVATRLATAETATFIQSLILVFARLSLVGAHDVVEFLSTVQINGQSGLQVVLSKWLENSVNFAGYDEIRQNVIALSKLYTLNDPRVAQTTVKGDMIMPTSDRIMTRSRTRQNPDRYDIIPAPQKILKVLIEELLSASGVISASAAAAAAAAEFADEENDDDGWEDDPDTIDLSLGSTKADLMGYLESSNMRHRDDETQQYLVEFFVNAARDNVAGFATWYEKFTPEEKAKLAEMANGQPS

SEQ ID NO: 9296 - DNA, 3858 bp, Muscodor strobelii; identical to SEQ ID NO: 9293
  misc_feature: SGI EST ID NO. CUFF.22137.1
  misc_feature: Variant of the nucleotide sequence at SEQ ID NO 9294

SEQ ID NO: 9297 - DNA, 1029 bp, Muscodor strobelii
  misc_feature: SGI cDNA ID NO. 562900
  misc_feature: Encodes the peptide sequence at SEQ ID NO 9298
atgtccaagccattgggcacagacccagggccaatttcaaaggcgaaagacaatcagtctctgccaagccaagaagcacatcagctcctggccactttttcacacttcttcacggtctgcatccacaacgtacttttctacaggcgcatatacccagacagagccttcataaaagcccgcgcctacaatacacccgtgaaccaatgtcgacatcccacagtatgtgcttggatccgcgacgccgtcgacgcagcgcaggcccagatagcacaaggcgccgtcgagcgcttagtcattgtcatatatgacgccaagaacgtggtgttagagcgctggatgttcgacattgctagtttccctgcttggaatggtcttgtcaagccgaagaaaaggaaattgaatcccaccagagagggaggtgaagagggggagggaggaaatggcacatcagacgaagacattgagcaagtagaggagggtgtcaaggagggagaccagaaaggaaagcagaatgcagcagacggagatgagaacaacggagacgatactggcggcgaagatgacgacgaggacggaaatgacgccactgaagacactgaagatgacgaagaagagggcgaaggcggagatcaggggagaagaaaagaaggagtcaggcctagacctgacgaagaggtcagcgaagagatcaactggactgatgttgaggagcagcttcgggccgctctacgacggctcgcgtatgctggagagaagatcgcacctttgcccaagggttgcacatatactctggccatcgagctgagagacaaggccgaggcgccaatgaagcaaccacagccctggatgcccaccaaaccaacgctccaacccgcctcgatgggccaacgaaaggctggcgcagacctgggcggcgccaagacaactcctgttcgtgccatagaagccggccctctattcttcgagtgctgggttgaagagagcaaagcaaagattgaactgtctacgtctacagcgtcgagctcctga

SEQ ID NO: 9298 - protein, 342 aa, Muscodor strobelii
  misc_feature: SGI Peptide ID NO. 562900
  misc_feature (25)..(295): Pfam Id: PF02301 Pfam Desc: HORMA domain
  misc_feature (25)..(275): Pfam Id: PF02301 Pfam Desc: HORMA domain
  misc_feature (108)..(336): NCBI GI: 145613381 Blast Desc: MGG_01694 [Magnaporthe grisea 70-15] gi|145020463|gb|EDK04592.1| MGG_01694 [Magnaporthe grisea 70-15]
  misc_feature (227)..(331): NCBI GI: 81020328 Blast Desc: REV7 [Neurospora crassa]
  misc_feature (227)..(331): NCBI GI: 85105323 Blast Desc: NCU06577 [Neurospora crassa OR74A] gi|22164050|dbj|BAC07275.1| MUS26 [Neurospora crassa] gi|28923524|gb|EAA32701.1| NCU06577 [Neurospora crassa OR74A]
  misc_feature (227)..(331): NCBI GI: 81020291 Blast Desc: REV7 [Neurospora tetrasperma]
  misc_feature (18)..(130): NCBI GI: 81020291 Blast Desc: REV7 [Neurospora tetrasperma]
  misc_feature (18)..(130): NCBI GI: 81020328 Blast Desc: REV7 [Neurospora crassa]
  misc_feature (18)..(130): NCBI GI: 85105323 Blast Desc: NCU06577 [Neurospora crassa OR74A] gi|22164050|dbj|BAC07275.1| MUS26 [Neurospora crassa] gi|28923524|gb|EAA32701.1| NCU06577 [Neurospora crassa OR74A]
  misc_feature (12)..(123): NCBI GI: 171691002 Blast Desc: protein product [Podospora anserina] gi|170945449|emb|CAP71561.1| protein product [Podospora anserina]
  misc_feature (19)..(332): NCBI GI: 71002484 Blast Desc: mitotic spindle checkpoint protein (Mad2B) [Aspergillus fumigatus Af293] gi|66853561|gb|EAL93885.1| mitotic spindle checkpoint protein (Mad2B), [Aspergillus fumigatus Af293]
  misc_feature (5)..(332): NCBI GI: 121716656 Blast Desc: mitotic spindle checkpoint protein (Mad2B), [Aspergillus clavatus NRRL 1] gi|119404029|gb|EAW14446.1| mitotic spindle checkpoint protein (Mad2B), [Aspergillus clavatus NRRL 1]
MSKPLGTDPGPISKAKDNQSLPSQEAHQLLATFSHFFTVCIHNVLFYRRIYPDRAFIKARAYNTPVNQCRHPTVCAWIRDAVDAAQAQIAQGAVERLVIVIYDAKNVVLERWMFDIASFPAWNGLVKPKKRKLNPTREGGEEGEGGNGTSDEDIEQVEEGVKEGDQKGKQNAADGDENNGDDTGGEDDDEDGNDATEDTEDDEEEGEGGDQGRRKEGVRPRPDEEVSEEINWTDVEEQLRAALRRLAYAGEKIAPLPKGCTYTLAIELRDKAEAPMKQPQPWMPTKPTLQPASMGQRKAGADLGGAKTTPVRAIEAGPLFFECWVEESKAKIELSTSTASSS

SEQ ID NO: 9299 - DNA, 2878 bp, Muscodor strobelii
  misc_feature: SGI EST ID NO. CUFF.22129.0
  misc_feature: Variant of the nucleotide sequence at SEQ ID NO 9297
gctggcgtcttctaacgcgcatgctctgtgcccctcaacgcgtctcccgctgcactacctaagcacacatgctgcctacggcaatctctactgctcccaaaggattcaagcatttctcaccccaactgaatctttcaaagtgaaataccctgttgacttattgggctcgtaggttgtcataagctagtgacaatgtccaagccattgggcacagacccagggccaatttcaaaggcgaaagacaatcagtctctgccaagccaagaagcacatcagctcctggccactttttcacacttcttcacggtctgcatccacaacgtacttttctacaggcgcatatacccagacagagccttcataaaagcccgcgcctacaatacacccgtgaaccaatgtcgacatcccacagtatgtgcttggatccgcgacgccgtcgacgcagcgcaggcccagatagcacaaggcgccgtcgagcgcttagtcattgtcatatatgacgccaagaacgtggtgttagagcgctggatgttcgacattgctagtttccctgcttggaatggtcttgtcaagccgaagaaaaggaaattgaatcccaccagagagggaggtgaagagggggagggaggaaatggcacatcagacgaagacattgagcaagtagaggagggtgtcaaggagggagaccagaaaggaaagcagaatgcagcagacggagatgagaacaacggagacgatactggcggcgaagatgacgacgaggacggaaatgacgccactgaagacactgaagatgacgaagaagagggcgaaggcggagatcaggggagaagaaaagaaggagtcaggcctagacctgacgaagaggtcagcgaagagatcaactggactgatgttgaggagcagcttcgggccgctctacgacggctcgcgtatgctggagagaagatcgcacctttgcccaagggttgcacatatactctggccatcgagctgagagacaaggccgaggcgccaatgaagcaaccacagccctggatgcccaccaaaccaacgctccaacccgcctcgatgggccaacgaaaggctggcgcagacctgggcggcgccaagacaactcctgttcgtgccatagaagccggccctctattcttcgagtgctgggttgaagagagcaaagcaaagattgaactgtctacgtctacagcgtcgagctcctgatcgatctttacttccagttcagaaggcgcagattatgatcccgaaagaagtatgcaatgatcaactaatggcaaggtattatttttgaacaggataaggatacataattgtacattcattgattcataacacatcacaagcaaaaagccattcttcagttccattgtcctgatcagataatatctcctccgaatccgccgaagccaccacctccgccaaagggaccattgccgcctcctggtcgccggccgccatccctcgggccattggggaagagcgggtcatatcgagcaccaggtggcacctgtgggtcatagtctcctctcatccccccatcgccgccgaacaaggggtcgtcaaatgttgggtgcattcctcggccaccaggtcgaggtaagcctcccccaatgcccaatccagggcgaagaggatcgtgcggcccaagcccgggtgggttgagatcatctgctccaatattcccaaatggcgtgaggccagacgggagcggcactcgagggcggttgagatcgtaagggtcgtcgaagcccggcggcgggaagtctccagcaggcaccggccgacttggtatcggacgtaggggatcggcgtgtgggtaagggtgcgccggctggggcatggggtcaggcatgacaggctgtcgtggtggtctacgtgcggaggcgtcggcgtcgtcgcggacggcgcggtcgtctggtgactcctcgtagccctccttctgcagcgagggcagaagcttctggatgatattgactttgatgagggtcgcgaggtccaagacgcggctttccgagatgaaagcatctgagatcttttgtcgcaggtcggatcgatcctctgcgccgtcggttatggtgatgcgaataggaagagcagcgttagagacataatctttgatcaccacctcaaggcgcgcgatgcgctcgtcttggacagccaagccgcggatctcggccttgccacccatgcgatcgattttgatgacgaaacgaagagcagactgctggtgggcatagatgaaggcatatgtattgaacgatgcgttccagttgggcgggagacgtggagctagctcatggcatcgcgcttctgcaatattgatcgttagtctttagtctgtatgtgataggaagacatcggggtttggactatcataccgtctggcttgtcttcgtcgaacccgagcaagcggaagcccaggttagccatgcagccatggacgaataaggccagtgcttcatgggagctggcaagatctgaggtggtgtcgttgggctcatgcgttgacaaggcatcagccatcgactgcaggacagtcgaggagctcagcggatttggcgccatcgctactgatggacaggtcactcgccgtggatgttgtttgatggagaattgatcctgtattgattacaagtcgtaatggggagaaggattgatgatattcgcgaggtatttcaggctgatgatagctccgaccagagttgtctgaaaatcaatcaaaggatatgttttcgatatatgcatttgtaccgcccaccttacggagaaacacacctaccttttattaggtatttgctcttccccaaataaggttgtgtcatcatgctgctgcctcccgaccgccctccctatagtttcg

SEQ ID NO: 9300 - DNA, 1122 bp, Muscodor strobelii
  misc_feature: SGI cDNA ID NO. 562901
  misc_feature: Encodes the peptide sequence at SEQ ID NO 9301
atggcgccaaatccgctgagctcctcgactgtcctgcagtcgatggctgatgccttgtcaacgcatgagcccaacgacaccacctcagatcttgccagctcccatgaagcactggccttattcgtccatggctgcatggctaacctgggcttccgcttgctcgggttcgacgaagacaagccagacgaagcgcgatgccatgagctagctccacgtctcccgcccaactggaacgcatcgttcaatacatatgccttcatctatgcccaccagcagtctgctcttcgtttcgtcatcaaaatcgatcgcatgggtggcaaggccgagatccgcggcttggctgtccaagacgagcgcatcgcgcgccttgaggtggtgatcaaagattatgtctctaacgctgctcttcctattcgcatcaccataaccgacggcgcagaggatcgatccgacctgcgacaaaagatctcagatgctttcatctcggaaagccgcgtcttggacctcgcgaccctcatcaaagtcaatatcatccagaagcttctgccctcgctgcagaaggagggctacgaggagtcaccagacgaccgcgccgtccgcgacgacgccgacgcctccgcacgtagaccaccacgacagcctgtcatgcctgaccccatgccccagccggcgcacccttacccacacgccgatcccctacgtccgataccaagtcggccggtgcctgctggagacttcccgccgccgggcttcgacgacccttacgatctcaaccgccctcgagtgccgctcccgtctggcctcacgccatttgggaatattggagcagatgatctcaacccacccgggcttgggccgcacgatcctcttcgccctggattgggcattgggggaggcttacctcgacctggtggccgaggaatgcacccaacatttgacgaccccttgttcggcggcgatggggggatgagaggagactatgacccacaggtgccacctggtgctcgatatgacccgctcttccccaatggcccgagggatggcggccggcgaccaggaggcggcaatggtccctttggcggaggtggtggcttcggcggattcggaggagatattatctga

SEQ ID NO: 9301 - protein, 373 aa, Muscodor strobelii
  misc_feature: SGI Peptide ID NO. 562901
  misc_feature (273)..(342): Pfam Id: PF08577 Pfam Desc: PI31 proteasome regulator
  misc_feature (273)..(339): Pfam Id: PF08577 Pfam Desc: PI31 proteasome regulator
  misc_feature (1)..(340): NCBI GI: 156032784 Blast Desc: SS1G_13797 [Sclerotinia sclerotiorum 1980] gi|154699200|gb|EDN98938.1| SS1G_13797 [Sclerotinia sclerotiorum 1980]
  misc_feature (2)..(351): NCBI GI: 39952101 Blast Desc: MGG_01693 [Magnaporthe grisea 70-15] gi|145020465|gb|EDK04594.1| MGG_01693 [Magnaporthe grisea 70-15]
  misc_feature (1)..(344): NCBI GI: 164424995 Blast Desc: NCU06576 [Neurospora crassa OR74A] gi|157070745|gb|EAA32700.2| NCU06576 [Neurospora crassa OR74A]
  misc_feature (1)..(340): NCBI GI: 154301690 Blast Desc: BC1G_10172 [Botryotinia fuckeliana B05.10] gi|150855834|gb|EDN31026.1| BC1G_10172 [Botryotinia fuckeliana B05.10]
  misc_feature (1)..(344): NCBI GI: 171691006 Blast Desc: protein product [Podospora anserina] gi|170945451|emb|CAP71563.1| protein product [Podospora anserina]
  misc_feature (4)..(340): NCBI GI: 261354946 Blast Desc: conserved [Verticillium albo-atrum VaMs.102]
  misc_feature (4)..(358): NCBI GI: 46121795 Blast Desc: FG05275.1 [Gibberella zeae PH-1]
  misc_feature (4)..(373): NCBI GI: 256727389 Blast Desc: NECHADRAFT_90823 [Nectria haematococca mpVI 77-13-4]
  misc_feature (6)..(342): NCBI GI: 258572644 Blast Desc: [Uncinocarpus reesii 1704] gi|237905354|gb|EEP79755.1| [Uncinocarpus reesii 1704]
  misc_feature (2)..(340): NCBI GI: 226278513 Blast Desc: conserved [Paracoccidioides brasiliensis Pb01]
MAPNPLSSSTVLQSMADALSTHEPNDTTSDLASSHEALALFVHGCMANLGFRLLGFDEDKPDEARCHELAPRLPPNWNASFNTYAFIYAHQQSALRFVIKIDRMGGKAEIRGLAVQDERIARLEVVIKDYVSNAALPIRITITDGAEDRSDLRQKISDAFISESRVLDLATLIKVNIIQKLLPSLQKEGYEESPDDRAVRDDADASARRPPRQPVMPDPMPQPAHPYPHADPLRPIPSRPVPAGDFPPPGFDDPYDLNRPRVPLPSGLTPFGNIGADDLNPPGLGPHDPLRPGLGIGGGLPRPGGRGMHPTFDDPLFGGDGGMRGDYDPQVPPGARYDPLFPNGPRDGGRRPGGGNGPFGGGGGFGGFGGDII

SEQ ID NO: 9302 - DNA, 2810 bp, Muscodor strobelii
  misc_feature: SGI EST ID NO. CUFF.22130.1
  misc_feature: Variant of the nucleotide sequence at SEQ ID NO 9300
cgaaactatagggagggcggtcgggaggcagcagcatgatgacacaaccttatttggggaagagcaaatacctaataaaaggtaggtgtgtttctccgtaaggtgggcggtacaaatgcatatatcgaaaacatatcctttgattgattttcagacaactctggtcggagctatcatcagcctgaaatacctcgcgaatatcatcaatccttctccccattacgacttgtaatcaatacaggatcaattctccatcaaacaacatccacggcgagtgacctgtccatcagtagcgatggcgccaaatccgctgagctcctcgactgtcctgcagtcgatggctgatgccttgtcaacgcatgagcccaacgacaccacctcagatcttgccagctcccatgaagcactggccttattcgtccatggctgcatggctaacctgggcttccgcttgctcgggttcgacgaagacaagccagacgaagcgcgatgccatgagctagctccacgtctcccgcccaactggaacgcatcgttcaatacatatgccttcatctatgcccaccagcagtctgctcttcgtttcgtcatcaaaatcgatcgcatgggtggcaaggccgagatccgcggcttggctgtccaagacgagcgcatcgcgcgccttgaggtggtgatcaaagattatgtctctaacgctgctcttcctattcgcatcaccataaccgacggcgcagaggatcgatccgacctgcgacaaaagatctcagatgctttcatctcggaaagccgcgtcttggacctcgcgaccctcatcaaagtcaatatcatccagaagcttctgccctcgctgcagaaggagggctacgaggagtcaccagacgaccgcgccgtccgcgacgacgccgacgcctccgcacgtagaccaccacgacagcctgtcatgcctgaccccatgccccagccggcgcacccttacccacacgccgatcccctacgtccgataccaagtcggccggtgcctgctggagacttcccgccgccgggcttcgacgacccttacgatctcaaccgccctcgagtgccgctcccgtctggcctcacgccatttgggaatattggagcagatgatctcaacccacccgggcttgggccgcacgatcctcttcgccctggattgggcattgggggaggcttacctcgacctggtggccgaggaatgcacccaacatttgacgaccccttgttcggcggcgatggggggatgagaggagactatgacccacaggtgccacctggtgctcgatatgacccgctcttccccaatggcccgagggatggcggccggcgaccaggaggcggcaatggtccctttggcggaggtggtggcttcggcggattcggaggagatattatctgatcaggacaatggaactgaagaatggctttttgcttgtgatgtgttatgaatcaatgaatgtacaattatgtatccttatcctgttcaaaaataataccttgccattagttgatcattgcatacttctttcgggatcataatctgcgccttctgaactggaagtaaagatcgatcaggagctcgacgctgtagacgtagacagttcaatctttgctttgctctcttcaacccagcactcgaagaatagagggccggcttctatggcacgaacaggagttgtcttggcgccgcccaggtctgcgccagcctttcgttggcccatcgaggcgggttggagcgttggtttggtgggcatccagggctgtggttgcttcattggcgcctcggccttgtctctcagctcgatggccagagtatatgtgcaacccttgggcaaaggtgcgatcttctctccagcatacgcgagccgtcgtagagcggcccgaagctgctcctcaacatcagtccagttgatctcttcgctgacctcttcgtcaggtctaggcctgactccttcttttcttctcccctgatctccgccttcgccctcttcttcgtcatcttcagtgtcttcagtggcgtcatttccgtcctcgtcgtcatcttcgccgccagtatcgtctccgttgttctcatctccgtctgctgcattctgctttcctttctggtctccctccttgacaccctcctctacttgctcaatgtcttcgtctgatgtgccatttcctccctccccctcttcacctccctctctggtgggattcaatttccttttcttcggcttgacaagaccattccaagcagggaaactagcaatgtcgaacatccagcgctctaacaccacgttcttggcgtcatatatgacaatgactaagcgctcgacggcgccttgtgctatctgggcctgcgctgcgtcgacggcgtcgcggatccaagcacatactgtgggatgtcgacattggttcacgggtgtattgtaggcgcgggcttttatgaaggctctgtctgggtatatgcgcctgtagaaaagtacgttgtggatgcagaccgtgaagaagtgtgaaaaagtggccaggagctgatgtgcttcttggcttggcagagactgattgtctttcgcctttgaaattggccctgggtctgtgcccaatggcttggacattgtcactagcttatgacaacctacgagcccaataagtcaacagggtatttcactttgaaagattcagttggggtgagaaatgcttgaatcctttgggagcagtagagattgccgtaggcagcatgtgtgcttaggtagtgcagcgggagacgcgttgaggggcacagagcatgcgcgttagaagacgccagc

SEQ ID NO: 9303 - DNA, 963 bp, Muscodor strobelii
  misc_feature: SGI cDNA ID NO. 562902
  misc_feature: Encodes the peptide sequence at SEQ ID NO 9304
atgcctgggctcccttcctccgtcgacctcgacgagtgcatctcgactttgtacaagagggaactccttgccgagtccgttatcgaggcgatatgtgccaaggcaaaagagctgctgatgcgcgagagcaacgtcgtccacgtccgcgcccccgtgacggttgttggcgacatccacggccagttctacgatctcatcgaaatcttcaagatcggcggatactgtccagacacaaactacctcttcttgggcgactatgtcgaccgaggcatgttcagcgtcgaaaccatctcgctcctcgtctgtttaaaacttcgatatccaaaccgtatacatctcatccgcggcaatcacgagtcgcgaggcgtcacacagtcgtacggcttctacacggaatgcgcgcgcaagtacggcaacgccaacgtctggcactactttaccgacatgttcgatttcctcaccttgtctgtcgtcatcaacgatcaaatcttttgcgtacacggcggcctgtcgccctcgattcatagcatagaccagatcaaaatcattgatcgcttccgagagatcccacatgagggtcccatggccgatctcgtctggtcagatccagatcctgagcgcgacgaattttcactgtcgccaagaggtgcaggctacaccttcggtgcgcgcgtcgtcaaaaagttcctcgctgtaaatggcatgaaccacatattgcgcgcccaccagctatgccaagaaggctatttagtactgtacgacgatcatctcagcacggtctggagcgcgccaaattactgttatcgatgcggtaatatggcgagtgttctcgaagtcagcgacactggcgagcggcacttcaatgttttcgccgccgcacccgagaatgaccaacacaaggacatacagcagactggcgagaaagcagccgatggcaattcgctacctgattacttcctgtag

SEQ ID NO: 9304 - protein, 320 aa, Muscodor strobelii
  misc_feature: SGI Peptide ID NO. 562902
  misc_feature (50)..(246): Pfam Id: PF00149 Pfam Desc: Calcineurin-like phosphoesterase
  misc_feature (1)..(320): NCBI GI: 164424986 Blast Desc: serine/threonine-protein phosphatase PP2A catalytic subunit [Neurospora crassa OR74A] gi|157070741|gb|EAA33034.2| serine/threonine-protein phosphatase PP2A catalytic subunit
  misc_feature (1)..(320): NCBI GI: 154292025 Blast Desc: BC1G_14387 [Botryotinia fuckeliana B05.10] gi|150846304|gb|EDN21497.1| BC1G_14387 [Botryotinia fuckeliana B05.10]
  misc_feature (1)..(320): NCBI GI: 170940130 Blast Desc: protein product [Podospora anserina]
  misc_feature (1)..(320): NCBI GI: 225558339 Blast Desc: serine/threonine phosphatase [Ajellomyces capsulatus G186AR]
  misc_feature (1)..(320): NCBI GI: 154286052 Blast Desc: serine/threonine-protein phosphatase 4 catalytic subunit [Ajellomyces capsulatus NAm1] gi|150407462|gb|EDN03003.1| serine/threonine-protein phosphatase 4 catalytic subunit NAm1]
  misc_feature (1)..(320): NCBI GI: 240274767 Blast Desc: serine/threonine protein phosphatase [Ajellomyces capsulatus H143]
  misc_feature (1)..(320): NCBI GI: 261201840 Blast Desc: serine/threonine-protein phosphatase 4 catalytic subunit [Ajellomyces dermatitidis SLH14081] gi|239590231|gb|EEQ72812.1| serine/threonine-protein phosphatase
  misc_feature (22)..(320): NCBI GI: 46121807 Blast Desc: FG05281.1 [Gibberella zeae PH-1]
  misc_feature (1)..(320): NCBI GI: 242762615 Blast Desc: Ser/Thr protein phosphatase [Talaromyces stipitatus ATCC 10500] gi|218723609|gb|EED23026.1| Ser/Thr protein phosphatase [Talaromyces stipitatus ATCC 10500]
  misc_feature (1)..(320): NCBI GI: 145255289 Blast Desc: An18g04600 [Aspergillus niger] gi|134084509|emb|CAK43262.1| protein product [Aspergillus niger]
  misc_feature (8)..(297): SWISSPROT Homolog: EC 3.1.3.16 Phosphoprotein phosphatase
MPGLPSSVDLDECISTLYKRELLAESVIEAICAKAKELLMRESNVVHVRAPVTVVGDIHGQFYDLIEIFKIGGYCPDTNYLFLGDYVDRGMFSVETISLLVCLKLRYPNRIHLIRGNHESRGVTQSYGFYTECARKYGNANVWHYFTDMFDFLTLSVVINDQIFCVHGGLSPSIHSIDQIKIIDRFREIPHEGPMADLVWSDPDPERDEFSLSPRGAGYTFGARVVKKFLAVNGMNHILRAHQLCQEGYLVLYDDHLSTVWSAPNYCYRCGNMASVLEVSDTGERHFNVFAAAPENDQHKDIQQTGEKAADGNSLPDYFL

SEQ ID NO: 9305 - DNA, 2188 bp, Muscodor strobelii
  misc_feature: SGI EST ID NO. CUFF.22154.0
  misc_feature: Variant of the nucleotide sequence at SEQ ID NO 9303
caggactcgataagatgtttgctctagtcattcgtccttcgctatgccacgcggtctagcacgctgtacagtagacggtagctgagcttaccgtccgtttatttttcacatgatactgcatcgttaatgttatcacacccagggcattaccaagcattctccttggcccgtcactccccgtcgctcgcctcactcgcccaatcaatacaccgacgtccccattagtcacccaccaacaccctcccgaacccacgccgactcgatgtgagagctcgcgacaactgcttctctgaccctgcaccgttgaacatgtttacggatcctcccaggtcctccctactcgatttcgtatttgctcgaagtcgacggaagcccagccagcccgagagctgaggacaagaggcacgcccaccgcctatccacagcccctgacttcttcaaacccctctacgtcatccgcaacactcgaacaactatgcctgggctcccttgtgagtataccctcagccctcctgtagtccagggcttcgtattcgactatcgtctttctctgtgagggcagtcatgaatgcgactgaagctgacccgtgctgccctattgcctcgcagcctccgtcgacctcgacgagtgcatctcgactttgtacaagagggaactccttgccgagtccgttatcgaggcgatatgtgccaaggcaaaagagctgctgatgcgcgagagcaacgtcgtccacgtccgcgcccccgtgacggttgttggcgacatccacggccagttctacgatctcatcgaaatcttcaagatcggcggatactgtccagacacaaactacctcttcttgggcgactatgtcgaccgaggcatgttcagcgtcgaaaccatctcgctcctcgtctgtttaaaacttcgatatccaaaccgtatacatctcatccgcggcaatcacgagtcgcgaggcgtcacacagtcgtacggcttctacacggaatgcgcgcgcaagtacggcaacgccaacgtctggcactactttaccgacatgttcgatttcctcaccttgtctgtcgtcatcaacgatcaaatcttttgcgtacacggcggcctgtcgccctcgattcatagcatagaccagatcaaaatcattgatcgcttccgagagatcccacatgagggtcccatggccgatctcgtctggtcagatccagatcctgagcgcgacgaattttcactgtcgccaagaggtgcaggctacaccttcggtgcgcgcgtcgtcaaaaagttcctcgctgtaaatggcatgaaccacatattgcgcgcccaccagctatgccaagaaggctatttagtactgtacgacgatcatctcagcacggtctggagcgcgccaaattactgttatcgatgcggtaatatggcgagtgttctcgaagtcagcgacactggcgagcggcacttcaatgttttcgccgccgcacccgagaatgaccaacacaaggacatacagcagactggcgagaaagcagccgatggcaattcgctacctgattacttcctgtaggagaagggagagcgcccaagccaggaaaacgtcggtacaagccagcctcggactcggcctaagactcggccacggactcgatctcgacctcgagcggatgctctctccgctgcagccaacgaagcaatagtttcgatgcgagcctttttgctgggcttggagagtgccgaacatagtcacgttggcggcgcgtcgggccgccaaagtagattagaagtccgcgactcgtcagaacccgaagccaaagatgaagatgaagatgtatgggaagacgtcgacgatgacgacgatgatgacgacgagaacgaaattgaagattcaaacgagaacaaggacgaagccacaaatgccgtcgaagacgaacccagcgacgaggaagcggtcgggtcaataaccctatccgtgtccccagtatatacttttgaacaagaacccatcgagaccgccttccaaaccgatatagagagcgaggttccggatgggaaccagcatgagcatgagcatggatcgagtacacttagaacttgaatgtgtttcgtcctgttgtagagattcaacgcattgttggcttgtatgtatagtacgatcaaataacaccaagcgataccccttcttttcaaatggaagtctca

SEQ ID NO: 9306 - DNA, 393 bp, Muscodor strobelii
  misc_feature: SGI cDNA ID NO. 562903
  misc_feature: Encodes the peptide sequence at SEQ ID NO 9307
atgcgagcctttttgctgggcttggagagtgccgaacatagtcacgttggcggcgcgtcgggccgccaaagtagattagaagtccgcgactcgtcagaacccgaagccaaagatgaagatgaagatgtatgggaagacgtcgacgatgacgacgatgatgacgacgagaacgaaattgaagattcaaacgagaacaaggacgaagccacaaatgccgtcgaagacgaacccagcgacgaggaagcggtcgggtcaataaccctatccgtgtccccagtatatacttttgaacaagaacccatcgagaccgccttccaaaccgatatagagagcgaggttccggatgggaaccagcatgagcatgagcatggatcgagtacacttagaacttga

SEQ ID NO: 9307 - protein, 130 aa, Muscodor strobelii
  misc_feature: SGI Peptide ID NO. 562903
MRAFLLGLESAEHSHVGGASGRQSRLEVRDSSEPEAKDEDEDVWEDVDDDDDDDDENEIEDSNENKDEATNAVEDEPSDEEAVGSITLSVSPVYTFEQEPIETAFQTDIESEVPDGNQHEHEHGSSTLRT

SEQ ID NO: 9308 - DNA, 2188 bp, Muscodor strobelii; identical to SEQ ID NO: 9305
  misc_feature: SGI EST ID NO. CUFF.22154.0
  misc_feature: Variant of the nucleotide sequence at SEQ ID NO 9306

SEQ ID NO: 9309 - DNA, 1311 bp, Muscodor strobelii
  misc_feature: SGI cDNA ID NO. 562904
  misc_feature: Reduced expression when VOC is produced
  misc_feature: Encodes the peptide sequence at SEQ ID NO 9310
atgcctgggctcccttcctccgtcgacctcgacgagtgcatctcgactttgtacaagagggaactccttgccgagtccgttatcgaggcgatatgtgccaaggcaaaagagctgctgatgcgcgagagcaacgtcgtccacgtccgcgcccccgtgacggttgttggcgacatccacggccagttctacgatctcatcgaaatcttcaagatcggcggatactgtccagacacaaactacctcttcttgggcgactatgtcgaccgaggcatgttcagcgtcgaaaccatctcgctcctcgtctgtttaaaacttcgatatccaaaccgtatacatctcatccgcggcaatcacgagtcgcgaggcgtcacacagtcgtacggcttctacacggaatgcgcgcgcaagtacggcaacgccaacgtctggcactactttaccgacatgttcgatttcctcaccttgtctgtcgtcatcaacgatcaaatcttttgcgtacacggcggcctgtcgccctcgattcatagcatagaccagatcaaaatcattgatcgcttccgagagatcccacatgagggtcccatggccgatctcgtctggtcagatccagatcctgagcgcgacgaattttcactgtcgccaagaggtgcaggctacaccttcggtgcgcgcgtcgtcaaaaagttcctcgctgtaaatggcatgaaccacatattgcgcgcccaccagctatgccaagaaggctatttagtactgtacgacgatcatctcagcacggtctggagcgcgccaaattactgttatcgatgcggtaatatggcgagtgttctcgaagtcagcgacactggcgagcggcacttcaatgttttcgccgccgcacccgagaatgaccaacacaaggacatacagcagactggcgagaaagcagccgatggcaattcgctacctgattacttccttcacgttggcggcgcgtcgggccgccaaagtagattagaagtccgcgactcgtcagaacccgaagccaaagatgaagatgaagatgtatgggaagacgtcgacgatgacgacgatgatgacgacgagaacgaaattgaagattcaaacgagaacaaggacgaagccacaaatgccgtcgaagacgaacccagcgacgaggaagcggtcgggtcaataaccctatccgtgtccccagtatatacttttgaacaagaacccatcgagaccgccttccaaaccgatatagagagcgaggttccggatgggaaccagcatgagcatgagcatggatcgagtacacttagaacttga

SEQ ID NO: 9310 - protein, 436 aa, Muscodor strobelii
  misc_feature: SGI Peptide ID NO. 562904
  misc_feature (50)..(246): Pfam Id: PF00149 Pfam Desc: Calcineurin-like phosphoesterase
  misc_feature (1)..(320): NCBI GI: 164424986 Blast Desc: serine/threonine-protein phosphatase PP2A catalytic subunit [Neurospora crassa OR74A] gi|157070741|gb|EAA33034.2| serine/threonine-protein phosphatase PP2A catalytic subunit
  misc_feature (1)..(320): NCBI GI: 154292025 Blast Desc: BC1G_14387 [Botryotinia fuckeliana B05.10] gi|150846304|gb|EDN21497.1| BC1G_14387 [Botryotinia fuckeliana B05.10]
  misc_feature (1)..(320): NCBI GI: 170940130 Blast Desc: protein product [Podospora anserina]
  misc_feature (1)..(320): NCBI GI: 225558339 Blast Desc: serine/threonine phosphatase [Ajellomyces capsulatus G186AR]
  misc_feature (1)..(320): NCBI GI: 154286052 Blast Desc: serine/threonine-protein phosphatase 4 catalytic subunit [Ajellomyces capsulatus NAm1] gi|150407462|gb|EDN03003.1| serine/threonine-protein phosphatase 4 catalytic subunit NAm1]
  misc_feature (1)..(320): NCBI GI: 240274767 Blast Desc: serine/threonine protein phosphatase [Ajellomyces capsulatus H143]
  misc_feature (22)..(320): NCBI GI: 46121807 Blast Desc: FG05281.1 [Gibberella zeae PH-1]
  misc_feature (1)..(320): NCBI GI: 261201840 Blast Desc: serine/threonine-protein phosphatase 4 catalytic subunit [Ajellomyces dermatitidis SLH14081] gi|239590231|gb|EEQ72812.1| serine/threonine-protein phosphatase
  misc_feature (1)..(320): NCBI GI: 242762615 Blast Desc: Ser/Thr protein phosphatase [Talaromyces stipitatus ATCC 10500] gi|218723609|gb|EED23026.1| Ser/Thr protein phosphatase [Talaromyces stipitatus ATCC 10500]
  misc_feature (1)..(320): NCBI GI: 145255289 Blast Desc: An18g04600 [Aspergillus niger] gi|134084509|emb|CAK43262.1| protein product [Aspergillus niger]
  misc_feature (8)..(297): SWISSPROT Homolog: EC 3.1.3.16 Phosphoprotein phosphatase
  misc_feature: Useful for introducing or modulating the production of volatile compounds
MPGLPSSVDLDECISTLYKRELLAESVIEAICAKAKELLMRESNVVHVRAPVTVVGDIHGQFYDLIEIFKIGGYCPDTNYLFLGDYVDRGMFSVETISLLVCLKLRYPNRIHLIRGNHESRGVTQSYGFYTECARKYGNANVWHYFTDMFDFLTLSVVINDQIFCVHGGLSPSIHSIDQIKIIDRFREIPHEGPMADLVWSDPDPERDEFSLSPRGAGYTFGARVVKKFLAVNGMNHILRAHQLCQEGYLVLYDDHLSTVWSAPNYCYRCGNMASVLEVSDTGERHFNVFAAAPENDQHKDIQQTGEKAADGNSLPDYFLHVGGASGRQSRLEVRDSSEPEAKDEDEDVWEDVDDDDDDDDENEIEDSNENKDEATNAVEDEPSDEEAVGSITLSVSPVYTFEQEPIETAFQTDIESEVPDGNQHEHEHGSSTLRT

SEQ ID NO: 9311 - DNA, 2188 bp, Muscodor strobelii; identical to SEQ ID NO: 9305
  misc_feature: SGI EST ID NO. CUFF.22154.0
  misc_feature: Variant of the nucleotide sequence at SEQ ID NO 9309

SEQ ID NO: 9312 - DNA, 1326 bp, Muscodor strobelii
  misc_feature: SGI cDNA ID NO. 562905
  misc_feature: Encodes the peptide sequence at SEQ ID NO 9313
atggcttcacacgacgagaacgaccatctccccgaggagactcagggctacaagctctctcaacccaagcagagtctcgctgagtaccagaacatggcgttcaaagacgatcagggcaagccattcgattccactgctgtccgaggtgcctctcaacctcaaggcaatcatgaaggaggtgatagacctttgagcatatgcacactcgccagtaccgacttggtggcttcttggttgcgtgaacaggagaccgcaggcgcctcaactcctccacccaaccccatcgccaatgtgactgctgcttacccatctgtctgtcgtgatatctacagaacccccaccccaactggatatctaagagaacatctcaactctaagcctctgccaaaaactcccaaaacacccaaaacaccccgccgctttctttccagcttgactttgcgctcgacagtggcaatccgcactggcacccgacgctcatcctcctctgtctcggtcaccacctctagcagcggtcttgacccctttatgacttgtaaaggcaatcctgccttcatgaacactcctgaggaggaaaagtgcatcactattgtcaaacactcgattcctacttccaacccaactccttcgcaagctactctgcaagaggaggaagaggaagatgaaatggaggatatcattgcttatctgaagaaaacgcggatttctactgttgacaagaaggatgtgaagaagattgacattgccaagaagaatgttcggaacattgaaattgctgatcagaatattgagaagattgaggttgctaagaagtctgatacagatgcgaacgacgagtcacttcagcgatacaagcaatctctgggtctcggcggtggcaaggatctctctgatcccagtgatccccgcgtcgcgatcatccagtcactgaccatggagtctcccggccgccctcccgtcaccatcgatttgtctcagcctggcagcgagaacacgctcaaagacaagccattcaaaatcaaggaaggttccaagttcaccatggttgcttccttccgagttcagcacgaaatcttgagcggtcttcagtatgttcaggttgttaaacgcaagggaatcaaggtcagcaaggactctgagatgttgggtagctacgctcctaacaccgacaagcagccggtctataccaagcgtttccaagaggaggatgcgccctctggcatgctcgcccgtggccactacaacgctatctcgtcctttgttgatgacgacaagaagaaccaccttcagttcgagtggagcttcgacattgccaaggattggtaa

SEQ ID NO: 9313 - protein, 441 aa, Muscodor strobelii
  misc_feature: SGI Peptide ID NO. 562905
  misc_feature (235)..(441): Pfam Id: PF02115 Pfam Desc: RHO protein GDP dissociation inhibitor
  misc_feature (275)..(441): Pfam Id: PF02115 Pfam Desc: RHO protein GDP dissociation inhibitor
  misc_feature (260)..(441): NCBI GI: 145613389 Blast Desc: MGG_01689 [Magnaporthe grisea 70-15] gi|145020470|gb|EDK04599.1| MGG_01689 [Magnaporthe grisea 70-15]
  misc_feature (265)..(441): NCBI GI: 46121809 Blast Desc: FG05282.1 [Gibberella zeae PH-1]
  misc_feature (265)..(441): NCBI GI: 256726817 Blast Desc: [Nectria haematococca mpVI 77-13-4]
  misc_feature (265)..(441): NCBI GI: 164424984 Blast Desc: NCU06561 [Neurospora crassa OR74A] gi|157070740|gb|EAA33032.2| NCU06561 [Neurospora crassa OR74A]
  misc_feature (265)..(441): NCBI GI: 170940129 Blast Desc: protein product [Podospora anserina]
  misc_feature (264)..(441): NCBI GI: 119174320 Blast Desc: CIMG_09142 [Coccidioides immitis RS]
  misc_feature (264)..(441): NCBI GI: 240106775 Blast Desc: RHO protein GDP dissociation inhibitor containing protein [Coccidioides posadasii C735 delta SOWgp]
  misc_feature (264)..(441): NCBI GI: 156049611 Blast Desc: SS1G_08512 [Sclerotinia sclerotiorum 1980] gi|154692911|gb|EDN92649.1| SS1G_08512 [Sclerotinia sclerotiorum 1980]
  misc_feature (264)..(441): NCBI GI: 238841193 Blast Desc: rho GDP-dissociation inhibitor [Microsporum canis CBS 113480]
  misc_feature (264)..(441): NCBI GI: 238496081 Blast Desc: rho-gdp dissociation inhibitor [Aspergillus flavus NRRL3357] gi|220694156|gb|EED50500.1| rho-gdp dissociation inhibitor [Aspergillus flavus NRRL3357]
MASHDENDHLPEETQGYKLSQPKQSLAEYQNMAFKDDQGKPFDSTAVRGASQPQGNHEGGDRPLSICTLASTDLVASWLREQETAGASTPPPNPIANVTAAYPSVCRDIYRTPTPTGYLREHLNSKPLPKTPKTPKTPRRFLSSLTLRSTVAIRTGTRRSSSSVSVTTSSSGLDPFMTCKGNPAFMNTPEEEKCITIVKHSIPTSNPTPSQATLQEEEEEDEMEDIIAYLKKTRISTVDKKDVKKIDIAKKNVRNIEIADQNIEKIEVAKKSDTDANDESLQRYKQSLGLGGGKDLSDPSDPRVAIIQSLTMESPGRPPVTIDLSQPGSENTLKDKPFKIKEGSKFTMVASFRVQHEILSGLQYVQVVKRKGIKVSKDSEMLGSYAPNTDKQPVYTKRFQEEDAPSGMLARGHYNAISSFVDDDKKNHLQFEWSFDIAKDW

SEQ ID NO: 9314 - DNA, 1273 bp, Muscodor strobelii
  misc_feature: SGI EST ID NO. CUFF.22197.1
  misc_feature: Variant of the nucleotide sequence at SEQ ID NO 9312
gccgaatataacgtcagtgttcaaaacaacaccgccagtcctggccccttcctctcacttcacatttagaaaatatcgcagaagaagcacttatctctaggtgttcacagatcaacattccggttggtgctaagctttaaatcaccaccgacctcctcatcttgtaatcaataaccgtcagcctctagatcagtgcccgatctgtcatcatggcttcacacgacgagaacgaccatctccccgaggagactcagggctacaagctctctcaacccaagcagagtctcgctgagtaccagaacatggatgcgaacgacgagtcacttcagcgatacaagcaatctctgggtctcggcggtggcaaggatctctctgatcccagtgatccccgcgtcgcgatcatccagtcactgaccatggagtctcccggccgccctcccgtcaccatcgatttgtctcagcctggcagcgagaacacgctcaaagacaagccattcaaaatcaaggaaggttccaagttcaccatggttgcttccttccgagttcagcacgaaatcttgagcggtcttcagtatgttcaggttgttaaacgcaagggaatcaaggtcagcaaggactctgagatgttgggtagctacgctcctaacaccgacaagcagccggtctataccaagcgtttccaagaggaggatgcgccctctggcatgctcgcccgtggccactacaacgctatctcgtcctttgttgatgacgacaagaagaaccaccttcagttcgagtggagcttcgacattgccaaggattggtaaatcgtgcaaccatccagggatcttactttccaagatgagagcttaggaccgacgtttctcatgcaaggacgactttctagaatccttgctttgtgatgcgaatgcaacggatgatagaaaaggctatgatgactggctgagtttgtggataagaagatttcgtgttacgaatttaacgataatcacgataagatgatggattctctacaaatggactaggaaatttcgatgatcaagaaaagaaaagaaggctatgcttgctgtttctcgctctctctttcccacacagtaccttagatagcgccgataccccgtttggcccagaatcaaggtgtcagctgcaatgccagcacctagctatatagccaatacacacaaaagtctgatcggtacgctgcgttcaaaccaatcgatgctaacacgtaatgttgaacctggttagctggtagacaacgctcggcgcc

SEQ ID NO: 9315 - DNA, 612 bp, Muscodor strobelii
  misc_feature: SGI cDNA ID NO. 562906
  misc_feature: Reduced expression when VOC is produced
  misc_feature: Encodes the peptide sequence at SEQ ID NO 9316
atgaagtctctcttcgccttagtggctgtccaagtggcgcttgttactgcaatcgacctgtctggaactttcacggccggcgcctggaggattgcgatgggtactgatatcttcttttttggagatggcatcaatgcaagcggcggtaaattctatgtcaacaatgataccagcacttactgccctgccaacgtcgaaaacctggattgcacattctataatggatctgacacccttttcgtcatcaacaacgagaccgaaactatgtctctgaatgtgtccgtccccggtggtcagcaaataagtactactggtttcgactcagaaaccgggcgacaactgactgttgctcactcagcgtacattccagaaggctctatctcgaccggatttctccgcgagatgagtcaagcgtttggagcaccagtatatctgtacaattcaaacaggccatggtatttatgcccagtgaccgaaggcgaagggacaaacaggacattccaagtttattccgccaacagctatttcgccaacgacacccttgatggttgtcttggtattcagattagaacatatacccctgggcggggtaacgtgtgggagtatgcttag

SEQ ID NO: 9316 - protein, 203 aa, Muscodor strobelii
  misc_feature: SGI Peptide ID NO. 562906
  misc_feature (3)..(186): NCBI GI: 115386540 Blast Desc: ATEG_07125 [Aspergillus terreus NIH2624] gi|114190809|gb|EAU32509.1| ATEG_07125 [Aspergillus terreus NIH2624]
  misc_feature (19)..(186): NCBI GI: 242780675 Blast Desc: IgE-binding protein [Talaromyces stipitatus ATCC 10500] gi|218719793|gb|EED19212.1| IgE-binding protein [Talaromyces stipitatus ATCC 10500]
  misc_feature (44)..(202): NCBI GI: 121703852 Blast Desc: IgE-binding protein, [Aspergillus clavatus NRRL 1] gi|119398334|gb|EAW08764.1| IgE-binding protein, [Aspergillus clavatus NRRL 1]
  misc_feature (44)..(202): NCBI GI: 119467512 Blast Desc: IgE-binding protein, [Neosartorya fischeri NRRL 181] gi|119405714|gb|EAW15665.1| IgE-binding protein, [Neosartorya fischeri NRRL 181]
  misc_feature (44)..(202): NCBI GI: 70984416 Blast Desc: IgE-binding protein [Aspergillus fumigatus Af293] gi|66845348|gb|EAL85683.1| IgE-binding protein, [Aspergillus fumigatus Af293] gi|159122505|gb|EDP47626.1| IgE-binding protein,
  misc_feature (44)..(187): NCBI GI: 169766868 Blast Desc: [Aspergillus oryzae RIB40] gi|238483649|ref|XP_002373063.1| IgE-binding protein [Aspergillus flavus NRRL3357] gi|83765760|dbj|BAE55903.1| protein product
  misc_feature (44)..(202): NCBI GI: 223974759 Blast Desc: [Zea mays]
  misc_feature (22)..(202): NCBI GI: 119467025 Blast Desc: IgE-binding protein [Neosartorya fischeri NRRL 181] gi|119405471|gb|EAW15422.1| IgE-binding protein [Neosartorya fischeri NRRL 181]
  misc_feature (44)..(202): NCBI GI: 145229487 Blast Desc: An01g06280 [Aspergillus niger] gi|134055158|emb|CAK37103.1| protein product [Aspergillus niger]
  misc_feature (22)..(202): NCBI GI: 70981460 Blast Desc: IgE-binding protein [Aspergillus fumigatus Af293] gi|66843881|gb|EAL84222.1| IgE-binding protein [Aspergillus fumigatus Af293] gi|159122734|gb|EDP47855.1| IgE-binding protein
  misc_feature: Useful for introducing or modulating the production of volatile compounds
MKSLFALVAVQVALVTAIDLSGTFTAGAWRIAMGTDIFFFGDGINASGGKFYVNNDTSTYCPANVENLDCTFYNGSDTLFVINNETETMSLNVSVPGGQQISTTGFDSETGRQLTVAHSAYIPEGSISTGFLREMSQAFGAPVYLYNSNRPWYLCPVTEGEGTNRTFQVYSANSYFANDTLDGCLGIQIRTYTPGRGNVWEYA

SEQ ID NO: 9317 - DNA, 362 bp, Muscodor strobelii
  misc_feature: SGI EST ID NO. CUFF.22102.0
  misc_feature: Variant of the nucleotide sequence at SEQ ID NO 9315
gagcctcattacccgtagctgacagtacgtgtatcgacctatcttcgttcatcatgaagtctctcttcgccttagtggctgtccaagtggcgcttgttactgcaatcgacctgtctggaactttcacggccggcgcctggaggattgcgatgggtactgatatcttcttttttggagatggcatcaatgcaagcggcggtaaattctatgtcaacaatgataccagcacttactgccctgccaacgtcgaaaacctggattgcacattctataatggatctgacacccttttcgtcatcaacaacgagaccgaaactatgtctctgaatgtgtccgtccccggtggtcagcaaacttatatt

SEQ ID NO: 9318 - DNA, 933 bp, Muscodor strobelii
  misc_feature: SGI cDNA ID NO. 562907
  misc_feature: Elevated expression when VOC is produced
  misc_feature: Encodes the peptide sequence at SEQ ID NO 9319
atggtgaaagacacgcagacagttattgaagagttcaatgacatagtcaatatgtcagcctcagacctcgaacagtggctcaaggaggaatcatcgcagtcttccggctggagcaaggacgacgaatcgggggaaacaattgggcatgagagcggccgcaaaatcataaagattcccaagaagaatcctcataaagaccccgagaagtataatgaagacgatgtcgagcatatgcgatgcgtggtcgcgtattcgcctcatttccatgacgatatctgttcctacgacatgggaaacttagatgatctaccgacggagatcctcatacaggtcctgcaggatgtcagcgtaatcgacctccaatgcataattctcggtcaacgtgtgaaccgccgatttcgggacatcatccacgatgctgtcttataccatcaatctcctgaggaaatagggcacaaagaagtcaacctcaaccaaacgcagagagaatgggtcgatctcttcttgcgaaagaattttggcgcgctcttcatggtgggcgaagtctcaccgcatagccggacatctcttgcggatacaaatggccttgcgcaatggggcatgacgttgaagcgcctacaacgcgcacttcggggcgacgtggctttacaatttcgacgccttccatgggtatgtcttcgccaaacgagagacgtcttcttgcgctctgatgcttcgtggcgcaacttgagtccgacacttgttcacggaccacgcatatccagactggatattatttggcaatcacatgttccttggttgggtagaaactttgtgtcctatgcccaagtagagatacctgcatctggactgactctcgaactgctctacaacctgttgtggagcgaggaattgcatactgggggacatggacagacaccggaatgtaagtaa

SEQ ID NO: 9319 - protein, 310 aa, Muscodor strobelii
  misc_feature: SGI Peptide ID NO. 562907
  misc_feature (1)..(84): NCBI GI: 259485154 Blast Desc: TPA: conserved [Aspergillus nidulans FGSC A4]
  misc_feature (1)..(84): NCBI GI: 146324542 Blast Desc: conserved [Aspergillus fumigatus Af293] gi|129557298|gb|EAL89224.2| conserved [Aspergillus fumigatus Af293]
  misc_feature (2)..(84): NCBI GI: 256728870 Blast Desc: NECHADRAFT_40374 [Nectria haematococca mpVI 77-13-4]
  misc_feature (2)..(107): NCBI GI: 46138823 Blast Desc: FG10926.1 [Gibberella zeae PH-1]
  misc_feature (1)..(84): NCBI GI: 121700342 Blast Desc: conserved [Aspergillus clavatus NRRL 1] gi|119396578|gb|EAW07010.1| conserved [Aspergillus clavatus NRRL 1]
  misc_feature (1)..(84): NCBI GI: 115390242 Blast Desc: conserved [Aspergillus terreus NIH2624] gi|114195022|gb|EAU36722.1| conserved [Aspergillus terreus NIH2624]
  misc_feature (1)..(85): NCBI GI: 71021929 Blast Desc: UM05048.1 [Ustilago maydis 521] gi|46100675|gb|EAK85908.1| UM05048.1 [Ustilago maydis 521]
  misc_feature (1)..(84): NCBI GI: 169784938 Blast Desc: [Aspergillus oryzae RIB40] gi|238507826|ref|XP_002385114.1| conserved [Aspergillus flavus NRRL3357] gi|83775677|dbj|BAE65797.1| protein product oryzae]
  misc_feature (1)..(84): NCBI GI: 119473177 Blast Desc: NFIA_059840 [Neosartorya fischeri NRRL 181] gi|119406678|gb|EAW16629.1| conserved [Neosartorya fischeri NRRL 181]
  misc_feature (5)..(84): NCBI GI: 171693543 Blast Desc: protein product [Podospora anserina] gi|170946720|emb|CAP73523.1| protein product [Podospora anserina]
  misc_feature: Useful for introducing or modulating the production of volatile compounds
MVKDTQTVIEEFNDIVNMSASDLEQWLKEESSQSSGWSKDDESGETIGHESGRKIIKIPKKNPHKDPEKYNEDDVEHMRCVVAYSPHFHDDICSYDMGNLDDLPTEILIQVLQDVSVIDLQCIILGQRVNRRFRDIIHDAVLYHQSPEEIGHKEVNLNQTQREWVDLFLRKNFGALFMVGEVSPHSRTSLADTNGLAQWGMTLKRLQRALRGDVALQFRRLPWVCLRQTRDVFLRSDASWRNLSPTLVHGPRISRLDIIWQSHVPWLGRNFVSYAQVEIPASGLTLELLYNLLWSEELHTGGHGQTPECK

SEQ ID NO: 9320 - DNA, 1928 bp, Muscodor strobelii
  misc_feature: SGI EST ID NO. CUFF.22111.0
  misc_feature: Variant of the nucleotide sequence at SEQ ID NO 9318
atcaattaatacaaattgatctccaagttccactctcagtgctcacttttaataaaccagcgcctcatttccatgacgatatctgttcctacgacatgggaaacttagatgatctaccgacggagatcctcatacaggtcctgcaggatgtcagcgtaatcgacctccaatgcataattctcggtcaacgtgtgaaccgccgatttcgggacatcatccacgatgctgtcttataccatcaatctcctgaggaaatagggcacaaagaagtcaacctcaaccaaacgcagagagaatgggtcgatctcttcttgcgaaagaattttggcgcgctcttcatggtgggcgaagtctcaccgcatagccggacatctcttgcggatacaaatggccttgcgcaatggggcatgacgttgaagcgcctacaacgcgcacttcggggcgacgtggctttacaatttcgacgccttccatgggtatgtcttcgccaaacgagagacgtcttcttgcgctctgatgcttcgtggcgcaacttgagtccgacacttgttcacggaccacgcatatccagactggatattatttggcaatcacatgttccttggttgggtagaaactttgtgtcctatgcccaagtagagatacctgcatctggactgactctcgaactgctctacaacctgttgtggagcgaggaattgcatactgggggacatggacagacaccggaatgtaagtaaatctcatctgtcaactatcaaaaactggccctttgtcttaaaacctgcggccccgcgaacaagtcgtaaaaaattactaacccaatacctttctggctaccagatggggttacgatggagtggcagtttcttttcggccaaagtgttcggaattttgatgaaataaggcgacttggtctgcaccattcgcttggcagctatctctttccagaggctgaacgttaccgctctgcctttcttgaacacaatgtgaggcagaaatggtgtggcgacgactggacttatacactgaagcatgaggctgacgcagccattttgtatctcgaggggggcgatgtagaaccatcttaccctcgaactggtcccggggactacgagtggacgccgagtcacttaggggcagagccagtctttcgatattggcaaggctgtctcgccaatgaccattgagaggtcccaggaaaacctcctgtgggaatattcgtagcagatatctcctgacttgatatttccatttcgggggaattatcaaccgcttttagtgattaagttgagcagtggtaatatctgtatctaccaaattatgtatgtagtaacactttcgaaatcttctcggattttctaattcattcccgtagcattatggcaacaacgcacttgtctttcgaaccccagtctttgttacaaattcaactgaatcgatacctttgaacggtctctatgttttcacaacaacaaaattgatatcaagggcccatgggtgctaaaacagtacttaatggtcctgctttgtccatccctgaagtgctttcactgctatccaagtctcctctttgtggaataatcaacaatcaagaaaataaagactcaagcctcaaaatgtccgataatccaagacaacccagttcagcagaccaactctggggcattggtcgatacttgacatcacgtcctggccgacagaatgcccaagatgcacccactgaccctcaacaaacaaaccctcagcgacgaaacacagacaacggagccacaagccgcaccagaacaatcgatggtacctgggttccggcttggttgccatatctctctaacgaaggtaagcctcttccaggaatcgagtttaaagtcgattgcactatttgttggaatcccatccccgttgccgggaacaattggcaacacgag

SEQ ID NO: 9321 - DNA, 1344 bp, Muscodor strobelii
  misc_feature: SGI cDNA ID NO. 562908
  misc_feature: Encodes the peptide sequence at SEQ ID NO 9322
atggccgctgctttcgaaactctatatcgaaaccctgaagacttcatccgtcggatctggtttcaagacccacaagccgctcttatcggcggcgcgcctcacgtcaatatacaagatgataacacaatacgaggcttcgaaagtgtgatgaacgcacaggagagtgactttcggcggtacgcaagtcaacttagaccaatcatacaacttcaagatccaaacgatgctctagagcaactatgcagcgtagtcggaatcgttaagcagcacttcaccagctctcaggatgagattgtgggaagagtcgcggagagattccagatccgtggacagcaggtgcttgagcgaaaacaagacatccagaatgccatcaatctcgcaacacaaatttggttacaattacgcttcatcaccggaacagccgacgcaatacctggcgaagggccgtattaccgacatgatgaagaccagagacagcaacaaggggctcagacaatcgaggaggcgtttgtatcaaatttggatagggaagaatatccgaacgaaagaaagttttcgactttgttcaacttcgccgcaatgtcaaagctcagctctattgagatagtccctacaaacaatctcttggatcacctgtcgattcgacaaattggattcacggtcacagtatctgtctttagtcacgggtccattctacagcatcacattcatcatgcggcagaacaaaagcccgggttatacagagaccttgcaattgagacactagacacgctccacctcctcgtcgacccaaaagacacgactttcagcaaacacccacaagaacgccttttcgaccaaacctgccggaacgtcctaaggcctcgcaaaataaaataccaagtaaaacactacaagttctggaggaagcgcctcctggatctcgaagccgaatacgccaaatccttcccccgcacccttagcgggtggtggcacaaccgacgggatagagaggcgtgggtgactttttggatcgctttcatagcgggcatcctcgcgcttcttgggctgtttctagccatactgtccctcgcgtattcggtcttcattgggcagctgtccctacagcaggcaatactggcgaatgcgtacgccagcaatgcgagcgcggctgatgtggttgggacttcatctaatgagcctacgcagactggctacgtgaccacgacaactacggcggcgcagaacgatgtgtcgtacgtcacgaattgttatagtgctgcctgttatttctatggtgttggcaacactacgtcggttgacagtacgcagacgttggctctgcgccctgagaagcctacctaa

SEQ ID NO: 9322 - protein, 447 aa, Muscodor strobelii
  misc_feature: SGI Peptide ID NO. 562908
  misc_feature (184)..(354): NCBI GI: 238508650 Blast Desc: conserved [Aspergillus flavus NRRL3357] gi|220688404|gb|EED44757.1| conserved [Aspergillus flavus NRRL3357]
  misc_feature (111)..(362): NCBI GI: 169601684 Blast Desc: SNOG_03713 [Phaeosphaeria nodorum SN15] gi|160705991|gb|EAT88918.2| SNOG_03713 [Phaeosphaeria nodorum SN15]
  misc_feature (184)..(362): NCBI GI: 189199848 Blast Desc: conserved [Pyrenophora tritici-repentis Pt-1C-BFP] gi|187983360|gb|EDU48848.1| conserved [Pyrenophora tritici-repentis Pt-1C-BFP]
  misc_feature (187)..(356): NCBI GI: 256734970 Blast Desc: NECHADRAFT_75762 [Nectria haematococca mpVI 77-13-4]
  misc_feature (117)..(354): NCBI GI: 116202897 Blast Desc: CHGG_09333 [Chaetomium globosum CBS 148.51] gi|88177851|gb|EAQ85319.1| CHGG_09333 [Chaetomium globosum CBS 148.51]
  misc_feature (158)..(371): NCBI GI: 171682634 Blast Desc: protein product [Podospora anserina] gi|170941276|emb|CAP66926.1| protein product [Podospora anserina]
  misc_feature (189)..(362): NCBI GI: 156033223 Blast Desc: SS1G_13687 [Sclerotinia sclerotiorum 1980] gi|154699090|gb|EDN98828.1| SS1G_13687 [Sclerotinia sclerotiorum 1980]
  misc_feature (184)..(379): NCBI GI: 46109538 Blast Desc: FG01651.1 [Gibberella zeae PH-1]
  misc_feature (194)..(364): NCBI GI: 116208408 Blast Desc: CHGG_03497 [Chaetomium globosum CBS 148.51] gi|88184094|gb|EAQ91562.1| CHGG_03497 [Chaetomium globosum CBS 148.51]
MAAAFETLYRNPEDFIRRIWFQDPQAALIGGAPHVNIQDDNTIRGFESVMNAQESDFRRYASQLRPIIQLQDPNDALEQLCSVVGIVKQHFTSSQDEIVGRVAERFQIRGQQVLERKQDIQNAINLATQIWLQLRFITGTADAIPGEGPYYRHDEDQRQQQGAQTIEEAFVSNLDREEYPNERKFSTLFNFAAMSKLSSIEIVPTNNLLDHLSIRQIGFTVTVSVFSHGSILQHHIHHAAEQKPGLYRDLAIETLDTLHLLVDPKDTTFSKHPQERLFDQTCRNVLRPRKIKYQVKHYKFWRKRLLDLEAEYAKSFPRTLSGWWHNRRDREAWVTFWIAFIAGILALLGLFLAILSLAYSVFIGQLSLQQAILANAYASNASAADVVGTSSNEPTQTGYVTTTTTAAQNDVSYVTNCYSAACYFYGVGNTTSVDSTQTLALRPEKPT

SEQ ID NO: 9323 - DNA, 962 bp, Muscodor strobelii
  misc_feature: SGI EST ID NO. CUFF.22118.0
  misc_feature: Variant of the nucleotide sequence at SEQ ID NO 9321
gtcaaagctcagctctattgagatagtccctacaaacaatctcttggatcacctgtcgattcgacaaattggattcacggtcacagtatctgtctttagtcacgggtccattctacagcatcacattcatcatgcggcagaacaaaagcccgggttatacagagaccttgcaattgagacactagacacgctccacctcctcgtcgacccaaaagacacgactttcagcaaacacccacaagaacgccttttcgaccaaacctgccggaacgtcctaaggcctcgcaaaataaaataccaagtaaaacactacaagttctggaggaagcgcctcctggatctcgaagccgaatacgccaaatccttcccccgcacccttagcgggtggtggcacaaccgacgggatagagaggcgtgggtgactttttggatcgctttcatagcgggcatcctcgcgcttcttgggctgtttctagccatactgtccctcgcgtattcggtcttcattgggcagctgtccctacagcaggcaatactggcgaatgcgtacgccagcaatgcgagcgcggctgatgtggttgggacttcatctaatgagcctacgcagactggctacgtgaccacgacaactacggcggcgcagaacgatgtgtcgtacgtcacgaattgttatagtgctgcctgttatttctatggtgttggcaacactacgtcggttgacagtacgcagacgttggctctgcgccctgagaagcctacctaattaaagacccccgcagatctgaatgttgatgcacgaatccaatgaagcaaggcagtgctactggcatccccttagaaacctaagatggtatttaatacttcagactacaactgtagtcgtcatctaagttctaccaagatgataatcgacaataacaaaacaccaaagtaatcttcaccagtctatacactcagataat

SEQ ID NO: 9324 - DNA, 906 bp, Muscodor strobelii
  misc_feature: SGI cDNA ID NO. 562909
  misc_feature: Encodes the peptide sequence at SEQ ID NO 9325
atggcacagatccgaggcacagctggctaccagctgaacaaccagaaccccttcggaggatcgacagcagagagcagcgagtcgagtcctctggacgccattagggcgcagaccagcaagatcgaagacgtcttggacagtgtcagcgggcctgtgaaaccatatttgccggccattggtcgcttccttattgttgtcacattcctcgaggacgccctgcggattttaacacaatggaatgatcaattggtgtacctgaactcgtaccgcaaaattccgacgggccttacccacctcttcctcatcatcaacgttgttgctatggtcactggctctaccctcgtcatcatccggaaatactctgactatgccgttgctggacttatgggcgtcgttgtcacgcaggctctgggatacggattgatcttcgacctcaacttcttcctccgcaacctctcagtcatcggcggccttattatggttctctctgactcctgggttcgcaagacgaaggcttttgctggtcttccaactctcgacgagaaggaccgcaaaatgtatttccagctggctgggcgtgtgctcctcatcttcctgttcatcggctttgtcttcagcggcgagtggactctgggacgagtcattgtctcggccattggtgccgttgcctgcgtcatggttgtcgttggtttcaaggctaagttcagcgccactctcctcgtcgtcatcctcagcatcttcaatctgcttgtcaacaacttctggactctccacgaacaccacccacacaaggacttcgccaagtacgacttcttccagattctctcgattgtcggcggccttttgttacttgtcaactccggcccaggtcaattctccatcgatgagaagaagaaggtctactag

SEQ ID NO: 9325 - protein, 301 aa, Muscodor strobelii
  misc_feature: SGI Peptide ID NO. 562909
  misc_feature (35)..(301): Pfam Id: PF02077 Pfam Desc: SURF4 family
  misc_feature (39)..(301): Pfam Id: PF02077 Pfam Desc: SURF4 family
  misc_feature (1)..(301): NCBI GI: 85113270 Blast Desc: NCU03319 [Neurospora crassa OR74A] gi|28926280|gb|EAA35260.1| NCU03319 [Neurospora crassa OR74A]
  misc_feature (1)..(301): NCBI GI: 171687381 Blast Desc: protein product [Podospora anserina] gi|170943652|emb|CAP69304.1| protein product [Podospora anserina]
  misc_feature (5)..(301): NCBI GI: 46107310 Blast Desc: FG00538.1 [Gibberella zeae PH-1]
  misc_feature (1)..(301): NCBI GI: 256735232 Blast Desc: [Nectria haematococca mpVI 77-13-4]
  misc_feature (15)..(301): NCBI GI: 261357366 Blast Desc: ER-derived vesicles protein ERV29 [Verticillium albo-atrum VaMs.102]
  misc_feature (1)..(301): NCBI GI: 226281590 Blast Desc: surfeit locus protein [Paracoccidioides brasiliensis Pb01]
  misc_feature (1)..(301): NCBI GI: 261203451 Blast Desc: COPII-coated vesicle protein SurF4/Erv29 [Ajellomyces dermatitidis SLH14081] gi|239586724|gb|EEQ69367.1| COPII-coated vesicle protein SurF4/Erv29 [Ajellomyces dermatitidis SLH14081]
  misc_feature (1)..(301): NCBI GI: 39959108 Blast Desc: MGG_09309 [Magnaporthe grisea 70-15] gi|145013229|gb|EDJ97870.1| MGG_09309 [Magnaporthe grisea 70-15]
  misc_feature (3)..(301): NCBI GI: 156053021 Blast Desc: SS1G_06678 [Sclerotinia sclerotiorum 1980] gi|154704456|gb|EDO04195.1| SS1G_06678 [Sclerotinia sclerotiorum 1980]
  misc_feature (1)..(301): NCBI GI: 169607389 Blast Desc: SNOG_06751 [Phaeosphaeria nodorum SN15] gi|111064282|gb|EAT85402.1| SNOG_06751 [Phaeosphaeria nodorum SN15]
MAQIRGTAGYQLNNQNPFGGSTAESSESSPLDAIRAQTSKIEDVLDSVSGPVKPYLPAIGRFLIVVTFLEDALRILTQWNDQLVYLNSYRKIPTGLTHLFLIINVVAMVTGSTLVIIRKYSDYAVAGLMGVVVTQALGYGLIFDLNFFLRNLSVIGGLIMVLSDSWVRKTKAFAGLPTLDEKDRKMYFQLAGRVLLIFLFIGFVFSGEWTLGRVIVSAIGAVACVMVVVGFKAKFSATLLVVILSIFNLLVNNFWTLHEHHPHKDFAKYDFFQILSIVGGLLLLVNSGPGQFSIDEKKKVY

SEQ ID NO: 9326 - DNA, 1860 bp, Muscodor strobelii
  misc_feature: SGI EST ID NO. CUFF.22355.1
  misc_feature: Variant of the nucleotide sequence at SEQ ID NO 9324
ggcgaattccagcgaataaaacagtgggcgaggtgcgcctctgcatcattcatccgcactttgaatgtgtcctatccggttcctgtcaatgagaactggcaattgaggacacggtagtctagcagggtcgaaaagctccatacaccactgtcgctgccgtcactgcacactcaccagcctcggattaggaagctcaccactttactgccgcactccccctctaccgctgtcttttagccatttacatttcttttgatatatcacggtctagcaaaaccataactgccagtattctactcttgcgactgctacagctgctgttattattcttatccctccgtcgcagcgcgcccctcatcccgagtcactcccgcgccttgcggtccgctccctcagcccacccctcggcctccatttcccatctagctgtccacaattcgacgagcttcgtcttctcccccggccggaacagcaggtctgcacgcgcgactttcaccacaacaccgagatcatggcacagatccgaggcacagctggctaccagctgaacaaccagaaccccttcggaggatcgacagcagagagcagcgagtcgagtcctctggacgccattagggcgcagaccagcaagatcgaagacgtcttggacagtgtcagcgggcctgtgaaaccatatttgccggccattggtcgcttccttattgttgtcacattcctcgaggacgccctgcggattttaacacaatggaatgatcaattggtgtacctgaactcgtaccgcaaaattccgacgggccttacccacctcttcctcatcatcaacgttgttgctatggtcactggctctaccctcgtcatcatccggaaatactctgactatgccgttgctggacttatgggcgtcgttgtcacgcaggctctgggatacggattgatcttcgacctcaacttcttcctccgcaacctctcagtcatcggcggccttattatggttctctctgactcctgggttcgcaagacgaaggcttttgctggtcttccaactctcgacgagaaggaccgcaaaatgtatttccagctggctgggcgtgtgctcctcatcttcctgttcatcggctttgtcttcagcggcgagtggactctgggacgagtcattgtctcggccattggtgccgttgcctgcgtcatggttgtcgttggtttcaaggctaagttcagcgccactctcctcgtcgtcatcctcagcatcttcaatctgcttgtcaacaacttctggactctccacgaacaccacccacacaaggacttcgccaagtacgacttcttccagattctctcgattgtcggcggccttttgttacttgtcaactccggcccaggtcaattctccatcgatgagaagaagaaggtctactagatcaagacatcaagatctacatgcgactcggccgggtcagttgatcgtttgccctccgaaagcaaatctttggcaacgaatcctcttgcaccatatcacgacgaaaagaaaaaagggctcgcatattatggcgtaaaaaggtgtggacataaaggcagcacgcaccgatgggatgattatctggaggactactgggcgggctagtgttgccatcaagtggtggtagtaccgtggacgaggttgtaagggcttcataggtgatatgtgattaaagcaagggaatggatgggccatataacttagtgatgggattccctcaacaatatccaaaaaaaattggactattcaagttcaccgcggattggtgcttcgtgagacttgacatgtaacctgcgcatttcacgaatatagtctagtgagatagtgggcaacgtgaatcacag

SEQ ID NO: 9327 - DNA, 1308 bp, Muscodor strobelii
  misc_feature: SGI cDNA ID NO. 562910
  misc_feature: Encodes the peptide sequence at SEQ ID NO 9328
atgtcgtcgagcgcgacggatcaaaatggcgccgttcagaagcatcgcgcttgtgacgaatgtcgcacccggaaactcgcgtgtacgaaagagcccgatggctgctcccgttgcaaacgcgaaaacataacttgccactactcggctcagaaacccatgggccgcccgcggaagcggccccgagaagagaccgatgagcgaccgctcgctgccgccccgccagcgaagacagccatggcggagctgccgccagacaccgaagacccgggcatggacttcatcaatctgctgctcggtgacgacttcgactggagccagccgcctcccgaccagcagtttgtgcccgaagccacagagtgtgccaaaccagagggccaggctgctctcaactttgtatctagcttcggcgatatcaacttcgatcccgtacccgtcgagtctttcaccgacaccaacatcgatcccgctctgttcatgaccccggccccagctgcggaccagctccctgcgctctcgccaaactccaatactgccagctcacccgagagtgtgtccaccaacacgcccccggccctcagctgcacttgctcaactaagctgttcacggccctcaactccatgcagagactgtcaaccgaggtcgagcccgccatccgcgaagcacgcttagccgccaaggtcgcatacgaatgcgttaactgtccctcatgctctctcaacatggagcttcccacacccgacgcccagaacaccgccaacatgatgcatcatttccagaacatgatgttattagccacgttgatacccagtatcgtgagcgcatatagccgcattctaggcgtggtcgacgaagaggcgaggcgcgctgtagccgagcggcgtcagatcgtcttcaaattgcctgctcttggtggtgtctggggcggtctgggcggaaagggcaacgaggatctgtgtggtgcagcgaaccagtatgcctaccgtgagatggaacctgttatgtggcgattgactgtgcgtgccttgctcaaggtcgacgtctatggtatctcgggtaactgtaatcaatcggagaaatcgcatgggctggttgttgatccgttccacctgggtctcaaggacattgttctccagatggagaataattccaaagcgagacatgccatgttggacgcattgatcaacactggcctttgggaacctcctaactgcggctttctcagtcccaatcagcccggccagcctccgcaatgccagcggattattcagatcgcacgatcgtccgtcgaggccttggttattccatga

SEQ ID NO: 9328 - protein, 435 aa, Muscodor strobelii
  misc_feature: SGI Peptide ID NO. 562910
  misc_feature (16)..(54): Pfam Id: PF00172 Pfam Desc: Fungal Zn(2)-Cys(6) binuclear cluster domain
  misc_feature (1)..(434): NCBI GI: 256734441 Blast Desc: NECHADRAFT_74715 [Nectria haematococca mpVI 77-13-4]
  misc_feature (1)..(435): NCBI GI: 116181930 Blast Desc: CHGG_01593 [Chaetomium globosum CBS 148.51] gi|88185890|gb|EAQ93358.1| CHGG_01593 [Chaetomium globosum CBS 148.51]
  misc_feature (11)..(434): NCBI GI: 46108316 Blast Desc: FG01040.1 [Gibberella zeae PH-1]
  misc_feature (9)..(391): NCBI GI: 145605403 Blast Desc: MGG_09312 [Magnaporthe grisea 70-15] gi|145013226|gb|EDJ97867.1| MGG_09312 [Magnaporthe grisea 70-15]
  misc_feature (4)..(434): NCBI GI: 154318417 Blast Desc: BC1G_03376 [Botryotinia fuckeliana B05.10] gi|150842899|gb|EDN18092.1| BC1G_03376 [Botryotinia fuckeliana B05.10]
  misc_feature (14)..(407): NCBI GI: 85113274 Blast Desc: NCU03320 [Neurospora crassa OR74A] gi|28926281|gb|EAA35261.1| [Neurospora crassa OR74A]
  misc_feature (200)..(433): NCBI GI: 261356030 Blast Desc: conserved [Verticillium albo-atrum VaMs.102]
  misc_feature (186)..(384): NCBI GI: 171687379 Blast Desc: protein product [Podospora anserina] gi|170943651|emb|CAP69303.1| protein product [Podospora anserina]
  misc_feature (53)..(434): NCBI GI: 156053017 Blast Desc: SS1G_06676 [Sclerotinia sclerotiorum 1980] gi|154704454|gb|EDO04193.1| SS1G_06676 [Sclerotinia sclerotiorum 1980]
  misc_feature (15)..(353): NCBI GI: 189188838 Blast Desc: [Pyrenophora tritici-repentis Pt-1C-BFP] gi|187972364|gb|EDU39863.1| [Pyrenophora tritici-repentis Pt-1C-BFP]
MSSSATDQNGAVQKHRACDECRTRKLACTKEPDGCSRCKRENITCHYSAQKPMGRPRKRPREETDERPLAAAPPAKTAMAELPPDTEDPGMDFINLLLGDDFDWSQPPPDQQFVPEATECAKPEGQAALNFVSSFGDINFDPVPVESFTDTNIDPALFMTPAPAADQLPALSPNSNTASSPESVSTNTPPALSCTCSTKLFTALNSMQRLSTEVEPAIREARLAAKVAYECVNCPSCSLNMELPTPDAQNTANMMHHFQNMMLLATLIPSIVSAYSRILGVVDEEARRAVAERRQIVFKLPALGGVWGGLGGKGNEDLCGAANQYAYREMEPVMWRLTVRALLKVDVYGISGNCNQSEKSHGLVVDPFHLGLKDIVLQMENNSKARHAMLDALINTGLWEPPNCGFLSPNQPGQPPQCQRIIQIARSSVEALVIP

SEQ ID NO: 9329 - DNA, 2203 bp, Muscodor strobelii
  misc_feature: SGI EST ID NO. CUFF.22276.1
  misc_feature: Variant of the nucleotide sequence at SEQ ID NO 9327
cgggatgtgcttgccgtcccgccaggcaggaaatgtaacggcgtcgctgacgaatctccagttctttcttctgtatgaacagcgtaaaagaacacgcctgcatggtcataaccctattttacctgttgtcataattacaacatcatctagcttccattgtactagcttttcccgaacgcgttttaattgaacaaaggcgtcagaacccgggattgatcgagtatacgtgggagaagaagagagacaagcggccatgtcgtcgagcgcgacggatcaaaatggcgccgttcagaagcatcgcgcttgtgacgaatgtcgcacccggaaactcgcgtgtacgaaagagcccgatggctgctcccgttgcaaacgcgaaaacataacttgccactactcggctcagaaacccatgggccgcccgcggaagcggccccgagaagagaccgatgagcgaccgctcgctgccgccccgccagcgaagacagccatggcggagctgccgccagacaccgaagacccgggcatggacttcatcaatctgctgctcggtgacgacttcgactggagccagccgcctcccgaccagcagtttgtgcccgaagccacagagtgtgccaaaccagagggccaggctgctctcaactttgtatctagcttcggcgatatcaacttcgatcccgtacccgtcgagtctttcaccgacaccaacatcgatcccgctctgttcatgaccccggccccagctgcggaccagctccctgcgctctcgccaaactccaatactgccagctcacccgagagtgtgtccaccaacacgcccccggccctcagctgcacttgctcaactaagctgttcacggccctcaactccatgcagagactgtcaaccgaggtcgagcccgccatccgcgaagcacgcttagccgccaaggtcgcatacgaatgcgttaactgtccctcatgctctctcaacatggagcttcccacacccgacgcccagaacaccgccaacatgatgcatcatttccagaacatgatgttattagccacgttgatacccagtatcgtgagcgcatatagccgcattctaggcgtggtcgacgaagaggcgaggcgcgctgtagccgagcggcgtcagatcgtcttcaaattgcctgctcttggtggtgtctggggcggtctgggcggaaagggcaacgaggatctgtgtggtgcagcgaaccagtatgcctaccgtgagatggaacctgttatgtggcgattgactgtgcgtgccttgctcaaggtcgacgtctatggtatctcgggtaactgtaatcaatcggagaaatcgcatgggctggttgttgatccgttccacctgggtctcaaggacattgttctccagatggagaataattccaaagcgagacatgccatgttggacgcattgatcaacactggcctttgggaacctcctaactgcggctttctcagtcccaatcagcccggccagcctccgcaatgccagcggattattcagatcgcacgatcgtccgtcgaggccttggttattccatgagccggccacttctctgacttcgatcaaccccgcgagatacaagcccctataacccgtataaagggtgtgccgatgacacagcccagcgcagcaaatcctctcttgctcgcaggcttttgactccggcttgtgacttattattatcacgccgtaaaatcgcagatgcacgttcacgcatccgcaagctatcgctaataccgaaggtcatatgagtactaacgtccatgtttagagatatctccgctcagcctgtcataaaaagattgtgaacacataacgaatcaatttcacaagtaatagtgctcaatcagtctatactctgttattcagagatacacagagagtttgtataatacttgaattcatatctccgctggattgagtcacatggaatctgaaactttcgcaaagccgagattgcagcgggagttaattctgaaaatcacgacatcttgctcacatataggagtatgtataagatttgacatgaagagtaattcagtctcaattgtgatcaagcaatgtcccgactccctgcttacctgttgtgttaaatgtgtaacctaggctaccttacaaatgattttctgtgagctctatagtcttctgattaagacatcatgtgagaaatagatacataaa

SEQ ID NO: 9330 - DNA, 237 bp, Muscodor strobelii
  misc_feature: SGI cDNA ID NO. 562911
  misc_feature: Reduced expression when VOC is produced
  misc_feature: Encodes the peptide sequence at SEQ ID NO 9331
atgcgtttatcaggcattcagagggaggtcctttctctctacaggagttgccttcgtgagagccggaagaaaccaaccgcaactcgtcaccatttcgaatcctttgcacgatccgaattcgagaagtccattaaaatcgacaaaagggattttggggccatcgagttcttgttgcgcaagggccgtcgacaattagaagtttattccgcacctggcatcaaagatattcgctcttga

SEQ ID NO: 9331 - protein, 78 aa, Muscodor strobelii
  misc_feature: SGI Peptide ID NO. 562911
  misc_feature (5)..(70): Pfam Id: PF05347 Pfam Desc: Complex 1 protein (LYR family)
  misc_feature (2)..(77): NCBI GI: 46108756 Blast Desc: FG01260.1 [Gibberella zeae PH-1]
  misc_feature (2)..(77): NCBI GI: 164424191 Blast Desc: NCU07507 [Neurospora crassa OR74A] gi|157070413|gb|EAA35818.2| conserved [Neurospora crassa OR74A]
  misc_feature (1)..(77): NCBI GI: 145605405 Blast Desc: MGG_11728 [Magnaporthe grisea 70-15] gi|145013230|gb|EDJ97871.1| MGG_11728 [Magnaporthe grisea 70-15]
  misc_feature (2)..(77): NCBI GI: 259484731 Blast Desc: TPA: conserved [Aspergillus nidulans FGSC A4]
  misc_feature (2)..(77): NCBI GI: 212543355 Blast Desc: heat shock protein, [Penicillium marneffei ATCC 18224] gi|210066739|gb|EEA20832.1| heat shock protein, [Penicillium marneffei ATCC 18224]
  misc_feature (2)..(77): NCBI GI: 242786422 Blast Desc: heat shock protein, [Talaromyces stipitatus ATCC 10500] gi|218720949|gb|EED20368.1| heat shock protein, [Talaromyces stipitatus ATCC 10500]
  misc_feature (1)..(76): NCBI GI: 119185124 Blast Desc: [Coccidioides immitis RS]
  misc_feature (2)..(77): NCBI GI: 145255848 Blast Desc: An18g06660 [Aspergillus niger] gi|134084716|emb|CAK43373.1| protein product [Aspergillus niger]
  misc_feature (1)..(76): NCBI GI: 189193945 Blast Desc: PTRG_02978 [Pyrenophora tritici-repentis Pt-1C-BFP] gi|187978875|gb|EDU45501.1| PTRG_02978 [Pyrenophora tritici-repentis Pt-1C-BFP]
  misc_feature (2)..(76): NCBI GI: 261201316 Blast Desc: conserved [Ajellomyces dermatitidis SLH14081] gi|239592117|gb|EEQ74698.1| conserved [Ajellomyces dermatitidis SLH14081] gi|239611720|gb|EEQ88707.1| conserved [Ajellomyces
  misc_feature: Useful for introducing or modulating the production of volatile compounds
MRLSGIQREVLSLYRSCLRESRKKPTATRHHFESFARSEFEKSIKIDKRDFGAIEFLLRKGRRQLEVYSAPGIKDIRS

SEQ ID NO: 9332 - DNA, 3715 bp, Muscodor strobelii
  misc_feature: SGI EST ID NO. CUFF.22140.0
  misc_feature: Variant of the nucleotide sequence at SEQ ID NO 9330
tcactgtctcgaaatttactaattactcatatttaactgtgattcattctcgatcggcagttatcacgcaatgcgtttatcaggcattcagagggaggtcctttctctctacaggagttgccttcgtgagagccggaagaaaccaaccgcaactcgtcaccatttcgaatcctttgcacgatccgaattcgagaagtccattaaaatcgacaaaagggattttggggccatcgagttcttgttgcgcaagggccgtcgacaattagaagtttattccgcacctggcatcaaagatattcgctcttgacatgttgtgccatttcacgatgacaccttattgcttaaatgtctaagttcagcagagcagttacggccggagccgtgggagacactcgtccgagggagtcacattcaacgactgcactattgacatctgccgatagaggaaaagggtgcgacaacccacgatctaggaaaccttccgtctcgcatcctgaagcatcgcagtaaagcttacttagaacatgaatttttttggcctccttggaacctttttggaaattagagatgccgacggtcagtttgccttagaaggggagtccgcatcatcgaccaaatttcaactattcctccgtcgctgcttctggagaaccccattcacagccattaccccaagaagtacctcgatgtccattttccgtatcaacaaactccataacaagtcaaaagcagcgaaggattagccgcactcaacacggagttcgagtcagccgacgcctgccggctcgaacgagcaaagggtcgatacaaccagacggggccggatctttacggcttccggacccagactcaagtggtcatccatattggggaacattagaaccacggcgagcctcgtatagaaactctaaggttgctagacgcgccacgggccacgcggatgagggcgacaagggtgatgatgagcagttgattgctaatgattatcattgtgttcctgaaccattgaggctgaagaaagaagaacggaagacaccaaagcaggaaaagcggtttggtcttgcagatccagtcgcctgggatgctatcaaccggtcacttgcacagcaaaaacgcctatcctcgtttatcgctacggatggtccaacggatgtgcgtaatggaatatatgcgggtcgtagtatgggtaactcctctcggacatcaagccagcgtagagcccttagacactttacaagagaactcgagaaatttactcacgctgccgacgcagttggcagattgcccgtcatcacaccaactatttcagaatcaagagcatcataccataccgtcaaaccgcttgtgccttacaaggcggaattcgaagctgccggtcttgctgtgacgtctagagaacaacggcagaggtcacctatacatgaacaggcacgaacatcagaaacagctaataaacatgtgaaccagccgagacagcctctaaaagaagaggaaaagcttgaagggcatgaagggaataggttaaacgcgagtgatctgtcgtcttaccacgcgcctgatttacacatgcagggtacaccacaggccattcataagatgcttccagtcattccgctggctccgccccagccaaaaaagagacataaacatagctttcagtcgagtcagcgattactatcttcgttgctcaaacgactatccaataagatcgttcacagccacgagcccgactctccgattcgagtccagcaggtcaagagtggacaagttcaacctcaaaacctttcatcccctctgcacaatggcaagcgccttcaacggaaaagccaggaactacagatgcaaacaatacctgagacggtacagacacctatacgtgctttgccgagcggctatgtcactgccaaaaggggtgccacagtagccttatcgcccgagcatgatccacagcatcaccagcaccgtccgcctcacatggatttatgtgacgctaagcagtctttgggcaaatttcaggggacaagggatctaactagagctcttctgccaaaaccctgcgcagaccctatcgagacgattgaagaggagaccgaatcaatagtttgccctgtgccagacgcccggaaaacccggcattctgccccagcccaccacaaaaccaaatcagatacagctctcaatagtcacagaccgagagtcgaggagtgttcatggatcgacagcaatagctcatccagtcgttccattcacgatagcgtcaggcaccatcattcaagactagctaagcagaatgctgaaccccatacagttctggctactcggaagtccaaggtcaaagaatgctcgtgggtccccagcgacgattcgtcgaatcactcggtccgcgatggtgccaagagccatcattcagccctagctaaacagaaaggggcatcgcatacattgctcgatagtaacaagccaagaacagaagactgcccatggattcccagcagtacttcgtccagtcatacttctccgcacgatgcaccaaggcacagtcgtgcttcggcaaagcagaaagagaagtccctcgtctcgactaaagtcagcaagccgaaaaacactacttgtctgtgggttcctagtgatggctcgtcgagccactcactcccattcacggccaaattggctgcaggcagagcttcgtctttacagcgagcactggatgacgcagctcgaaggatggacgaagaagatcagtatcaggacaccgcggccgaaactcgcaagattaagggaactaagataggagctataccaccgtcaatccctaaacgtgcttcacagcatggcattgctcagcccgggctaccacgaaagcctcgtactggtgaacgattcatctacgtgaagcgaacgatgccaccggtgtcaaagggtcacccggatcttacgaagccgctgccaccggagcctttccctggtactcagaatacacctcggaaaaagcgcagatcaaggccaccgcgacccattcgagttggctccggactatctcgcaaggcatctagaagggatagaaacgcggttgctgaactggccaaggcagaagagatgctgcaggatctggatgtattcctaaatgaccatgacgacgcgaccatcgcagatcgcgatgtaatcaagggtctgcaggtagctattcatgcagcggcagacgacttgttcgacgcatacataagacacaagacggggctgcgaatccggcgattcttggcagatctgaagtcgttcgacgaggagcaaaaggcaaaggctatagatcagcgggctagagaacaacgagctaaacgacgaggacgttaaatgtatctaacctgggaaactgacataggcgggaacggggctactattatgacgaatagcagagtgctagctcctctttgcgtatctgggccgctcaaggaagttgtaattcatagtacaatgtcacctggacatacagtaggtaggaatgaattatagggttctacaaaatgactaatacactcgctatttcgagcacctgtgtggcatgtcacttgcgagcaaccctatgaagagcatgtatcgagattggggcggtcacagaacgcaggggatttcacaactcggggcgggatgatgttggaccccgaaccacatttgctgcaggcttgagtgtgtcagatattagcgtggaggggtggctctc

SEQ ID NO: 9333 - DNA, 1419 bp, Muscodor strobelii
  misc_feature: SGI cDNA ID NO. 562912
  misc_feature: Encodes the peptide sequence at SEQ ID NO 9334
atgagtaccacagaacttgacttgactgatgtcgacgcggtggggctcgcacagctcattaggaccggcaagacgtcttcgctcgcggtcgtccaggcacatctagttcgcatccaaaatctcaacccaactctgaatgccatcgtcactatcaacgatggagccttggagcaggctaaggcggccgatgcggccgtccagtccggccagactctcgggcccctccacggcgtcccgttcaccgtgaaagactcgattgacacgtcgggtgtgctaacacagcgcggctcgcctattttccgcgatcggatccctgaagaggacgccgtcgccgtcgcgcgaatgaaagccgcaggtgccattcttctcgctaagactaatctgcctgaattctcctatgggactgagagcagcaatctcctcacaggtcgtacaaataacccctggaacgtggacaagactcccggtggttctagcggcggcgagtcggctgccattgcagcgcgtatgtcgcctctcgggctcggcactgatcttgccatctccgtccgaggtcctgccgcacagacgggtatcacctcgattaagtcgacacacggacgtgtgcccatgactggcgtgtggcctcgctcaccgcgccgcttctggcatctagggcccatggctcgcagtattcgcgatatagaggtggcattgagtgtcctcgcaggagccgacggacacgatgccttttccactattgtcgcgggaatgaataccgtttccgaggcacaggcagacagacaattacgagtaggttggcttgtcgagcccggtttcggcccgattgatgcccaggtgcgcgatgtagttgaggcagcagcggaggcgttcggaagaaaaggatgtctcgtcgagccggtacggattccggctcttgagcgagactttgctcttgacgtttttggccgcattcacatcaacgatatgaggagtaccatcgcagatgttgtacgaggccagccagatgacatggtttctgatgctacgcgcaattttctcaacactcctgacacgtctccacaggagtttattgatgcagagcaaggtgcagatcgtcttcgagatggctttgcggaatattttcggcgctacgacgcattgctttgccctgtactcccgattcctgctcacgaccacgatatggttgagtatacagtggctggccaaactttgagtgcttttgatatcatggcagcaacagtccctctcaatgtcactggcctacccggcgtatcaatacgattcggaacaagtcaatcaggccttccgatcaatgtgcaacttgttggaagctggcactcagaagcaaccatcttgcatttggcgaaactgctagaagatatgagtaccgtgaaaaatgccagaccaaacatttga

SEQ ID NO: 9334 - protein, 472 aa, Muscodor strobelii
  misc_feature: SGI Peptide ID NO. 562912
  misc_feature (29)..(453): Pfam Id: PF01425 Pfam Desc: Amidase
  misc_feature (7)..(472): NCBI GI: 170693851 Blast Desc: Amidase [Burkholderia graminis C4D1M] gi|170141269|gb|EDT09440.1| Amidase [Burkholderia graminis C4D1M]
  misc_feature (1)..(472): NCBI GI: 118469869 Blast Desc: glutamyl-tRNA(Gln) amidotransferase subunit A [Mycobacterium smegmatis str. MC2 155] gi|118171156|gb|ABK72052.1| glutamyl-tRNA(Gln) amidotransferase A
  misc_feature (12)..(472): NCBI GI: 256423262 Blast Desc: Amidase [Chitinophaga pinensis DSM 2588] gi|256038170|gb|ACU61714.1| Amidase [Chitinophaga pinensis DSM 2588]
  misc_feature (7)..(466): NCBI GI: 218532716 Blast Desc: Amidase [Methylobacterium chloromethanicum CM4] gi|218525019|gb|ACK85604.1| Amidase [Methylobacterium chloromethanicum CM4]
  misc_feature (1)..(472): NCBI GI: 256776721 Blast Desc: glutamyl-tRNA(Gln) amidotransferase subunit A [Streptomyces hygroscopicus ATCC 53653]
  misc_feature (7)..(472): NCBI GI: 156742818 Blast Desc: amidase [Roseiflexus castenholzii DSM 13941] gi|156234146|gb|ABU58929.1| Amidase [Roseiflexus castenholzii DSM 13941]
  misc_feature (6)..(472): NCBI GI: 268317753 Blast Desc: Amidase [Rhodothermus marinus DSM 4252] gi|262335287|gb|ACY49084.1| Amidase [Rhodothermus marinus DSM 4252]
  misc_feature (6)..(465): NCBI GI: 67921244 Blast Desc: Amidase [Crocosphaera watsonii WH 8501] gi|67857361|gb|EAM52601.1| Amidase [Crocosphaera watsonii WH 8501]
  misc_feature (1)..(447): NCBI GI: 284043580 Blast Desc: Amidase [Conexibacter woesei DSM 14684] gi|283947801|gb|ADB50545.1| Amidase [Conexibacter woesei DSM 14684]
  misc_feature (7)..(470): NCBI GI: 256670643 Blast Desc: amidase [Streptomyces sp. AA4]
  misc_feature (13)..(472): SWISSPROT Homolog: EC 3.5.1.4 Amidase
MSTTELDLTDVDAVGLAQLIRTGKTSSLAVVQAHLVRIQNLNPTLNAIVTINDGALEQAKAADAAVQSGQTLGPLHGVPFTVKDSIDTSGVLTQRGSPIFRDRIPEEDAVAVARMKAAGAILLAKTNLPEFSYGTESSNLLTGRTNNPWNVDKTPGGSSGGESAAIAARMSPLGLGTDLAISVRGPAAQTGITSIKSTHGRVPMTGVWPRSPRRFWHLGPMARSIRDIEVALSVLAGADGHDAFSTIVAGMNTVSEAQADRQLRVGWLVEPGFGPIDAQVRDVVEAAAEAFGRKGCLVEPVRIPALERDFALDVFGRIHINDMRSTIADVVRGQPDDMVSDATRNFLNTPDTSPQEFIDAEQGADRLRDGFAEYFRRYDALLCPVLPIPAHDHDMVEYTVAGQTLSAFDIMAATVPLNVTGLPGVSIRFGTSQSGLPINVQLVGSWHSEATILHLAKLLEDMSTVKNARPNI

SEQ ID NO: 9335 - DNA, 1299 bp, Muscodor strobelii
  misc_feature: SGI EST ID NO. CUFF.22145.0
  misc_feature: Variant of the nucleotide sequence at SEQ ID NO 9333
cggctgccattgcagcgcgtatgtcgcctctcgggctcggcactgatcttgccatctccgtccgaggtcctgccgcacagacgggtatcacctcgattaagtcgacacacggacgtgtgcccatgactggcgtgtggcctcgctcaccgcgccgcttctggcatctagggcccatggctcgcagtattcgcgatatagaggtggcattgagtgtcctcgcaggagccgacggacacgatgccttttccactattgtcgcgggaatgaataccgtttccgaggcacaggcagacagacaattacgagtaggttggcttgtcgagcccggtttcggcccgattgatgcccaggtgcgcgatgtagttgaggcagcagcggaggcgttcggaagaaaaggatgtctcgtcgagccggtacggattccggctcttgagcgagactttgctcttgacgtttttggccgcattcacatcaacgatatgaggagtaccatcgcagatgttgtacgaggccagccagatgacatggtttctgatgctacgcgcaattttctcaacactcctgacacgtctccacaggagtttattgatgcagagcaaggtgcagatcgtcttcgagatggctttgcggaatattttcggcgctacgacgcattgctttgccctgtactcccgattcctgctcacgaccacgatatggttgagtatacagtggctggccaaactttgagtgcttttgatatcatggcagcaacagtccctctcaatgtcactggcctacccggcgtatcaatacgattcggaacaagtcaatcaggccttccgatcaatgtgcaacttgttggaagctggcactcagaagcaaccatcttgcatttggcgaaactgctagaagatatgagtaccgtgaaaaatgccagaccaaacatttgaagagtctcaacggtcagggggtctcggcaaaaaggacgacacatcactgagtcttgcaatccacaccaagtcacttgatgaatgagcattggttccgagtatcgtgtattctttcagtcgtgggtccagtctactgataacgtcacgttctcaacgttgtctcttcaaaatcttgttcaagagccacatgcttcattcgaggacatattacatatgtcatgttttgaagatcaacacattcccggttgcggcagtgccagcacgtacttgctagtaggtaaggcgtgacctagaaatggtactgaacgcattcctggtgtgggtatgtaatcgacatcttggatgatccatgcaagtgacttccgca

SEQ ID NO: 9336 - DNA, 1581 bp, Muscodor strobelii
  misc_feature: SGI cDNA ID NO. 562913
  misc_feature: Reduced expression when VOC is produced
  misc_feature: Encodes the peptide sequence at SEQ ID NO 9337
atggttctcgcaaacttgagggccaaagcgccaaagaaggaggacaatgtacaggtcctagaggagacaccacatttcgagaaagtcgtttggtacaaagaacctggattgcgaacactctatttctacgctttcatcctttctgttgcatctgcaacgaccggttatgatggatctttcttgaacgctgtccaggtcttcgagcaatggcaagattattttggcagtccgaagggctcccaattgggtcttcttgttgccttatatcagataggcagtgtggcatcgatacctattgtaccgatccttgctgacaactttggtcgcaaattacccatcatcattggttgtgtcatcatgatcgttggtgccattgtgcaaggcactgcaacttctatcggcgccttcatgggtggccgagttctgatgggtttcggcaacagtctagctcagattgcttctcccatgttgcttaccgagctcgctcatccccagcatcgtgctcgtctcacggctgtgtataactgcttgtggaatgccggtgcaattattgtcaatctcctctcgttcggtaccaactacatccccaacaactggtcctggcgtatcccagctatcattcagggcttgccatccttcatccagatcgttttcatctggtgggttccggaatcccctcgatatcacatggcaaaggacaagcacgataaagctctgcgcactctcgcccattaccacgccaatggcaacgtaaaccatcctacggtccaattcgaattccgcgagattaaggaaacaatcaaactagaaatggaggccaaggagaatagcggatacctcgacttcttcaagaccaagggcaaccgctatcgattggcagttttgatctctttgggaattttctcacagtggtcgggtaatgctattatctctaactactccagcacgctgtacgagcaggctggtatcaatggctcgcaacaaaagttcggccttgcgcttggtcaaaccattctgtcacttcttgtgtctctcactatggcttcgcttgtcgataaatttggccgacgccccatgttcctgactgcgacagccggtatgttttttgtcttcatcttctggacgttgactgctgggctatacggcgagcatcgggcccccggttccaatgacgcgatgatcttcttcatatggctcttccaggtcttttactcgatcgcatggtcgggtctgctggtagcctatgccatcgagattctaccatacaagttgcgtgctaagggtctcatgatcctcaacattacaatccagatcgcgctgctgctcaatgagtatgccaatcccgtcgctttccaattcttcggacttgatcattcctggaagctgtacattatctacactttctggatcggcctcgagctcaccttcgtctatttcatgtatgtcgagactcgtggccccacactcgaggagcttgccaaggtcatcgatggcgataatgccaaagtcgcgcatctcgacttggaacaagtggagaaggaggtcgcacgggatagccatgaggttgaagtaaagtcatag

SEQ ID NO: 9337 - protein, 526 aa, Muscodor strobelii
  misc_feature: SGI Peptide ID NO. 562913
  misc_feature (49)..(444): Pfam Id: PF07690 Pfam Desc: Major Facilitator Superfamily
  misc_feature (43)..(496): Pfam Id: PF00083 Pfam Desc: Sugar (and other) transporter
  misc_feature (15)..(521): NCBI GI: 85111305 Blast Desc: NCU08114 [Neurospora crassa OR74A] gi|28925618|gb|EAA34637.1| NCU08114 [Neurospora crassa OR74A]
  misc_feature (9)..(514): NCBI GI: 171687197 Blast Desc: protein product [Podospora anserina] gi|170943560|emb|CAP69212.1| protein product [Podospora anserina]
  misc_feature (9)..(526): NCBI GI: 116180882 Blast Desc: CHGG_01069 [Chaetomium globosum CBS 148.51] gi|88185366|gb|EAQ92834.1| CHGG_01069 [Chaetomium globosum CBS 148.51]
  misc_feature (3)..(509): NCBI GI: 145605411 Blast Desc: MGG_09307 [Magnaporthe grisea 70-15] gi|145013233|gb|EDJ97874.1| MGG_09307 [Magnaporthe grisea 70-15]
  misc_feature (13)..(514): NCBI GI: 46114604 Blast Desc: FG03144.1 [Gibberella zeae PH-1]
  misc_feature (7)..(523): NCBI GI: 169613751 Blast Desc: SNOG_10008 [Phaeosphaeria nodorum SN15] gi|111061223|gb|EAT82343.1| SNOG_10008 [Phaeosphaeria nodorum SN15]
  misc_feature (13)..(521): NCBI GI: 261355535 Blast Desc: hexose transporter protein [Verticillium albo-atrum VaMs.102]
  misc_feature (8)..(523): NCBI GI: 189198948 Blast Desc: hexose transporter protein [Pyrenophora tritici-repentis Pt-1C-BFP] gi|187982910|gb|EDU48398.1| hexose transporter protein [Pyrenophora tritici-repentis Pt-1C-BFP]
  misc_feature (24)..(515): NCBI GI: 255954533 Blast Desc: Pc21g09830 [Penicillium chrysogenum Wisconsin 54-1255] gi|211589730|emb|CAP95880.1| Pc21g09830 [Penicillium chrysogenum Wisconsin 54-1255]
  misc_feature (7)..(515): NCBI GI: 145607423 Blast Desc: MGG_04234 [Magnaporthe grisea 70-15] gi|145014980|gb|EDJ99548.1| MGG_04234 [Magnaporthe grisea 70-15]
  misc_feature: Useful for introducing or modulating the production of volatile compounds
MVLANLRAKAPKKEDNVQVLEETPHFEKVVWYKEPGLRTLYFYAFILSVASATTGYDGSFLNAVQVFEQWQDYFGSPKGSQLGLLVALYQIGSVASIPIVPILADNFGRKLPIIIGCVIMIVGAIVQGTATSIGAFMGGRVLMGFGNSLAQIASPMLLTELAHPQHRARLTAVYNCLWNAGAIIVNLLSFGTNYIPNNWSWRIPAIIQGLPSFIQIVFIWWVPESPRYHMAKDKHDKALRTLAHYHANGNVNHPTVQFEFREIKETIKLEMEAKENSGYLDFFKTKGNRYRLAVLISLGIFSQWSGNAIISNYSSTLYEQAGINGSQQKFGLALGQTILSLLVSLTMASLVDKFGRRPMFLTATAGMFFVFIFWTLTAGLYGEHRAPGSNDAMIFFIWLFQVFYSIAWSGLLVAYAIEILPYKLRAKGLMILNITIQIALLLNEYANPVAFQFFGLDHSWKLYIIYTFWIGLELTFVYFMYVETRGPTLEELAKVIDGDNAKVAHLDLEQVEKEVARDSHEVEVKS

SEQ ID NO: 9338 - DNA, 2494 bp, Muscodor strobelii
  misc_feature: SGI EST ID NO. CUFF.22185.0
  misc_feature: Variant of the nucleotide sequence at SEQ ID NO 9336
gtgaagatgaagtgacatttcaggccatgttactggtccggagccacttgcacctaactactagcggtcaacgttcaattgccttgtcacttagctgcgaatgatctgcagcgtgatccaacgacggccgttaaccgaatatgagctattcggatctagctcccaacctcgccaaccgaatctatgaccgttgctatccaaaccccattgccccatatggggaatggaacgagtcgggggtcccaacttggggtaccacgcggccctagacgccaaaacccatgtgaggaggagcgaggtccttgacatgagagctcgccttcgagatccccaatagcttaggtcggatcggggtggtcatgcactttttagataccatgtccttccaccggtccgctcgtccgccactggatgcttattctcagctatgcctttctatatatgttgtatctgactggccctcctgtgcttcctttatagctcgtctgtttcattatcgcaccttggctggcagtcattgatcttcccattgagggttatcttcgactcagttcttgtcggagagcgttcgtagacgccactcttacctacagtctttcgtaattctttttgagctgcgctggcagacgatcgaacatggttctcgcaaacttgagggccaaagcgccaaagaaggaggacaatgtacaggtcctagaggagacaccacatttcgagaaagtcgtttggtacaaagaacctggattgcgaacactctatttctacgctttcatcctttctgttgcatctgcaacgaccggttatgatggatctttcttgaacgctgtccaggtcttcgagcaatggcaagattattttggcagtccgaagggctcccaattgggtcttcttgttgccttatatcagataggcagtgtggcatcgatacctattgtaccgatccttgctgacaactttggtcgcaaattacccatcatcattggttgtgtcatcatgatcgttggtgccattgtgcaaggcactgcaacttctatcggcgccttcatgggtggccgagttctgatgggtttcggcaacagtctagctcagattgcttctcccatgttgcttaccgagctcgctcatccccagcatcgtgctcgtctcacggctgtgtataactgcttgtggaatgccggtgcaattattgtcaatctcctctcgttcggtaccaactacatccccaacaactggtcctggcgtatcccagctatcattcagggcttgccatccttcatccagatcgttttcatctggtgggttccggaatcccctcgatatcacatggcaaaggacaagcacgataaagctctgcgcactctcgcccattaccacgccaatggcaacgtaaaccatcctacggtccaattcgaattccgcgagattaaggaaacaatcaaactagaaatggaggccaaggagaatagcggatacctcgacttcttcaagaccaagggcaaccgctatcgattggcagttttgatctctttgggaattttctcacagtggtcgggtaatgctattatctctaactactccagcacgctgtacgagcaggctggtatcaatggctcgcaacaaaagttcggccttgcgcttggtcaaaccattctgtcacttcttgtgtctctcactatggcttcgcttgtcgataaatttggccgacgccccatgttcctgactgcgacagccggtatgttttttgtcttcatcttctggacgttgactgctgggctatacggcgagcatcgggcccccggttccaatgacgcgatgatcttcttcatatggctcttccaggtcttttactcgatcgcatggtcgggtctgctggtagcctatgccatcgagattctaccatacaagttgcgtgctaagggtctcatgatcctcaacattacaatccagatcgcgctgctgctcaatgagtatgccaatcccgtcgctttccaattcttcggacttgatcattcctggaagctgtacattatctacactttctggatcggcctcgagctcaccttcgtctatttcatgtatgtcgagactcgtggccccacactcgaggagcttgccaaggtcatcgatggcgataatgccaaagtcgcgcatctcgacttggaacaagtggagaaggaggtcgcacgggatagccatgaggttgaagtaaagtcatagagtttccttgtcaccgcaagaggctgtgcttcgtgcgttggaatttctgcattgtggatgtgtgctgttgatagttggcgagccgggtgattagctcgcatgttatgccatttcctggtttgcctagcgccatgaagcattgcagttagacatattaatgaattaaataaacttttaggttcaaataatatctgagtcgtaaggagtccgtttgtttaccttgtccctttgatcgtagcatgatcatgggagagctaagctcggacctctctagcac

SEQ ID NO: 9339 - DNA, 231 bp, Muscodor strobelii
  misc_feature: SGI cDNA ID NO. 562914
  misc_feature: Encodes the peptide sequence at SEQ ID NO 9340
atgtcttctgttaccgcgatgccttcgatctctaagcccgagtctctgactccggtcgcaactcccagtgcatcaacgtctaagcctaagccctgctgcgtttgcaaggacgagaaagcgaaacgagacgactgcatgctcttctccaaggccgctgaccccacgagcgattgcaagcccatcatcgatcagtacaagacatgtatggcaggctttggattccagatctag

SEQ ID NO: 9340 - protein, 76 aa, Muscodor strobelii
  misc_feature: SGI Peptide ID NO. 562914
  misc_feature (11)..(76): Pfam Id: PF05051 Pfam Desc: Cytochrome C oxidase copper chaperone (COX17)
  misc_feature (6)..(76): NCBI GI: 46107346 Blast Desc: FG00556.1 [Gibberella zeae PH-1]
  misc_feature (3)..(76): NCBI GI: 85119561 Blast Desc: NCU02530 [Neurospora crassa OR74A] gi|28927473|gb|EAA36425.1| NCU02530 [Neurospora crassa OR74A]
  misc_feature (1)..(76): NCBI GI: 121705050 Blast Desc: cytochrome c oxidase copper chaperone Cox17, [Aspergillus clavatus NRRL 1] gi|119398934|gb|EAW09362.1| cytochrome c oxidase copper chaperone Cox17, [Aspergillus NRRL 1]
  misc_feature (13)..(76): NCBI GI: 39958718 Blast Desc: MGG_09281 [Magnaporthe grisea 70-15] gi|145013261|gb|EDJ97902.1| MGG_09281 [Magnaporthe grisea 70-15]
  misc_feature (18)..(76): NCBI GI: 171696326 Blast Desc: protein product [Podospora anserina] gi|42517032|emb|CAE17996.1| COX17 protein [Podospora anserina] gi|42517034|emb|CAE17997.1| COX17 protein [Podospora anserina]
  misc_feature (19)..(76): NCBI GI: 261356436 Blast Desc: COX17 protein [Verticillium albo-atrum VaMs.102]
  misc_feature (17)..(76): NCBI GI: 159127854 Blast Desc: cytochrome c oxidase copper chaperone Cox17, [Aspergillus fumigatus A1163]
  misc_feature (1)..(76): NCBI GI: 259482274 Blast Desc: TPA: cytochrome c oxidase copper chaperone Cox17, (AFU_orthologue; AFUA_3G07690) [Aspergillus nidulans FGSC A4]
  misc_feature (1)..(76): NCBI GI: 67537386 Blast Desc: AN4863.2 [Aspergillus nidulans FGSC A4] gi|40741751|gb|EAA60941.1| AN4863.2 [Aspergillus nidulans FGSC A4]
  misc_feature (26)..(76): NCBI GI: 71000295 Blast Desc: cytochrome c oxidase copper chaperone Cox17 [Aspergillus fumigatus Af293] gi|66852479|gb|EAL92804.1| cytochrome c oxidase copper chaperone Cox17, [Aspergillus Af293]
MSSVTAMPSISKPESLTPVATPSASTSKPKPCCVCKDEKAKRDDCMLFSKAADPTSDCKPIIDQYKTCMAGFGFQI

SEQ ID NO: 9341 - DNA, 989 bp, Muscodor strobelii
  misc_feature: SGI EST ID NO. CUFF.22272.1
  misc_feature: Variant of the nucleotide sequence at SEQ ID NO 9339
ccggagatcaatagtatattgaggaaatagcaccaaacgcaccagccgcggagcttccattaacacttggcggaacgtgcctatttagtttcttatcggtttcttatcgtagcttgctgtcttacaaatccaattgaaggtgacgatttgcttcaccccatcactttgccaactacattgagccaatttacagattgtctgacaggccaaacctttcgtctttgtcgccatgtcttctgttaccgcgatgccttcgatctctaagcccgagtctctgactccggtcgcaactcccagtgcatcaacgtctaagcctaagccctgctgcgtttgcaaggacgagaaagcgaaacgagacgactgcatgctcttctccaaggccgctgaccccacgagcgattgcaagcccatcatcgatcagtacaagacatgtatggcaggctttggattccagatctagatccgcacgactggaggcacagagatgcgaacgttgacaccgcatctcccatgtatgatagagacatgtttttcgcgctagccggcagacgacatgttgtacgatgaatgtataaagactagacagccgactctgccatggctattttgcattgggcggcgtttatataccttctcctttcgccacttcgaagcaagcgtgcatcacgtgcttgaattgggacatcttccatctatatttgcaaccagggtgaaaacgaaagttccgcaggccatgtgtcgtgcttaataggacgaagatgcaatttacttcatgtaatttcttggatgttcttagtttgatcatcaaaacagcaagtagttggttgatgagaaatgtcagcctaagctctgaatcggaatggagcgcatgataagtacacgccaacgcgtgaaaattgactctagactcgttcaaccaggttgtcggctcgaagctaggacttgccactgttgaaacggattcgacatattgcgcgcttgtgttaaga

SEQ ID NO: 9342 - DNA, 1485 bp, Muscodor strobelii
  misc_feature: SGI cDNA ID NO. 562915
  misc_feature: Encodes the peptide sequence at SEQ ID NO 9343
atgtctaacttattcctcatattaatgcggttggccaccgcgatattcgtggttgcaccctctgaagcgctggcatctgcttcaaacaactatccatctgcctgtgctgatgaaaccgctcagtgcgcttgtcaagagctgagtcttgccctgactcaaccgaatggtaccgtatttccggatgatacctactataaggacatcatagacgaaaactactctgccatttgtcgattgccagctgcttgtattgtcaatccaaacagtaccgaacaggtagcaacggctattcagattatcacgaagcacgcagcagagtttgttatccgtagtggaggtcacaattacaatgcaggatttgcaagcatcaacgaaactggtgttcttatctccttgtctcagttcgacgccattgatctctcggacgatctgtcatctgtcaaggttggatctggaaaccgatggcaggctgtatatgaagctctagtgcccaagggtgtcatgccaattggcggtagagtaggaccagttggagtgggcggtctcatgttgggtgcgtacggccttgcattcgataatgtaaagtcattcgaggtcgtccttgtaaatggttctgtcattactgcctcttcctccgattcagcagatctatataaggcactcagaggggggatgacgaatttcggcattgtcacaaacttcgagctctatactcgtcccgttgggaacattttcatcgatgtccgggcctactcacccaaccggacaattgacttcttcaacgctcttgactcttatcagaaacaaggtcagctggatacgaagtctagtgtaaccgtccaagtgctcgacacaggccccgttgtccagatgctgtgcggagatgtccttccagatgacacattcgcgccattttatgatctagggccataccaacccgtcaaagcgtcgaacaagtcctctctacttgatgttctcgcatttagcaacgcacaattcgtcgcaggcgccattcgggtgcagggcgagactttcagccacgaaagtagtagtgccgtccttaatgctctttacaagatctggatagaggaaacgatcaaccttcccaaaaatgtgactagtgtctgggtgccgaatgttatttcacccaaggttgccacgatgggcaagcagaatggtggtaacttgttgaatcttaacgaagtttcccaagtttggtacgagtcattcttcctttatgaagatccgttgtacgacgaggttgtgaaaacggtgaccgaagaggttacccaaaagtgcctcgccgcgatcaaggcagcaaaggtgacggtgccgtaccttttcgcaaatacggctggcaagcgacaacctgtcttgcagagttacaataatataccatatatgaagaccgttgctgcaaaatacgaccctaagtccgtttttcagaagtaccaaaaggatggatttcttttacgagatgcatag

SEQ ID NO: 9343 - protein, 494 aa, Muscodor strobelii
  misc_feature: SGI Peptide ID NO. 562915
  misc_feature (81)..(210): Pfam Id: PF01565 Pfam Desc: FAD binding domain
  misc_feature (64)..(493): NCBI GI: 255939370 Blast Desc: Pc16g00310 [Penicillium chrysogenum Wisconsin 54-1255] gi|211585077|emb|CAP92701.1| Pc16g00310 [Penicillium chrysogenum Wisconsin 54-1255]
  misc_feature (69)..(494): NCBI GI: 242821331 Blast Desc: 6-hydroxy-D-nicotine oxidase, [Talaromyces stipitatus ATCC 10500] gi|218712579|gb|EED12004.1| 6-hydroxy-D-nicotine oxidase, [Talaromyces stipitatus ATCC 10500]
  misc_feature (66)..(491): NCBI GI: 46138189 Blast Desc: FG10609.1 [Gibberella zeae PH-1]
  misc_feature (26)..(492): NCBI GI: 116201111 Blast Desc: CHGG_08440 [Chaetomium globosum CBS 148.51] gi|88176958|gb|EAQ84426.1| CHGG_08440 [Chaetomium globosum CBS 148.51]
  misc_feature (25)..(488): NCBI GI: 46138193 Blast Desc: FG10611.1 [Gibberella zeae PH-1]
  misc_feature (54)..(494): NCBI GI: 256723541 Blast Desc: NECHADRAFT_42078 [Nectria haematococca mpVI 77-13-4]
  misc_feature (44)..(479): NCBI GI: 145256064 Blast Desc: An10g00190 [Aspergillus niger CBS 513.88] gi|134078582|emb|CAK49110.1| protein product [Aspergillus niger]
  misc_feature (73)..(493): NCBI GI: 85090595 Blast Desc: NCU09273 [Neurospora crassa OR74A] gi|28919859|gb|EAA29256.1| conserved [Neurospora crassa OR74A]
  misc_feature (57)..(493): NCBI GI: 145254822 Blast Desc: An18g03080 [Aspergillus niger] gi|134084352|emb|CAK48692.1| protein product [Aspergillus niger]
  misc_feature (73)..(491): NCBI GI: 238499855 Blast Desc: conserved [Aspergillus flavus NRRL3357] gi|220692915|gb|EED49261.1| conserved [Aspergillus flavus NRRL3357]
MSNLFLILMRLATAIFVVAPSEALASASNNYPSACADETAQCACQELSLALTQPNGTVFPDDTYYKDIIDENYSAICRLPAACIVNPNSTEQVATAIQIITKHAAEFVIRSGGHNYNAGFASINETGVLISLSQFDAIDLSDDLSSVKVGSGNRWQAVYEALVPKGVMPIGGRVGPVGVGGLMLGAYGLAFDNVKSFEVVLVNGSVITASSSDSADLYKALRGGMTNFGIVTNFELYTRPVGNIFIDVRAYSPNRTIDFFNALDSYQKQGQLDTKSSVTVQVLDTGPVVQMLCGDVLPDDTFAPFYDLGPYQPVKASNKSSLLDVLAFSNAQFVAGAIRVQGETFSHESSSAVLNALYKIWIEETINLPKNVTSVWVPNVISPKVATMGKQNGGNLLNLNEVSQVWYESFFLYEDPLYDEVVKTVTEEVTQKCLAAIKAAKVTVPYLFANTAGKRQPVLQSYNNIPYMKTVAAKYDPKSVFQKYQKDGFLLRDA

SEQ ID NO: 9344 - DNA, 357 bp, Muscodor strobelii
  misc_feature: SGI cDNA ID NO. 562916
  misc_feature: Encodes the peptide sequence at SEQ ID NO 9345
atgccagctccaacccccctctcaatcgcaacgcagtcggtgcagcgtctcgtaaaagaagagacatactaccgcaaagagctcgccgagcaatcctcacgcgtcgagaagctcgaagcccagctcaagaacagcaccgagcagaatgccgagttcatgcttaagcaggagcaaaaagccatagaagagacccgcgccgtcttcgcacctctgcgcgagcgcatcgacgaggctctacagcgccttgaggagcagatcgctactggtgagagcgagggtgcgcctgaggacgagattacgaaggctaaggaggctttgacgcttggtcagagtgaagctactactgctacctcctga

SEQ ID NO: 9345 - protein, 118 aa, Muscodor strobelii
  misc_feature: SGI Peptide ID NO. 562916
  misc_feature (1)..(110): NCBI GI: 116181900 Blast Desc: CHGG_01578 [Chaetomium globosum CBS 148.51] gi|88185875|gb|EAQ93343.1| CHGG_01578 [Chaetomium globosum CBS 148.51]
  misc_feature (1)..(113): NCBI GI: 171695996 Blast Desc: protein product [Podospora anserina] gi|170948240|emb|CAP60404.1| protein product [Podospora anserina]
  misc_feature (3)..(106): NCBI GI: 39964868 Blast Desc: MGG_09890 [Magnaporthe grisea 70-15] gi|145013213|gb|EDJ97854.1| MGG_09890 [Magnaporthe grisea 70-15]
  misc_feature (1)..(114): NCBI GI: 46107254 Blast Desc: FG00510.1 [Gibberella zeae PH-1]
  misc_feature (1)..(110): NCBI GI: 85113216 Blast Desc: NCU03306 [Neurospora crassa OR74A] gi|28926267|gb|EAA35247.1| [Neurospora crassa OR74A]
  misc_feature (1)..(106): NCBI GI: 256735247 Blast Desc: NECHADRAFT_73383 [Nectria haematococca mpVI 77-13-4]
  misc_feature (1)..(107): NCBI GI: 242776250 Blast Desc: tubulin-specific chaperone Rbl2, [Talaromyces stipitatus ATCC 10500] gi|218722427|gb|EED21845.1| tubulin-specific chaperone Rbl2, [Talaromyces stipitatus ATCC
  misc_feature (1)..(110): NCBI GI: 261355991 Blast Desc: [Verticillium albo-atrum VaMs.102]
  misc_feature (1)..(107): NCBI GI: 212532703 Blast Desc: tubulin-specific chaperone Rbl2, [Penicillium marneffei ATCC 18224] gi|210071872|gb|EEA25961.1| tubulin-specific chaperone Rbl2, [Penicillium marneffei ATCC
  misc_feature (1)..(111): NCBI GI: 238842377 Blast Desc: conserved [Microsporum canis CBS 113480]
MPAPTPLSIATQSVQRLVKEETYYRKELAEQSSRVEKLEAQLKNSTEQNAEFMLKQEQKAIEETRAVFAPLRERIDEALQRLEEQIATGESEGAPEDEITKAKEALTLGQSEATTATS

SEQ ID NO: 9346 - DNA, 2169 bp, Muscodor strobelii
  misc_feature: SGI EST ID NO. CUFF.22220.0
  misc_feature: Variant of the nucleotide sequence at SEQ ID NO 9344
ggagaatcaacactctttaaagtagacagcagctccaggcagctctattctttgcaatataaaaattctgaaaattccttgacgaatttgcaagcagacaaacaccttcatccagctctcgtatcttcatctaagaagacctgacgttgcctgcacattattcaaacaccctgctcatcgtcccgaaaacaagcataaagccacacatccaccatgccagctccaacccccctctcaatcgcaacgcagtcggtgcagcgtctcgtaaaagaagagacatactaccgcaaagagctcgccgagcaatcctcacgcgtcgagaagctcgaagcccagctcaagaacagcaccgagcagaatgccgagttcatgcttaagcaggagcaaaaagccatagaagagacccgcgccgtcttcgcacctctgcgcgagcgcatcgacgaggctctacagcgccttgaggagcagatcgctactggtgagagcgagggtgcgcctgaggacgagattacgaaggctaaggaggctttgacgcttggtcagagtgaagctactactgctacctcctgaaaaaagcgagcgaagcagagtttgtgagaggaggacttggtgttgtgtatagacagatggatgggagtgcgaagggaaagcatggctacgagttgatggctgggaaggaggccgtaaggtgacgaatgataccacttaaataagactttgcgagtacctattcttacaataccaacgtttgctaatcttcacaatgatatgagtcgatgcgtttggtctcatttccgctctgttcctctctagagttcttgggtataataataatgccaatcgtacaacaagcaatcaattttctctcgcggtaccgtcagatctcgcccagccaaagtcgtctaagtcgtatccatcttatctccgggagcatcgacagtaatctgcggcgtttcccggctgtcctcagccatctgcgtatcgccgtcttgggtctgttgtacctgcgtagtactctcactcatctctgtatcctctgcattcggagccgcactacccgctctggaaagcgaaccaatatcatccggcttcggcttcagaccctcggcggcaccgggagcaggactctcaggtctcggcgtccgctcatccctcccactactcggattcggcgtcgcattcccatcgcccttacccgacgcgacctcgggcctaggcgtagcattcccactagcaatgcccttgcccggcgtaggagccgtctccccatcctcagcatcagagtccataccctctctcctctccacctcctccttctcatccctgatcaacgccctcaatcgtcgtccctcatcaaccaacttctcaaactgcgcccgtctctccctccacgtatcaccgtacgcctcgctctctctcttcagctcctcacactcctccgccagcttggcgagattcacatcctgctcagcgcgcgtgcgcaacatgcggttccccgtgatcttgtcagcgagctcgtcgaatttgcggcgctgcgcgagggtcgctctcgcctcgtccagtctgacacgcagctgggcgttggactctcggacggactccatggtgttggagatgcgctcgtgtgtggttttgtagtgttcgcgctctgcgacgttggccgtggcgaggaattggagacgtgcgatggcggagtcgaaggctgcgaagtcgagggtgatgtcttctttcagtgccgtgatgtcttgcatgggtgttgtggctgcttgggcttcgttgtcgggcggtggggtgggaagcttcactttggggttcgtgaaggtgcctggtgcgatgaggcgcttggtgaggcgtttgaagggtcgctcttcgacggcgagcaggcgctgtttgtgcagctctgcttcctcgcgctcgtcgaggagcccgaattgctgcgtcgccatggtcgcggtcatgtgctgatcaaatttgggggaagtagaatactggaaagtgatgctgttcttccttgactgggggtactcggccgcgacgtcagatccggggccgtgtagttgaggcgagtaagataggacaatttatgtggtgcgccaatgctctagtcaaggttgcagactgattgcgcatcgaatggcggttgacacagtagatggaggtacggatgag

SEQ ID NO: 9347 - DNA, 1044 bp, Muscodor strobelii
  misc_feature: SGI cDNA ID NO. 562917
  misc_feature: Encodes the peptide sequence at SEQ ID NO 9348
atggcgacgcagcaattcgggctcctcgacgagcgcgaggaagcagagctgcacaaacagcgcctgctcgccgtcgaagagcgacccttcaaacgcctcaccaagcgcctcatcgcaccaggcaccttcacgaaccccaaagtgaagcttcccaccccaccgcccgacaacgaagcccaagcagccacaacacccatgcaagacatcacggcactgaaagaagacatcaccctcgacttcgcagccttcgactccgccatcgcacgtctccaattcctcgccacggccaacgtcgcagagcgcgaacactacaaaaccacacacgagcgcatctccaacaccatggagtccgtccgagagtccaacgcccagctgcgtgtcagactggacgaggcgagagcgaccctcgcgcagcgccgcaaattcgacgagctcgctgacaagatcacggggaaccgcatgttgcgcacgcgcgctgagcaggatgtgaatctcgccaagctggcggaggagtgtgaggagctgaagagagagagcgaggcgtacggtgatacgtggagggagagacgggcgcagtttgagaagttggttgatgagggacgacgattgagggcgttgatcagggatgagaaggaggaggtggagaggagagagggtatggactctgatgctgaggatggggagacggctcctacgccgggcaagggcattgctagtgggaatgctacgcctaggcccgaggtcgcgtcgggtaagggcgatgggaatgcgacgccgaatccgagtagtgggagggatgagcggacgccgagacctgagagtcctgctcccggtgccgccgagggtctgaagccgaagccggatgatattggttcgctttccagagcgggtagtgcggctccgaatgcagaggatacagagatgagtgagagtactacgcaggtacaacagacccaagacggcgatacgcagatggctgaggacagccgggaaacgccgcagattactgtcgatgctcccggagataagatggatacgacttag

SEQ ID NO: 9348 - protein, 347 aa, Muscodor strobelii
  misc_feature: SGI Peptide ID NO. 562917
  misc_feature (14)..(166): Pfam Id: PF05615 Pfam Desc: Tho complex subunit 7
  misc_feature (6)..(347): NCBI GI: 85113220 Blast Desc: NCU03307 [Neurospora crassa OR74A] gi|28926268|gb|EAA35248.1| [Neurospora crassa OR74A]
  misc_feature (6)..(347): NCBI GI: 116181902 Blast Desc: CHGG_01579 [Chaetomium globosum CBS 148.51] gi|88185876|gb|EAQ93344.1| CHGG_01579 [Chaetomium globosum CBS 148.51]
  misc_feature (6)..(346): NCBI GI: 256734530 Blast Desc: NECHADRAFT_74889 [Nectria haematococca mpVI 77-13-4]
  misc_feature (6)..(245): NCBI GI: 154318692 Blast Desc: BC1G_02735 [Botryotinia fuckeliana B05.10] gi|150857865|gb|EDN33057.1| BC1G_02735 [Botryotinia fuckeliana B05.10]
  misc_feature (6)..(245): NCBI GI: 156045349 Blast Desc: SS1G_09863 [Sclerotinia sclerotiorum 1980] gi|154694258|gb|EDN93996.1| SS1G_09863 [Sclerotinia sclerotiorum 1980]
  misc_feature (6)..(278): NCBI GI: 115442952 Blast Desc: conserved [Aspergillus terreus NIH2624] gi|114188152|gb|EAU29852.1| conserved [Aspergillus terreus NIH2624]
  misc_feature (6)..(284): NCBI GI: 67540010 Blast Desc: AN6175.2 [Aspergillus nidulans FGSC A4] gi|40738771|gb|EAA57961.1| AN6175.2 [Aspergillus nidulans FGSC A4] gi|259479633|tpe|CBF70035.1| TPA: conserved [Aspergillus FGSC
  misc_feature (6)..(247): NCBI GI: 71000948 Blast Desc: conserved [Aspergillus fumigatus Af293] gi|66852793|gb|EAL93117.1| conserved [Aspergillus fumigatus Af293]
  misc_feature (6)..(347): NCBI GI: 171695994 Blast Desc: protein product [Podospora anserina] gi|170948239|emb|CAP60403.1| protein product [Podospora anserina]
  misc_feature (6)..(247): NCBI GI: 159129250 Blast Desc: conserved [Aspergillus fumigatus A1163]
MATQQFGLLDEREEAELHKQRLLAVEERPFKRLTKRLIAPGTFTNPKVKLPTPPPDNEAQAATTPMQDITALKEDITLDFAAFDSAIARLQFLATANVAEREHYKTTHERISNTMESVRESNAQLRVRLDEARATLAQRRKFDELADKITGNRMLRTRAEQDVNLAKLAEECEELKRESEAYGDTWRERRAQFEKLVDEGRRLRALIRDEKEEVERREGMDSDAEDGETAPTPGKGIASGNATPRPEVASGKGDGNATPNPSSGRDERTPRPESPAPGAAEGLKPKPDDIGSLSRAGSAAPNAEDTEMSESTTQVQQTQDGDTQMAEDSRETPQITVDAPGDKMDTT

SEQ ID NO: 9349 - DNA, 2430 bp, Muscodor strobelii
  misc_feature: SGI cDNA ID NO. 562918
  misc_feature: Encodes the peptide sequence at SEQ ID NO 9350
atgtccgccaacaacgtccccaatggcgaccttgctgccccgacacacgagccggccgacaagctgaaccccagttcctcgtcgagcccctccatccgcgatgcctcgtccctcgccgacgttcgcgccacccttgctgccctccatgcacgcgaatcctccgtcaccagccgcctcaactcactcatctcctctcaagccgatctgtcccgcgagctagggagactcgatctgctgcgcgcaaaccttgggtctcaagtcattgccacaaggtccatcagcaatggcatgctatcgtcagccgccgacacggctggccgactgtccaacagggtcaaagagctagacttggagaaggagagagtgcaggagacactcagcgtcgtagagcaggtggccgagctcaaagcttgtgtccatggtgttgtcggcagcatgggtgctcctcaggactgggaggccgctgcagcatacatctctcgcgccagcaaagttcccgagtccattatacgaggaggctttgcgtctgccattgtgccgagtgttgaggtgcccgatgcaccctgggtcacgctagaaaatgccaaggagagtctctgtgggctattcttgcgagagttcgaaaaggccgccaaggagggagatggtgccaaggtcacacggttcttcaaactattccctttgatcggacgaggtgatgttggcctggatgtctatggcaggtacgtctgtcaaggcgtcgccggcacagctagagccactctcaaagaagtccctggtggcgcaagcaggaacgacagcttcttctacgccaatgcactcaccaagttgttcgaacatatcgcgcagatcgttgagggccatggtactcttgttgagcgccattatggagagggtaagatggtgcgtgttattgagagactacagatggaagccgatgtccagggcggcatcatattagactcttggagcgacgaccggaatatcgataggaggctcacagatgtcaaaagctatccattctcatttctgattcagagcttcttaccacagcagagaacccttggtgggactcctcgtgtaaactcgcctgctgtcggaggcggcgcaaacccccgcgccagcgaggacgaaggcgtcaatgtaagagagatcgatgggcttctcaatgagatatctctcatgttgggccgatggtcactctattccaggttcttagctggaaaatgcaaggaccccaatgcctcggaagatgccgcgctatcaataccaaaagtgttgagtaactcaaatcttcagcggaaagtgacaacgaaacttgtcgagccttataatatcatgtcgactttcttctttcgtcgctctgtggagagggcatttcagctggatgagatgccttcaggattatcgttgagcttgaccaaaccgatcaatgccaatgcacctttcataatatcagctgttgacgacgtcatgtacattgtcagtgcagtcattcaaagatctacttcaacatcccagcgagaggtgatttccagtgtcgtatctacgttgggcagacttctgggcgccgacttcatagggatgatacaaaggaagatgcgagacgaatcgtacccgcgagctgttgtggctgggggcctgccactagaagacaagatagtggaattcatcgtgttgataaacagtctagacacatcgaacgactatctgtcccggatcatatctgcacgcctcgaaacctctcccgatcagccaaatgggactgcccagcaaaagccgcttgctgggtccttcccattcgaaaacgatattacatttgtcacgtcttccttaacaacactaaactcaagctttaccacgaagacgaccgaactcctcaacgaagggctgcaggtcctcttcggcacggtggtaaggctgaggctgcggccggtgatcgcggaaacattccgtgatgcagattattggcggacggaagaagagctcgcggagatagcgcagcagaacgaagaggacgaagaagagattgcagatcgcgtacccagacgcttcgaacaaggctgggatctactcatgaagcccatcgcaagacttatgaccaccaagacatacaactcactacttgacattacagccacgcatttggccaaacagatcctagaaaagagaatctggagttacagtggcaagacgaatgcttatggagctatccgcatggagcgcgatttcaatgggattatcagcactgttgtcaagggtaactatagcgttagggagatattcagcagagtgtcccagattctgatggtagccaacatggaagatgatgagtgggaagagctcatggaggctggcgatgatggtggcatcgaatgggtactgagccaagatgaaagacggagagcaaggaacttgatcagagattag

SEQ ID NO: 9350 - protein, 809 aa, Muscodor strobelii
  misc_feature: SGI Peptide ID NO. 562918
  misc_feature (192)..(535): Pfam Id: PF08318 Pfam Desc: COG4 transport protein
  misc_feature (8)..(809): NCBI GI: 242765298 Blast Desc: conserved [Talaromyces stipitatus ATCC 10500] gi|218724143|gb|EED23560.1| conserved [Talaromyces stipitatus ATCC 10500]
  misc_feature (35)..(808): NCBI GI: 189192250 Blast Desc: golgi transport complex subunit Cog4 [Pyrenophora tritici-repentis Pt-1C-BFP] gi|187974070|gb|EDU41569.1| golgi transport complex subunit Cog4 [Pyrenophora tritici-repentis
  misc_feature (24)..(808): NCBI GI: 70989737 Blast Desc: conserved [Aspergillus fumigatus Af293] gi|66847349|gb|EAL87680.1| conserved [Aspergillus fumigatus Af293] gi|159129126|gb|EDP54240.1| conserved [Aspergillus A1163]
  misc_feature (8)..(808): NCBI GI: 212528860 Blast Desc: conserved [Penicillium marneffei ATCC 18224] gi|210073985|gb|EEA28072.1| conserved [Penicillium marneffei ATCC 18224]
  misc_feature (8)..(808): NCBI GI: 119480363 Blast Desc: NFIA_082610 [Neosartorya fischeri NRRL 181] gi|119408364|gb|EAW18313.1| conserved [Neosartorya fischeri NRRL 181]
  misc_feature (8)..(808): NCBI GI: 255948190 Blast Desc: Pc22g08500 [Penicillium chrysogenum Wisconsin 54-1255] gi|211591879|emb|CAP98138.1| Pc22g08500 [Penicillium chrysogenum Wisconsin 54-1255]
  misc_feature (20)..(787): NCBI GI: 121715268 Blast Desc: conserved [Aspergillus clavatus NRRL 1] gi|119403400|gb|EAW13817.1| conserved [Aspergillus clavatus NRRL 1]
  misc_feature (25)..(799): NCBI GI: 67900950 Blast Desc: AN7462.2 [Aspergillus nidulans FGSC A4] gi|40742852|gb|EAA62042.1| AN7462.2 [Aspergillus nidulans FGSC A4] gi|259483768|tpe|CBF79428.1| TPA: Golgi complex component 4,
  misc_feature (1)..(807): NCBI GI: 238842174 Blast Desc: conserved oligomeric Golgi complex component 4 [Microsporum canis CBS 113480]
  misc_feature (32)..(808): NCBI GI: 115400737 Blast Desc: conserved [Aspergillus terreus NIH2624] gi|114191623|gb|EAU33323.1| conserved [Aspergillus terreus NIH2624]
MSANNVPNGDLAAPTHEPADKLNPSSSSSPSIRDASSLADVRATLAALHARESSVTSRLNSLISSQADLSRELGRLDLLRANLGSQVIATRSISNGMLSSAADTAGRLSNRVKELDLEKERVQETLSVVEQVAELKACVHGVVGSMGAPQDWEAAAAYISRASKVPESIIRGGFASAIVPSVEVPDAPWVTLENAKESLCGLFLREFEKAAKEGDGAKVTRFFKLFPLIGRGDVGLDVYGRYVCQGVAGTARATLKEVPGGASRNDSFFYANALTKLFEHIAQIVEGHGTLVERHYGEGKMVRVIERLQMEADVQGGIILDSWSDDRNIDRRLTDVKSYPFSFLIQSFLPQQRTLGGTPRVNSPAVGGGANPRASEDEGVNVREIDGLLNEISLMLGRWSLYSRFLAGKCKDPNASEDAALSIPKVLSNSNLQRKVTTKLVEPYNIMSTFFFRRSVERAFQLDEMPSGLSLSLTKPINANAPFIISAVDDVMYIVSAVIQRSTSTSQREVISSVVSTLGRLLGADFIGMIQRKMRDESYPRAVVAGGLPLEDKIVEFIVLINSLDTSNDYLSRIISARLETSPDQPNGTAQQKPLAGSFPFENDITFVTSSLTTLNSSFTTKTTELLNEGLQVLFGTVVRLRLRPVIAETFRDADYWRTEEELAEIAQQNEEDEEEIADRVPRRFEQGWDLLMKPIARLMTTKTYNSLLDITATHLAKQILEKRIWSYSGKTNAYGAIRMERDFNGIISTVVKGNYSVREIFSRVSQILMVANMEDDEWEELMEAGDDGGIEWVLSQDERRRARNLIRD

SEQ ID NO: 9351 - DNA, 2770 bp, Muscodor strobelii
  misc_feature: SGI EST ID NO. CUFF.22191.0
  misc_feature: Variant of the nucleotide sequence at SEQ ID NO 9349
cttaggtagtggtgcgtaacgtaggtaagtaacagcatcaaacccagtaacaaatcaccctacagatgcttgtgccttgagaacaccatttcgaataggtatcgccattacgaactcggcggtgctcccaacctccctttagacttggcgtgtcgtgtcgctcgctatgcgcctcctatcgccgatgtcccaatgtccgccaacaacgtccccaatggcgaccttgctgccccgacacacgagccggccgacaagctgaaccccagttcctcgtcgagcccctccatccgcgatgcctcgtccctcgccgacgttcgcgccacccttgctgccctccatgcacgcgaatcctccgtcaccagccgcctcaactcactcatctcctctcaagccgatctgtcccgcgagctagggagactcgatctgctgcgcgcaaaccttgggtctcaagtcattgccacaaggtccatcagcaatggcatgctatcgtcagccgccgacacggctggccgactgtccaacagggtcaaagagctagacttggagaaggagagagtgcaggagacactcagcgtcgtagagcaggtggccgagctcaaagcttgtgtccatggtgttgtcggcagcatgggtgctcctcaggactgggaggccgctgcagcatacatctctcgcgccagcaaagttcccgagtccattatacgaggaggctttgcgtctgccattgtgccgagtgttgaggtgcccgatgcaccctgggtcacgctagaaaatgccaaggagagtctctgtgggctattcttgcgagagttcgaaaaggccgccaaggagggagatggtgccaaggtcacacggttcttcaaactattccctttgatcggacgaggtgatgttggcctggatgtctatggcaggtacgtctgtcaaggcgtcgccggcacagctagagccactctcaaagaagtccctggtggcgcaagcaggaacgacagcttcttctacgccaatgcactcaccaagttgttcgaacatatcgcgcagatcgttgagggccatggtactcttgttgagcgccattatggagagggtaagatggtgcgtgttattgagagactacagatggaagccgatgtccagggcggcatcatattagactcttggagcgacgaccggaatatcgataggaggctcacagatgtcaaaagctatccattctcatttctgattcagagcttcttaccacagcagagaacccttggtgggactcctcgtgtaaactcgcctgctgtcggaggcggcgcaaacccccgcgccagcgaggacgaaggcgtcaatgtaagagagatcgatgggcttctcaatgagatatctctcatgttgggccgatggtcactctattccaggttcttagctggaaaatgcaaggaccccaatgcctcggaagatgccgcgctatcaataccaaaagtgttgagtaactcaaatcttcagcggaaagtgacaacgaaacttgtcgagccttataatatcatgtcgactttcttctttcgtcgctctgtggagagggcatttcagctggatgagatgccttcaggattatcgttgagcttgaccaaaccgatcaatgccaatgcacctttcataatatcagctgttgacgacgtcatgtacattgtcagtgcagtcattcaaagatctacttcaacatcccagcgagaggtgatttccagtgtcgtatctacgttgggcagacttctgggcgccgacttcatagggatgatacaaaggaagatgcgagacgaatcgtacccgcgagctgttgtggctgggggcctgccactagaagacaagatagtggaattcatcgtgttgataaacagtctagacacatcgaacgactatctgtcccggatcatatctgcacgcctcgaaacctctcccgatcagccaaatgggactgcccagcaaaagccgcttgctgggtccttcccattcgaaaacgatattacatttgtcacgtcttccttaacaacactaaactcaagctttaccacgaagacgaccgaactcctcaacgaagggctgcaggtcctcttcggcacggtggtaaggctgaggctgcggccggtgatcgcggaaacattccgtgatgcagattattggcggacggaagaagagctcgcggagatagcgcagcagaacgaagaggacgaagaagagattgcagatcgcgtacccagacgcttcgaacaaggctgggatctactcatgaagcccatcgcaagacttatgaccaccaagacatacaactcactacttgacattacagccacgcatttggccaaacagatcctagaaaagagaatctggagttacagtggcaagacgaatgcttatggagctatccgcatggagcgcgatttcaatgggattatcagcactgttgtcaagggtaactatagcgttagggagatattcagcagagtgtcccagattctgatggtagccaacatggaagatgatgagtgggaagagctcatggaggctggcgatgatggtggcatcgaatgggtactgagccaagatgaaagacggagagcaaggaacttgatcagagattagaagctgttgtatgactcggatcaatggcatgacatggcgtggcacaacttggcgaatagatcattgatatgttcagatggtagacaaaattgagggaagatccaaaccagttattccatcgccagttatcgtttataacttagacccg

SEQ ID NO: 9352 - DNA, 1320 bp, Muscodor strobelii
  misc_feature: SGI cDNA ID NO. 562919
  misc_feature: Encodes the peptide sequence at SEQ ID NO 9353
atgtctaaagatctaccgtcacaagttcagactcggatactcaaagtcaacagtaccgggctgggcaaatttaaagaaaatggcatagaaaggttaggcacatgggaggtatcttcggagccctcagaggatatgagatatcttcatgaagctgcaacttatctcaaaaccaaagacataccagtcgcattcccaacggagacagtatacggtctaggcgcagacgcgacgagaagccctgcagtgaagggtatttactctgctaaaggcagaccgtcggacaacccactcatcatccatatatctgatctggacatgcttcgagataccatcacacctgcgtctgaaacaaatggaacagcgaatggagatcatgaccggataccagagatctacaagcctctgatcgagcgattctggcctgggccactcacaatattaataccaaaccccacaccctcgagactcgcgcctgaggtcacagccgggctaaagagcttcggcgtgcgcatgccgtcatcgccattgtcgctctctttgatcaaactagttggcgcaccactagccgcaccatcagcaaacgcatccactaaaccctcgccaacaacagcagcacacgttttagaggatctagacggacgcatcgagctcatcatcgatggaggcgcatgcctggtcggagtagaaagcacagtcgtagacggactgtgcgaccctcctgttgtccttagaccaggtggtgtggggatagatgagttacgaagctgtcccgggtgggaaaatgtcgagaaggcatataaagaccagagcgagtccggtaaggcagcaccgagggcacctggtatgaagtacaaacactacagtcctaaggctaaagttgtgctttatgaggcatcttttccagacttacagaaggggattcagacggaagaccttgagcttacatcaggatcacacaacacagttggagtcatacgaactcgatattggccggcaggtggagagctgccatgtggctcattcgaagagcatgacaaggtcactactacagaagaagtagaaaaacaagccgtggtcgagcttgaggttagagaagcgattctaaagaattcactggacgggtcatcaataggaaaggtattggacattagcataggcaaggacaccagaagcatagcccaggggttgttttcggcgttacgggagctggatagacggggcgcagatatcatctttgtagagggcacggtagacgacgaggatatcggcgccgctgtcatgaataggttgcgcaaggcggcatcaaagatcaagccatag

SEQ ID NO: 9353 - protein, 439 aa, Muscodor strobelii
  misc_feature: SGI Peptide ID NO. 562919
  misc_feature (248)..(439): Pfam Id: PF03481 Pfam Desc: SUA5 domain
  misc_feature (52)..(246): Pfam Id: PF01300 Pfam Desc: yrdC domain
  misc_feature (383)..(435): Pfam Id: PF03481 Pfam Desc: SUA5 domain
  misc_feature (262)..(297): Pfam Id: PF03481 Pfam Desc: SUA5 domain
  misc_feature (62)..(246): Pfam Id: PF01300 Pfam Desc: yrdC domain
  misc_feature (9)..(438): NCBI GI: 46107246 Blast Desc: FG00506.1 [Gibberella zeae PH-1]
  misc_feature (9)..(438): NCBI GI: 256734533 Blast Desc: [Nectria haematococca mpVI 77-13-4]
  misc_feature (9)..(438): NCBI GI: 164427896 Blast Desc: NCU11234 [Neurospora crassa OR74A] gi|157071926|gb|EDO65325.1| conserved [Neurospora crassa OR74A]
  misc_feature (9)..(438): NCBI GI: 156062334 Blast Desc: SS1G_01283 [Sclerotinia sclerotiorum 1980] gi|154696619|gb|EDN96357.1| SS1G_01283 [Sclerotinia sclerotiorum 1980]
  misc_feature (30)..(438): NCBI GI: 39958882 Blast Desc: MGG_09295 [Magnaporthe grisea 70-15] gi|145013245|gb|EDJ97886.1| MGG_09295 [Magnaporthe grisea 70-15]
  misc_feature (5)..(434): NCBI GI: 67539818 Blast Desc: AN6079.2 [Aspergillus nidulans FGSC A4] gi|40738864|gb|EAA58054.1| AN6079.2 [Aspergillus nidulans FGSC A4]
  misc_feature (5)..(434): NCBI GI: 259479736 Blast Desc: TPA: translation initiation protein Sua5 (AFU_orthologue; AFUA_2G09160) [Aspergillus nidulans FGSC A4]
  misc_feature (61)..(439): NCBI GI: 171696344 Blast Desc: protein product [Podospora anserina] gi|170948414|emb|CAP60578.1| protein product [Podospora anserina]
  misc_feature (9)..(297): NCBI GI: 154297352 Blast Desc: BC1G_12080 [Botryotinia fuckeliana B05.10] gi|150858585|gb|EDN33777.1| BC1G_12080 [Botryotinia fuckeliana B05.10]
  misc_feature (10)..(437): NCBI GI: 119480771 Blast Desc: translation initiation protein Sua5 [Neosartorya fischeri NRRL 181] gi|119408568|gb|EAW18517.1| translation initiation protein Sua5 [Neosartorya fischeri NRRL 181]
MSKDLPSQVQTRILKVNSTGLGKFKENGIERLGTWEVSSEPSEDMRYLHEAATYLKTKDIPVAFPTETVYGLGADATRSPAVKGIYSAKGRPSDNPLIIHISDLDMLRDTITPASETNGTANGDHDRIPEIYKPLIERFWPGPLTILIPNPTPSRLAPEVTAGLKSFGVRMPSSPLSLSLIKLVGAPLAAPSANASTKPSPTTAAHVLEDLDGRIELIIDGGACLVGVESTVVDGLCDPPVVLRPGGVGIDELRSCPGWENVEKAYKDQSESGKAAPRAPGMKYKHYSPKAKVVLYEASFPDLQKGIQTEDLELTSGSHNTVGVIRTRYWPAGGELPCGSFEEHDKVTTTEEVEKQAVVELEVREAILKNSLDGSSIGKVLDISIGKDTRSIAQGLFSALRELDRRGADIIFVEGTVDDEDIGAAVMNRLRKAASKIKP

SEQ ID NO: 9354 - DNA, 585 bp, Muscodor strobelii
  misc_feature: SGI cDNA ID NO. 562920
  misc_feature: Encodes the peptide sequence at SEQ ID NO 9355
atgccgtctatgtccctgcaggcggtcaccgccgtcatcatcctcagcatcgacgacggctcccggatatttgccaagtactacaatgcaccccaccatgcgccgacaggctctaccaccagctccccatactcagatgtcaagtcgcaaaagtccttcgagaagggcctgctcgagaagacggcgaagcagaccggcgacatcatcctctacgacaacaagctcgtcttatacaagatggagtccgatgtcatgatgtacgtcgtcgccggcgctgacgagaacgaggtcttgttatataatgtcatcctcgccctgagagattccctgcatctactgttcaagcaatcggtagacaagcgcacagttgtcgagaactacgacctcgtttccctagccatcgacgagatcgttgacgacggcatcattctcgagaccgaccccaccatcattgtacagcgcgtcagcaaggcacccacccaagacgtcaacctcagccgtatcgacctgagcgaacagggcgtgaacaatctggcacagctcggcagagctaaattgacagactggctgcggcaaggtctgtaa

SEQ ID NO: 9355 - protein, 194 aa, Muscodor strobelii
  misc_feature: SGI Peptide ID NO. 562920
  misc_feature (8)..(162): Pfam Id: PF01217 Pfam Desc: Clathrin adaptor complex small chain
  misc_feature (94)..(162): Pfam Id: PF01217 Pfam Desc: Clathrin adaptor complex small chain
  misc_feature (2)..(194): NCBI GI: 46107244 Blast Desc: FG00505.1 [Gibberella zeae PH-1]
  misc_feature (2)..(194): NCBI GI: 256735249 Blast Desc: [Nectria haematococca mpVI 77-13-4]
  misc_feature (2)..(194): NCBI GI: 39958870 Blast Desc: conserved [Magnaporthe grisea 70-15] gi|145013246|gb|EDJ97887.1| conserved [Magnaporthe grisea 70-15]
  misc_feature (4)..(194): NCBI GI: 154297354 Blast Desc: coatomer zeta subunit [Botryotinia fuckeliana B05.10] gi|150858586|gb|EDN33778.1| coatomer zeta subunit [Botryotinia fuckeliana B05.10]
  misc_feature (2)..(194): NCBI GI: 85119594 Blast Desc: NCU02538 [Neurospora crassa OR74A] gi|28927481|gb|EAA36433.1| NCU02538 [Neurospora crassa OR74A]
  misc_feature (2)..(194): NCBI GI: 261356013 Blast Desc: coatomer zeta subunit [Verticillium albo-atrum VaMs.102]
  misc_feature (2)..(191): NCBI GI: 171696346 Blast Desc: protein product [Podospora anserina] gi|170948415|emb|CAP60579.1| protein product [Podospora anserina]
  misc_feature (20)..(194): NCBI GI: 116180918 Blast Desc: conserved [Chaetomium globosum CBS 148.51] gi|88185384|gb|EAQ92852.1| conserved [Chaetomium globosum CBS 148.51]
  misc_feature (4)..(194): NCBI GI: 169612958 Blast Desc: SNOG_09607 [Phaeosphaeria nodorum SN15] gi|111061752|gb|EAT82872.1| SNOG_09607 [Phaeosphaeria nodorum SN15]
  misc_feature (1)..(194): NCBI GI: 240275735 Blast Desc: coatomer zeta subunit [Ajellomyces capsulatus H143]
MPSMSLQAVTAVIILSIDDGSRIFAKYYNAPHHAPTGSTTSSPYSDVKSQKSFEKGLLEKTAKQTGDIILYDNKLVLYKMESDVMMYVVAGADENEVLLYNVILALRDSLHLLFKQSVDKRTVVENYDLVSLAIDEIVDDGIILETDPTIIVQRVSKAPTQDVNLSRIDLSEQGVNNLAQLGRAKLTDWLRQGL

SEQ ID NO: 9356 - DNA, 2429 bp, Muscodor strobelii
  misc_feature: SGI EST ID NO. CUFF.22194.0
  misc_feature: Variant of the nucleotide sequence at SEQ ID NO 9354
cgacgggatagcttgaccattgaactgaacaccatacacccatacaccgatatacgatattcgcaagcattcaacaagcattcaacaagcgcaacgacccaaaattcctcatcatctccttcctccaactcgagaacatcctcaggatgccgtctatgtccctgcaggcggtcaccgccgtcatcatcctcagcatcgacgacggctcccggatatttgccaagtactacaatgcaccccaccatgcgccgacaggctctaccaccagctccccatactcagatgtcaagtcgcaaaagtccttcgagaagggcctgctcgagaagacggcgaagcagaccggcgacatcatcctctacgacaacaagctcgtcttatacaagatggagtccgatgtcatgatgtacgtcgtcgccggcgctgacgagaacgaggtcttgttatataatgtcatcctcgccctgagagattccctgcatctactgttcaagcaatcggtagacaagcgcacagttgtcgagaactacgacctcgtttccctagccatcgacgagatcgttgacgacggcatcattctcgagaccgaccccaccatcattgtacagcgcgtcagcaaggcacccacccaagacgtcaacctcagccgtatcgacctgagcgaacagggcgtgaacaatctggcacagctcggcagagctaaattgacagactggctgcggcaaggtctgtaaactcgggttgcgagaggagcgaactgttacgtgtcatgaactaaaaaccaccagagggcgagctagagtagacatcccggcgttggtagtcaaaataatggcttctcaattttcaaagacattgaggtccttgagtggtgaggagtgcggttgactctctactatggcttgatctttgatgccgccttgcgcaacctattcatgacagcggcgccgatatcctcgtcgtctaccgtgccctctacaaagatgatatctgcgccccgtctatccagctcccgtaacgccgaaaacaacccctgggctatgcttctggtgtccttgcctatgctaatgtccaatacctttcctattgatgacccgtccagtgaattctttagaatcgcttctctaacctcaagctcgaccacggcttgtttttctacttcttctgtagtagtgaccttgtcatgctcttcgaatgagccacatggcagctctccacctgccggccaatatcgagttcgtatgactccaactgtgttgtgtgatcctgatgtaagctcaaggtcttccgtctgaatccccttctgtaagtctggaaaagatgcctcataaagcacaactttagccttaggactgtagtgtttgtacttcataccaggtgccctcggtgctgccttaccggactcgctctggtctttatatgccttctcgacattttcccacccgggacagcttcgtaactcatctatccccacaccacctggtctaaggacaacaggagggtcgcacagtccgtctacgactgtgctttctactccgaccaggcatgcgcctccatcgatgatgagctcgatgcgtccgtctagatcctctaaaacgtgtgctgctgttgttggcgagggtttagtggatgcgtttgctgatggtgcggctagtggtgcgccaactagtttgatcaaagagagcgacaatggcgatgacggcatgcgcacgccgaagctctttagcccggctgtgacctcaggcgcgagtctcgagggtgtggggtttggtattaatattgtgagtggcccaggccagaatcgctcgatcagaggcttgtagatctctggtatccggtcatgatctccattcgctgttccatttgtttcagacgcaggtgtgatggtatctcgaagcatgtccagatcagatatatggatgatgagtgggttgtccgacggtctgcctttagcagagtaaatacccttcactgcagggcttctcgtcgcgtctgcgcctagaccgtatactgtctccgttgggaatgcgactggtatgtctttggttttgagataagttgcagcttcatgaagatatctcatatcctctgagggctccgaagatacctcccatgtgcctaacctttctatgccattttctttaaatttgcccagcccggtactgttgactttgagtatccgagtctgaacttgtgacggtagatctttagacatggtactgtaggagctgcgaaaagctcgaacaatatggactgcgagtttcttcagtcccgccaatgtgaaatctgattcactaccaggtgtaagtctagaattagtgtgacgatgagaattgcgccgagagctgtgagaaataattatagcagaatctcgactttataccaaatgataataataagattcgcactgaagtgatattgtgagattgtct

SEQ ID NO: 9357 - DNA, 2985 bp, Muscodor strobelii
  misc_feature: SGI cDNA ID NO. 562921
  misc_feature: Encodes the peptide sequence at SEQ ID NO 9358
atgtcgtcgccttctcagcgccgtagcacgcggtcgtcccaggctggcaccccgggtcgcaacacccgctcctcacagcccgcttctcagactggcaatacaccccgcaacactcgatcttcccaattggcctctagccctatattttaccagtcttcgccttcgaatggcaatccagagactcccagcggaaacgaaaatggaggtgctgcccccagctcacccatgcggaccgatggagaccgcacacccagagcctccagccgcatgatcggtgaatcatcgcccatacgatacgagccgagttccagccctggcgcaggtctacaccctcagtcggaccttcgaagcgagagcagtgggcttttcgtcggcgcaactgccactcctcgcgcgagacgagcccagaggggcgacatcaactcggagatcttcagtggcggccctcgaagcagtagtagagtcattctcgacgaatccggtcgtgtcgtccgcgagattcactccgacgccgccactttttccaatttggacccaggaacctcagacgctgatgccctaggtggacaagataatgccaccatctggggtaccaccgtctctatcgacgacacatatgcctccttcaaagactttttgaagaacttcaccaagaaatatcggatgtggcaggatggcatgactacagaggagaccgatgccgaccccacggcaacaagcaaaccatactgggaagagctacagactatgctactacttggccagcgaattctctacgtcgatattcgagacttcaagctctatccgccaactagaaagatgtggcaccagatccaacactatcctcaggagatcgtgcccctgatggatcagtccgtacacgacatcatgattgagctagcacaagccgaaatgtcgagacaaagaagccagagcaatggggcttcggctacgcagcgaagctcggttccaagctccgacatgcatttccctagctcggagagaggagacgagcctacgccatctcaacgtccaccccagggtcccaccctcgaagaaaaggtaatggaccagacatatatgacgagaccttgggggttggatgaagtcatcaacctgagagatcttaatccatccgacatggacaaactcatctgtatcaagggcctcgtcatccggactacgcctgttatcccagatatgagacaagctttctttcggtgcagcatctgcagtcattcgcttctcgttggcctcgatcgaggcaagattcgagagccaaccgaatgccctcgacccaggtgcgcccaaaagaactcgatgcagattgttcacaatcgatgcgagttcgaggacaaacaggttatcaagctgcaagaaaccccagatgccgtgcctgctggacagacgcctcactcggtttctgtatgtgtgtacaacgagctggttgatttctgtaaggccggtgacaggatacgaatcactggtatctaccgtgtcagtcctgtccgagtcaatcctcgcatgcgcacggtaaagagtgtcttcaagacattcgtagatgtcgtgcatgtggccaaagtcgatgacaagcgcctcgatgctgacccttccactctggaacccgactcaaacgatgctgacaatcaaatcgaggaatcgcgaaagttaacgcccgaagaagaagagcagatcaaagccaccgcagctcgcccggatatatatgaactcctttcaaggtcgctagcaccttcgatctttgaaatggatgacgtgaagaagggtatactgttacagatgtttggcggcacgaacaagacgttcgaaaaaggcggtagtccgaaatatcgcggtgatatcaacgtattactatgcggtgatccctccaccgccaagtctcaattgctcaagtacgttcataagatcgcaccccgcggtgtgtacacgagtggaaagggttcgtccgcagtcggtctcactgcatatgtcagtcgcgatcccgagaccaggcagcttgtgcttgagtcaggtgcactcgttttgtccgatggtggtgtatgttgtattgatgaattcgataagatgtccgaggcgacgcgatcagttctacacgaagtaatggagcaacagaccgtgtcagttgccaaggctggtatcatcaccacgctgaatgctcgaacaagtattttggcctcagccaatcccattggctctcggtacaaccccgatcttcccgttccgcaaaatatcgatctacctccaacactattgtcacgattcgaccttgtctatctgatgcttgaccgcgccaacgaatcaagtgatagaagattagctcgtcatatgctatctatgtacctcgaagacaagcctcagtcggcaccgtcaaaagatgagattttgtctgtcgagttcttgacttcttacatctcgtacgcccgtgcgactgtgcatccggcgttatctcaagatgcctcgcaggcactggtagatgcctatgtgaagatgcgtaagctcggtcaggacgtccgcgccgccgagaagcgaattacagccacgacacgacagcttgaatccatgattcgactcgcagaggcgcacgccaagatgcgactgtccccgacggtgactaaggcagatgtcttagaagccgaaagactgatacaatcggcgctgaagacggcggctacagattcgcaaggtcgcattgatatgagtctactcactgaaggtacgagtgcggcggatcgcaaacgcaagtcggagctcaaagacgcggttctgcacttgttagacgacttaactggaggtggccaaactgttaggttcagcgaggtcagccgaaggttgaatgaaggcgccagcatccaggttgagccttcagatttcgcagagacgatgcgcgcccttgagatggaaggtgttattatgatcagtggcgagggcgcaaggaagagcgtcagacgtgtcactggcgtagcataa

SEQ ID NO: 9358 - protein, 994 aa, Muscodor strobelii
  misc_feature: SGI Peptide ID NO. 562921
  misc_feature (561)..(893): Pfam Id: PF00493 Pfam Desc: MCM2/3/5 family
  misc_feature (1)..(992): NCBI GI: 85119598 Blast Desc: cell division control protein 54 [Neurospora crassa OR74A] gi|28927482|gb|EAA36434.1| cell division control protein 54 [Neurospora crassa OR74A]
  misc_feature (1)..(992): NCBI GI: 171696348 Blast Desc: protein product [Podospora anserina] gi|170948416|emb|CAP60580.1| protein product [Podospora anserina]
  misc_feature (1)..(992): NCBI GI: 145605417 Blast Desc: MGG_09293 [Magnaporthe grisea 70-15] gi|145013247|gb|EDJ97888.1| MGG_09293 [Magnaporthe grisea 70-15]
  misc_feature (1)..(991): NCBI GI: 46107242 Blast Desc: FG00504.1 [Gibberella zeae PH-1]
  misc_feature (1)..(994): NCBI GI: 256734534 Blast Desc: [Nectria haematococca mpVI 77-13-4]
  misc_feature (1)..(993): NCBI GI: 261356014 Blast Desc: DNA replication licensing factor mcm4 [Verticillium albo-atrum VaMs.102]
  misc_feature (1)..(974): NCBI GI: 156062324 Blast Desc: SS1G_01278 [Sclerotinia sclerotiorum 1980] gi|154696614|gb|EDN96352.1| SS1G_01278 [Sclerotinia sclerotiorum 1980]
  misc_feature (1)..(992): NCBI GI: 189192304 Blast Desc: DNA replication licensing factor mcm4 [Pyrenophora tritici-repentis Pt-1C-BFP] gi|187974097|gb|EDU41596.1| DNA replication licensing factor mcm4 [Pyrenophora tritici-repentis
  misc_feature (1)..(992): NCBI GI: 169600827 Blast Desc: SNOG_03266 [Phaeosphaeria nodorum SN15] gi|160705525|gb|EAT89997.2| SNOG_03266 [Phaeosphaeria nodorum SN15]
  misc_feature (1)..(992): NCBI GI: 242765225 Blast Desc: DNA replication licensing factor Mcm4, [Talaromyces stipitatus ATCC 10500] gi|218724127|gb|EED23544.1| DNA replication licensing factor Mcm4, [Talaromyces stipitatus ATCC
MSSPSQRRSTRSSQAGTPGRNTRSSQPASQTGNTPRNTRSSQLASSPIFYQSSPSNGNPETPSGNENGGAAPSSPMRTDGDRTPRASSRMIGESSPIRYEPSSSPGAGLHPQSDLRSESSGLFVGATATPRARRAQRGDINSEIFSGGPRSSSRVILDESGRVVREIHSDAATFSNLDPGTSDADALGGQDNATIWGTTVSIDDTYASFKDFLKNFTKKYRMWQDGMTTEETDADPTATSKPYWEELQTMLLLGQRILYVDIRDFKLYPPTRKMWHQIQHYPQEIVPLMDQSVHDIMIELAQAEMSRQRSQSNGASATQRSSVPSSDMHFPSSERGDEPTPSQRPPQGPTLEEKVMDQTYMTRPWGLDEVINLRDLNPSDMDKLICIKGLVIRTTPVIPDMRQAFFRCSICSHSLLVGLDRGKIREPTECPRPRCAQKNSMQIVHNRCEFEDKQVIKLQETPDAVPAGQTPHSVSVCVYNELVDFCKAGDRIRITGIYRVSPVRVNPRMRTVKSVFKTFVDVVHVAKVDDKRLDADPSTLEPDSNDADNQIEESRKLTPEEEEQIKATAARPDIYELLSRSLAPSIFEMDDVKKGILLQMFGGTNKTFEKGGSPKYRGDINVLLCGDPSTAKSQLLKYVHKIAPRGVYTSGKGSSAVGLTAYVSRDPETRQLVLESGALVLSDGGVCCIDEFDKMSEATRSVLHEVMEQQTVSVAKAGIITTLNARTSILASANPIGSRYNPDLPVPQNIDLPPTLLSRFDLVYLMLDRANESSDRRLARHMLSMYLEDKPQSAPSKDEILSVEFLTSYISYARATVHPALSQDASQALVDAYVKMRKLGQDVRAAEKRITATTRQLESMIRLAEAHAKMRLSPTVTKADVLEAERLIQSALKTAATDSQGRIDMSLLTEGTSAADRKRKSELKDAVLHLLDDLTGGGQTVRFSEVSRRLNEGASIQVEPSDFAETMRALEMEGVIMISGEGARKSVRRVTGVA

SEQ ID NO: 9359 - DNA, 6228 bp, Muscodor strobelii
  misc_feature: SGI EST ID NO. CUFF.22247.0
  misc_feature: Variant of the nucleotide sequence at SEQ ID NO 9357
ctttggcgtgtccagcttgagaaagagcccccccttcacgacgatatccacttggtgttttctcccactcaccttcgactcacccgatcccacaccagattccaccctcattcttgaacgattgacaccaggcaaagacgcagttcacgattgatttaattgtctgagccaaaatgtcgtcgccttctcagcgccgtagcacgcggtcgtcccaggctggcaccccgggtcgcaacacccgctcctcacagcccgcttctcagactggcaatacaccccgcaacactcgatcttcccaattggcctctagccctatattttaccagtcttcgccttcgaatggcaatccagagactcccagcggaaacgaaaatggaggtgctgcccccagctcacccatgcggaccgatggagaccgcacacccagagcctccagccgcatgatcggtgaatcatcgcccatacgatacgagccgagttccagccctggcgcaggtctacaccctcagtcggaccttcgaagcgagagcagtgggcttttcgtcggcgcaactgccactcctcgcgcgagacgagcccagaggggcgacatcaactcggagatcttcagtggcggccctcgaagcagtagtagagtcattctcgacgaatccggtcgtgtcgtccgcgagattcactccgacgccgccactttttccaatttggacccaggaacctcagacgctgatgccctaggtggacaagataatgccaccatctggggtaccaccgtctctatcgacgacacatatgcctccttcaaagactttttgaagaacttcaccaagaaatatcggatgtggcaggatggcatgactacagaggagaccgatgccgaccccacggcaacaagcaaaccatactgggaagagctacagactatgctactacttggccagcgaattctctacgtcgatattcgagacttcaagctctatccgccaactagaaagatgtggcaccagatccaacactatcctcaggagatcgtgcccctgatggatcagtccgtacacgacatcatgattgagctagcacaagccgaaatgtcgagacaaagaagccagagcaatggggcttcggctacgcagcgaagctcggttccaagctccgacatgcatttccctagctcggagagaggagacgagcctacgccatctcaacgtccaccccagggtcccaccctcgaagaaaaggtaatggaccagacatatatgacgagaccttgggggttggatgaagtcatcaacctgagagatcttaatccatccgacatggacaaactcatctgtatcaagggcctcgtcatccggactacgcctgttatcccagatatgagacaagctttctttcggtgcagcatctgcagtcattcgcttctcgttggcctcgatcgaggcaagattcgagagccaaccgaatgccctcgacccaggtgcgcccaaaagaactcgatgcagattgttcacaatcgatgcgagttcgaggacaaacaggttatcaagctgcaagaaaccccagatgccgtgcctgctggacagacgcctcactcggtttctgtatgtgtgtacaacgagctggttgatttctgtaaggccggtgacaggatacgaatcactggtatctaccgtgtcagtcctgtccgagtcaatcctcgcatgcgcacggtaaagagtgtcttcaagacattcgtagatgtcgtgcatgtggccaaagtcgatgacaagcgcctcgatgctgacccttccactctggaacccgactcaaacgatgctgacaatcaaatcgaggaatcgcgaaagttaacgcccgaagaagaagagcagatcaaagccaccgcagctcgcccggatatatatgaactcctttcaaggtcgctagcaccttcgatctttgaaatggatgacgtgaagaagggtatactgttacagatgtttggcggcacgaacaagacgttcgaaaaaggcggtagtccgaaatatcgcggtgatatcaacgtattactatgcggtgatccctccaccgccaagtctcaattgctcaagtacgttcataagatcgcaccccgcggtgtgtacacgagtggaaagggttcgtccgcagtcggtctcactgcatatgtcagtcgcgatcccgagaccaggcagcttgtgcttgagtcaggtgcactcgttttgtccgatggtggtgtatgttgtattgatgaattcgataagatgtccgaggcgacgcgatcagttctacacgaagtaatggagcaacagaccgtgtcagttgccaaggctggtatcatcaccacgctgaatgctcgaacaagtattttggcctcagccaatcccattggctctcggtacaaccccgatcttcccgttccgcaaaatatcgatctacctccaacactattgtcacgattcgaccttgtctatctgatgcttgaccgcgccaacgaatcaagtgatagaagattagctcgtcatatgctatctatgtacctcgaagacaagcctcagtcggcaccgtcaaaagatgagattttgtctgtcgagttcttgacttcttacatctcgtacgcccgtgcgactgtgcatccggcgttatctcaagatgcctcgcaggcactggtagatgcctatgtgaagatgcgtaagctcggtcaggacgtccgcgccgccgagaagcgaattacagccacgacacgacagcttgaatccatgattcgactcgcagaggcgcacgccaagatgcgactgtccccgacggtgactaaggcagatgtcttagaagccgaaagactgatacaatcggcgctgaagacggcggctacagattcgcaaggtcgcattgatatgagtctactcactgaaggtacgagtgcggcggatcgcaaacgcaagtcggagctcaaagacgcggttctgcacttgttagacgacttaactggaggtggccaaactgttaggttcagcgaggtcagccgaaggttgaatgaaggcgccagcatccaggttgagccttcagatttcgcagagacgatgcgcgcccttgagatggaaggtgttattatgatcagtggcgagggcgcaaggaagagcgtcagacgtgtcactggcgtagcataaaggttttgaatcttcaaagacaaaaggcaatgggtataaggatatatgggctgttggcgttattagatgttggtgaggataccagttcggcgttgaggcatgtaaatgaccagcaaggcctggctacggtacatactgtaacatgagctaatgatgaagaataatgaagagggaagaaatgagtttgagaagacatgacttgatgaacaatgttcttttcgatgtttgtcatatcggtcgtgtttcttgccttggatgttatggagagcaatctgttagtatccaggttgtcttggcgaactggcctagtacacccaccctctctgtcgatcacagctctctcctctttctttccagcaggcagagtgggaactctacgattcaccaaatgctcactttccaaagccaaaatggactgcagcaaagtgtccagttttcacatgcaatcggactatctcagtggtgggcgatgacgtcaagccaatcaactctccacgaactggagtaaagctggagcctcaacatgagagtgctcggacacaatgtccagtatttgaggaatgatttccagggtctagtaatacccttaattattcctggtttaaaggtctaatgattcccctcattatcacctcctcctgacgatagcatctatttcagacttcacactaatatggcataccagtcgaaagaagcgtaccctcaacctgattttatccacactaatcaccagtggtcgcccatcaatgatcaatggagtatcctatttgatgacgacgatgttggactaaaggaatcgtggcatatcaatggcgtgcctgatagagtctctgtgagcgcaacggcacgtacaagcgcagaggcagaggcagagggccaacggcttgctgcatttcccgagctcattgctaagggttttaagaatcacaaggcagaaagaaacgagaatgtgaaacagcctatcaatgtgcctttcgtattccaagcaccagcctccggcctgaaagagaagaacgcacacgaggtgctatggtacgaaagaccgatttcagatccccgcagcgaagccgaaatcaacgccggggaccgtgtgcttgttcgatttggagccgttgattacgaagtctgtgtctgggtcgcggggtactttgtcggcaaacataggggcggccatgttccttttgatgtcgatattacagatgccctcgtcagtgctcggaataggactgggaagggtaatttgcagatggttcttcgcgtgtgggactcaccgtatgatcttgcgcaacctcgtgggaaacagtattgggcaccccaaccggagagcatcttctacacgccatcgagcggtatctggcagtctgtcatccttgaaaccgtgccggctgctcgtatcggtaacagcagttctggtacaatattaaagtccaacgatatctacaacgggacattggacgccaaagtcgctgtgctaggtcgaagagcaggccacggccacagtgttgagatcgagggtagtttgaacggacttgtcatcgagagcaaaaaggaaagcttgccgaaggaaaaggactacgcattcatcaaactacccctggcgttaagcgaggagcagaggaaagtcgcacctcaggctgtgactggcattgcgccatttgacgatacagattgttggcacgagggcctcgcactctggtctccggatcatcctatactttacgatctcatcattcggctttacgactctgacggcaacgtcatcgatgaggtcaagacatacacgggcttccgacatctggactggacgaaaggggacggaacattccgtttgaacgggaagccgctattccaagctctgaatctcgaccagggatactggcccgagacgggaatgacaccgccgtccccagagagttcaaaaacagatatcgagctcgcgaagaagatgggattcaacggctgtcggaaacaccagaaggttgaggatccagtgttcttgtactgggctgataagcttgggtatcttgtctggggcgagtatgcaaacgcttatgagttcaacgacgagtacatggatcgcattaatcaagagtggacagaagctgtgaggagagacatcaatcatccttctgttattacttggacgcctgttaatgagtcttggggatatccggatttgaaggggagtgttcaacaacggaatcatttgcgttcgttgtactatctgacgaagacactcgatcccacacggccagtaaacgacaactgtggatgggaacatgtattgaccgacctgagtacattccacgactactcagacgcaccggctctcacaaaatcctgcgcgacacttgaaaagactctagagcgcgactgggctggccggcctatgttcgtcggcgccatcggagacattgattccgcgacaaaacaccggccaggggcacctttgatctgcaccgagttcgctggagtcaatattgcgcctaagggagcaacgggcgatgagatccagccgcaaggcggcggaggcgattggggatacacaacagcgagtgatgcaacagatctattgaagcgtgtagaagcgcttgttaaagccgtcattcaggggagtcattgtagcgggttcgtgtacacacaactgaccgacatagaacaagaagtcaacggactgtattcatttgatcggagggagaagataccggccgccgaggtgaagaagatatttgacgcggcgcagaagagctatcatgatcacctggccagcaggttatcataaagaaaggaaaatttagcgttataggaattgcaaggcttatgaggcacggacattgatcatgatgcctcttttgggtggtcagaagaaaaggatcaggatgaggcgggaactagaccgccctactgtggctatttataactaccggccgatgaggctctgcggtcaattatagtcttacttcttgcatccactcatgatcttttgacgaatatcaaatcataactagtctgagccatatgatttgtttctataagtaagaaatatacgtgcaacgggattagtgccggg

SEQ ID NO: 9360 - DNA, 2109 bp, Muscodor strobelii
  misc_feature: SGI cDNA ID NO. 562922
  misc_feature: Encodes the peptide sequence at SEQ ID NO 9361
atggcataccagtcgaaagaagcgtaccctcaacctgattttatccacactaatcaccagtggtcgcccatcaatgatcaatggagtatcctatttgatgacgacgatgttggactaaaggaatcgtggcatatcaatggcgtgcctgatagagtctctgtgagcgcaacggcacgtacaagcgcagaggcagaggcagagggccaacggcttgctgcatttcccgagctcattgctaagggttttaagaatcacaaggcagaaagaaacgagaatgtgaaacagcctatcaatgtgcctttcgtattccaagcaccagcctccggcctgaaagagaagaacgcacacgaggtgctatggtacgaaagaccgatttcagatccccgcagcgaagccgaaatcaacgccggggaccgtgtgcttgttcgatttggagccgttgattacgaagtctgtgtctgggtcgcggggtactttgtcggcaaacataggggcggccatgttccttttgatgtcgatattacagatgccctcgtcagtgctcggaataggactgggaagggtaatttgcagatggttcttcgcgtgtgggactcaccgtatgatcttgcgcaacctcgtgggaaacagtattgggcaccccaaccggagagcatcttctacacgccatcgagcggtatctggcagtctgtcatccttgaaaccgtgccggctgctcgtatcggtaacagcagttctggtacaatattaaagtccaacgatatctacaacgggacattggacgccaaagtcgctgtgctaggtcgaagagcaggccacggccacagtgttgagatcgagggtagtttgaacggacttgtcatcgagagcaaaaaggaaagcttgccgaaggaaaaggactacgcattcatcaaactacccctggcgttaagcgaggagcagaggaaagtcgcacctcaggctgtgactggcattgcgccatttgacgatacagattgttggcacgagggcctcgcactctggtctccggatcatcctatactttacgatctcatcattcggctttacgactctgacggcaacgtcatcgatgaggtcaagacatacacgggcttccgacatctggactggacgaaaggggacggaacattccgtttgaacgggaagccgctattccaagctctgaatctcgaccagggatactggcccgagacgggaatgacaccgccgtccccagagagttcaaaaacagatatcgagctcgcgaagaagatgggattcaacggctgtcggaaacaccagaaggttgaggatccagtgttcttgtactgggctgataagcttgggtatcttgtctggggcgagtatgcaaacgcttatgagttcaacgacgagtacatggatcgcattaatcaagagtggacagaagctgtgaggagagacatcaatcatccttctgttattacttggacgcctgttaatgagtcttggggatatccggatttgaaggggagtgttcaacaacggaatcatttgcgttcgttgtactatctgacgaagacactcgatcccacacggccagtaaacgacaactgtggatgggaacatgtattgaccgacctgagtacattccacgactactcagacgcaccggctctcacaaaatcctgcgcgacacttgaaaagactctagagcgcgactgggctggccggcctatgttcgtcggcgccatcggagacattgattccgcgacaaaacaccggccaggggcacctttgatctgcaccgagttcgctggagtcaatattgcgcctaagggagcaacgggcgatgagatccagccgcaaggcggcggaggcgattggggatacacaacagcgagtgatgcaacagatctattgaagcgtgtagaagcgcttgttaaagccgtcattcaggggagtcattgtagcgggttcgtgtacacacaactgaccgacatagaacaagaagtcaacggactgtattcatttgatcggagggagaagataccggccgccgaggtgaagaagatatttgacgcggcgcagaagagctatcatgatcacctggccagcaggttatcataa

SEQ ID NO: 9361 - protein, 702 aa, Muscodor strobelii
  misc_feature: SGI Peptide ID NO. 562922
  misc_feature (239)..(373): Pfam Id: PF00703 Pfam Desc: Glycosyl hydrolases family 2, immunoglobulin-like beta-sandwich domain
  misc_feature (381)..(691): Pfam Id: PF02836 Pfam Desc: Glycosyl hydrolases family 2, TIM barrel domain
  misc_feature (18)..(237): Pfam Id: PF02837 Pfam Desc: Glycosyl hydrolases family 2, sugar binding domain
  misc_feature (336)..(373): Pfam Id: PF00703 Pfam Desc: Glycosyl hydrolases family 2, immunoglobulin-like beta-sandwich domain
  misc_feature (475)..(528): Pfam Id: PF02836 Pfam Desc: Glycosyl hydrolases family 2, TIM barrel domain
  misc_feature (96)..(237): Pfam Id: PF02837 Pfam Desc: Glycosyl hydrolases family 2, sugar binding domain
  misc_feature (8)..(697): NCBI GI: 256725648 Blast Desc: glycoside hydrolase family 2 [Nectria haematococca mpVI 77-13-4]
  misc_feature (9)..(693): NCBI GI: 169611308 Blast Desc: SNOG_08764 [Phaeosphaeria nodorum SN15] gi|111062812|gb|EAT83932.1| SNOG_08764 [Phaeosphaeria nodorum SN15]
  misc_feature (8)..(697): NCBI GI: 46111119 Blast Desc: FG02441.1 [Gibberella zeae PH-1]
  misc_feature (5)..(700): NCBI GI: 261202038 Blast Desc: glycoside hydrolase family 2 multidomain protein [Ajellomyces dermatitidis SLH14081] gi|239590330|gb|EEQ72911.1| glycoside hydrolase family 2 multidomain protein [Ajellomyces
  misc_feature (5)..(700): NCBI GI: 239612042 Blast Desc: glycoside hydrolase family 2 multidomain protein [Ajellomyces dermatitidis ER-3]
  misc_feature (8)..(700): NCBI GI: 238493107 Blast Desc: glycoside hydrolase family 2 protein [Aspergillus flavus NRRL3357] gi|220696284|gb|EED52626.1| glycoside hydrolase family 2 protein [Aspergillus flavus NRRL3357]
  misc_feature (8)..(700): NCBI GI: 145236322 Blast Desc: protein product [Aspergillus niger] gi|134075261|emb|CAK44902.1| protein product [Aspergillus niger]
  misc_feature (9)..(702): NCBI GI: 115443120 Blast Desc: conserved [Aspergillus terreus NIH2624] gi|114188236|gb|EAU29936.1| conserved [Aspergillus terreus NIH2624]
  misc_feature (8)..(693): NCBI GI: 189206013 Blast Desc: glycoside hydrolase family 2 protein [Pyrenophora tritici-repentis Pt-1C-BFP] gi|187975434|gb|EDU42060.1| glycoside hydrolase family 2 protein [Pyrenophora tritici-repentis
  misc_feature (9)..(694): NCBI GI: 261354458 Blast Desc: glycoside hydrolase family 2 sugar binding [Verticillium albo-atrum VaMs.102]
  misc_feature (106)..(547): SWISSPROT Homolog: EC 3.2.1.23 Beta-galactosidase
MAYQSKEAYPQPDFIHTNHQWSPINDQWSILFDDDDVGLKESWHINGVPDRVSVSATARTSAEAEAEGQRLAAFPELIAKGFKNHKAERNENVKQPINVPFVFQAPASGLKEKNAHEVLWYERPISDPRSEAEINAGDRVLVRFGAVDYEVCVWVAGYFVGKHRGGHVPFDVDITDALVSARNRTGKGNLQMVLRVWDSPYDLAQPRGKQYWAPQPESIFYTPSSGIWQSVILETVPAARIGNSSSGTILKSNDIYNGTLDAKVAVLGRRAGHGHSVEIEGSLNGLVIESKKESLPKEKDYAFIKLPLALSEEQRKVAPQAVTGIAPFDDTDCWHEGLALWSPDHPILYDLIIRLYDSDGNVIDEVKTYTGFRHLDWTKGDGTFRLNGKPLFQALNLDQGYWPETGMTPPSPESSKTDIELAKKMGFNGCRKHQKVEDPVFLYWADKLGYLVWGEYANAYEFNDEYMDRINQEWTEAVRRDINHPSVITWTPVNESWGYPDLKGSVQQRNHLRSLYYLTKTLDPTRPVNDNCGWEHVLTDLSTFHDYSDAPALTKSCATLEKTLERDWAGRPMFVGAIGDIDSATKHRPGAPLICTEFAGVNIAPKGATGDEIQPQGGGGDWGYTTASDATDLLKRVEALVKAVIQGSHCSGFVYTQLTDIEQEVNGLYSFDRREKIPAAEVKKIFDAAQKSYHDHLASRLS

SEQ ID NO: 9362 - DNA, 6228 bp, Muscodor strobelii; identical to SEQ ID NO: 9359
  misc_feature: SGI EST ID NO. CUFF.22247.0
  misc_feature: Variant of the nucleotide sequence at SEQ ID NO 9360

SEQ ID NO: 9363 - DNA, 870 bp, Muscodor strobelii
  misc_feature: SGI cDNA ID NO. 562923
  misc_feature: Encodes the peptide sequence at SEQ ID NO 9364
atgtcgaacattataaccaacacccacggcatatatcttcctccacgatatgtgatccgacgtttagaccacacagtcttagaatgggtagttgccatgggtatcgagggttttatgcttcgtgataactcaatctggaaacccctgctgccacacccgaagacagccaatgctctccgtgggctcgacaagctagcaggatactaccaacatgcgcttgtaagcggattttccttcggcatcttcgatacgcaatatgttttctcgcatccccagtctgctgccacgggtcgaatgttgcactggcgaggaggccttgatcctggtcaactagagttcgagacgtatggagcagatcagatgcgcaccgcgatggactttccattagtctgtatggctctctcttgtgacgctttcgcgccaatggatcctcgtgttatgcagaatgtgaacgagttgatgccacttcaaactcaactcagcacctttctgagctctgcggctgacgactttggcaagggcaagggcaagccttcgaggggatcagtcacagattatgggcaaattctctctcgatttggctgtgtaactcgcccgggttatgagaatcagggtcttgctaccgcgctcaatcatttcgtgatgcttgaggctaaggcctggggattccggggtattcgagtgggcactggcaatgcctctgtactacgatgttggatggatccaccaaaaggctgcaaaagcgatattgtggcacattggaactttgaagacatcgagatgcaggacgaagagggtcgcaagattaagccgtatgtcggcacaggcatgcgagatggctgggaagtgtattgcaacttaactggctaa

SEQ ID NO: 9364 - protein, 289 aa, Muscodor strobelii
  misc_feature: SGI Peptide ID NO. 562923
  misc_feature (11)..(288): NCBI GI: 238489981 Blast Desc: conserved [Aspergillus flavus NRRL3357] gi|220698616|gb|EED54956.1| conserved [Aspergillus flavus NRRL3357]
  misc_feature (1)..(259): NCBI GI: 154280685 Blast Desc: [Ajellomyces capsulatus NAm1] gi|150411334|gb|EDN06722.1| [Ajellomyces capsulatus NAm1]
  misc_feature (16)..(276): NCBI GI: 242793909 Blast Desc: conserved [Talaromyces stipitatus ATCC 10500] gi|218718850|gb|EED18270.1| conserved [Talaromyces stipitatus ATCC 10500]
  misc_feature (13)..(272): NCBI GI: 255955019 Blast Desc: [Penicillium chrysogenum Wisconsin 54-1255] gi|211589973|emb|CAP96128.1| [Penicillium chrysogenum Wisconsin 54-1255]
  misc_feature (1)..(259): NCBI GI: 240273340 Blast Desc: conserved [Ajellomyces capsulatus H143]
  misc_feature (1)..(259): NCBI GI: 225558102 Blast Desc: conserved [Ajellomyces capsulatus G186AR]
  misc_feature (16)..(267): NCBI GI: 212535732 Blast Desc: conserved [Penicillium marneffei ATCC 18224] gi|210070421|gb|EEA24511.1| conserved [Penicillium marneffei ATCC 18224]
  misc_feature (13)..(269): NCBI GI: 242805555 Blast Desc: conserved [Talaromyces stipitatus ATCC 10500] gi|218715181|gb|EED14603.1| conserved [Talaromyces stipitatus ATCC 10500]
  misc_feature (13)..(278): NCBI GI: 189192388 Blast Desc: conserved [Pyrenophora tritici-repentis Pt-1C-BFP] gi|187974139|gb|EDU41638.1| conserved [Pyrenophora tritici-repentis Pt-1C-BFP]
  misc_feature (13)..(251): NCBI GI: 116182746 Blast Desc: [Chaetomium globosum CBS 148.51] gi|88186298|gb|EAQ93766.1| [Chaetomium globosum CBS 148.51]
MSNIITNTHGIYLPPRYVIRRLDHTVLEWVVAMGIEGFMLRDNSIWKPLLPHPKTANALRGLDKLAGYYQHALVSGFSFGIFDTQYVFSHPQSAATGRMLHWRGGLDPGQLEFETYGADQMRTAMDFPLVCMALSCDAFAPMDPRVMQNVNELMPLQTQLSTFLSSAADDFGKGKGKPSRGSVTDYGQILSRFGCVTRPGYENQGLATALNHFVMLEAKAWGFRGIRVGTGNASVLRCWMDPPKGCKSDIVAHWNFEDIEMQDEEGRKIKPYVGTGMRDGWEVYCNLTG

SEQ ID NO: 9365 - DNA, 608 bp, Muscodor strobelii
  misc_feature: SGI EST ID NO. CUFF.22211.0
  misc_feature: Variant of the nucleotide sequence at SEQ ID NO 9363
cagatgcgcaccgcgatggactttccattagtctgtatggctctctcttgtgacgctttcgcgccaatggatcctcgtgttatgcagaatgtgaacgagttgatgccacttcaaactcaactcagcacctttctgagctctgcggctgacgactttggcaagggcaagggcaagccttcgaggggatcagtcacagattatgggcaaattctctctcgatttggctgtgtaactcgcccgggttatgagaatcagggtcttgctaccgcgctcaatcatttcgtgatgcttgaggctaaggcctggggattccggggtattcgagtgggcactggcaatgcctctgtactacgatgttggatggatccaccaaaaggctgcaaaagcgatattgtggcacattggaactttgaagacatcgagatgcaggacgaagagggtcgcaagattaagccgtatgtcggcacaggcatgcgagatggctgggaagtgtattgcaacttaactggctaatcgaggaatcatatgaccttgtagcgctttgaggtacatagcgatctcgtttgtctctattcggagttttttcatcatagcctgatggagttgag

SEQ ID NO: 9366 - DNA, 1419 bp, Muscodor strobelii
  misc_feature: SGI cDNA ID NO. 562924
  misc_feature: Encodes the peptide sequence at SEQ ID NO 9367
atggcgtcgctttaccgcatcgcaggctgcggcgccagacgcctgcagcttgctacagctcctagatcaccgtccgccgccctccgcgccttttcgtcgacacctcgccgccgctatgcctccccgaccgccgacaccaacgagctgcccggccgtacgacgctcatgcccgtggaccccgacttcgcgcacccggccgacccctacggcatgcagcgcaaccagaacaccgagggcacgcttgatgcctcgcgcgagggcagcgtcagcgaccgcaaggtccgtcactacacggtcaacttcgggccccagcacccggctgcccacggtgtgctgcgtctgattctcgagctgagcggagaagagatcgtccgcgccgatcctcacgtcggcctgctgcatcgtggcactgagaagttgatcgagtacaagacgtacctgcaggccctgccctacttcgaccgtctcgactacgtctccatgatgaccaacgagcagtgcttcgccctcgccgtcgagaagctgctcaacgtcgagatccccgagcgcgccaagtggatccgcaccatgttcggcgagatcacccgcatcctcaaccacctcatgtccgtcctatcccacgccatggacgtcggtgccttgacgcctttcctgtggggggagttctacgagcgtgtgtctggcgcccgtctgcacgccgcctacgtaaggcctggtggtgtccaccaggatatccccgtcggtctgctcgacgacatctaccaatgggccacccagttcggcgaccgtatcgacgagaccgaagagatgctgacagacaaccgaatttggattcagcggttgaagggtgtcggtgtcgttcccgccactgaggctttgaatctatctttcactggtgtcatgttgcgaggttcgggtgtgcctttcgatatccggaaaagccagccctacgatgcctacgaccaggtcgaattcgatgtgcccgtcggtgtcaacggtgactgctacgacagatatctgtgccgcatggaagagttccgacagtctctccgcatcatccaccagtgcttgaacaagatgcccgctggccccgttcgagtagaagactacaaggtatcgccacccccaagaaccgccatgaaggagaacatggaggctctcatccaccatttccttctctacaccaagggctactccgttcctcctggagagacctactccgccatcgaggcacccaagggtgagatgggtgtctacgttgtcagtgacggcagcgagagaccctaccgatgccacatccgcgcacccggtttcgcccatctgggtggtttcgaccacgtctccaagggtcacttgctagccgacgctgtcgctgtaattggtactatggatttggtgttcggtgaggttgacaggtga

SEQ ID NO: 9367 - protein, 472 aa, Muscodor strobelii
  misc_feature: SGI Peptide ID NO. 562924
  misc_feature (210)..(472): Pfam Id: PF00346 Pfam Desc: Respiratory-chain NADH dehydrogenase, 49 Kd subunit
  misc_feature (1)..(472): NCBI GI: 46105501 Blast Desc: NUCM_NEUCR NADH-ubiquinone oxidoreductase 49 kDa subunit, mitochondrial precursor (Complex I-49KD) (CI-49KD) [Gibberella zeae PH-1]
  misc_feature (1)..(472): NCBI GI: 171696334 Blast Desc: protein product [Podospora anserina] gi|170948409|emb|CAP60573.1| protein product [Podospora anserina]
  misc_feature (1)..(472): NCBI GI: 261356168 Blast Desc: NADH-ubiquinone oxidoreductase 49 kDa subunit [Verticillium albo-atrum VaMs.102]
  misc_feature (1)..(472): NCBI GI: 39958762 Blast Desc: NADH-ubiquinone oxidoreductase 49 kDa subunit, mitochondrial precursor [Magnaporthe grisea 70-15] gi|145013257|gb|EDJ97898.1| NADH-ubiquinone oxidoreductase 49 kDa
  misc_feature (2)..(472): NCBI GI: 116180928 Blast Desc: NADH-ubiquinone oxidoreductase 49 kDa subunit, mitochondrial precursor [Chaetomium globosum CBS 148.51] gi|88185389|gb|EAQ92857.1| NADH-ubiquinone oxidoreductase 49 kDa
  misc_feature (3)..(472): NCBI GI: 164427900 Blast Desc: NADH:ubiquinone oxidoreductase 49kD subunit [Neurospora crassa OR74A] gi|166204145|sp|P22142.2|NDUS2_NEUCR RecName: Full=NADH-ubiquinone oxidoreductase 49 kDa subunit, 49kD
  misc_feature (3)..(472): NCBI GI: 3048 Blast Desc: NADH dehydrogenase 49 kD subunit [Neurospora crassa]
  misc_feature (2)..(472): NCBI GI: 119481603 Blast Desc: NADH-ubiquinone oxidoreductase 49 kDa subunit, [Neosartorya fischeri NRRL 181] gi|119408984|gb|EAW18933.1| NADH-ubiquinone oxidoreductase 49 kDa subunit, [Neosartorya NRRL
  misc_feature (2)..(472): NCBI GI: 146322982 Blast Desc: NADH-ubiquinone oxidoreductase 49 kDa subunit [Aspergillus fumigatus Af293] gi|129558557|gb|EAL93666.2| NADH-ubiquinone oxidoreductase 49 kDa subunit, [Aspergillus 49
  misc_feature (2)..(472): NCBI GI: 156061625 Blast Desc: NADH dehydrogenase I, D subunit [Sclerotinia sclerotiorum 1980] gi|154700359|gb|EDO00098.1| NADH dehydrogenase I, D subunit [Sclerotinia sclerotiorum 1980]
  misc_feature (3)..(472): SWISSPROT Homolog: EC 1.6.5.3 NADH dehydrogenase (ubiquinone)
  misc_feature (3)..(472): SWISSPROT Homolog: EC 1.6.99.3 NADH dehydrogenase
MASLYRIAGCGARRLQLATAPRSPSAALRAFSSTPRRRYASPTADTNELPGRTTLMPVDPDFAHPADPYGMQRNQNTEGTLDASREGSVSDRKVRHYTVNFGPQHPAAHGVLRLILELSGEEIVRADPHVGLLHRGTEKLIEYKTYLQALPYFDRLDYVSMMTNEQCFALAVEKLLNVEIPERAKWIRTMFGEITRILNHLMSVLSHAMDVGALTPFLWGEFYERVSGARLHAAYVRPGGVHQDIPVGLLDDIYQWATQFGDRIDETEEMLTDNRIWIQRLKGVGVVPATEALNLSFTGVMLRGSGVPFDIRKSQPYDAYDQVEFDVPVGVNGDCYDRYLCRMEEFRQSLRIIHQCLNKMPAGPVRVEDYKVSPPPRTAMKENMEALIHHFLLYTKGYSVPPGETYSAIEAPKGEMGVYVVSDGSERPYRCHIRAPGFAHLGGFDHVSKGHLLADAVAVIGTMDLVFGEVDR

SEQ ID NO: 9368 - DNA, 1995 bp, Muscodor strobelii
  misc_feature: SGI EST ID NO. CUFF.22401.1
  misc_feature: Variant of the nucleotide sequence at SEQ ID NO 9366
cgagccaatgacgaggagattaaatccaattggactcggattggacaagagcaacgtcgaagctccaactgaggtgtatccgagatcaaagcacgtcgtcgccaccgaggtcgatgagctgcaccatcgccaattgaccagcccacaccgcaaatggcgtcgctttaccgcatcgcaggctgcggcgccagacgcctgcagcttgctacagctcctagatcaccgtccgccgccctccgcgccttttcgtcgacacctcgccgccgctatgcctccccgaccgccgacaccaacgagctgcccggccgtacgacgctcatgcccgtggaccccgacttcgcgcacccggccgacccctacggcatgcagcgcaaccagaacaccgagggcacgcttgatgcctcgcgcgagggcagcgtcagcgaccgcaaggtccgtcactacacggtcaacttcgggccccagcacccggctgcccacggtgtgctgcgtctgattctcgagctgagcggagaagagatcgtccgcgccgatcctcacgtcggcctgctgcatcgtggcactgagaagttgatcgagtacaagacgtacctgcaggccctgccctacttcgaccgtctcgactacgtctccatgatgaccaacgagcagtgcttcgccctcgccgtcgagaagctgctcaacgtcgagatccccgagcgcgccaagtggatccgcaccatgttcggcgagatcacccgcatcctcaaccacctcatgtccgtcctatcccacgccatggacgtcggtgccttgacgcctttcctgtggggggttcgaggagcgtgagaagctgatgtccatgagagatacaaaagatactgatgcaacaaataggagttctacgagcgtgtgtctggcgcccgtctgcacgccgcctacgtaaggcctggtggtgtccaccaggatatccccgtcggtctgctcgacgacatctaccaatgggccacccagttcggcgaccgtatcgacgagaccgaagagatgctgacagacaaccgaatttggattcagcggttgaagggtgtcggtgtcgttcccgccactgaggctttgaatctatctttcactggtgtcatgttgcgaggttcgggtgtgcctttcgatatccggaaaagccagccctacgatgcctacgaccaggtcgaattcgatgtgcccgtcggtgtcaacggtgactgctacgacagatatctgtgccgcatggaagagttccgacagtctctccgcatcatccaccagtgcttgaacaagatgcccgctggccccgttcgagtagaagactacaaggtatcgccacccccaagaaccgccatgaaggagaacatggaggctctcatccaccatttccttctctacaccaagggctactccgttcctcctggagagacctactccgccatcgaggcacccaagggtgagatgggtgtctacgttgtcagtgacggcagcgagagaccctaccgatgccacatccgcgcacccggtttcgcccatctgggtggtttcgaccacgtctccaagggtcacttgctagccgacgctgtcgctgtaattggtactatggatttggtgttcggtgaggttgacaggtgatgtgcatgaaaaaaaggatagactatatcaatagaggcacccgatgccagcatatacacactagtgtttccttttcatatgtacaataagctgaagaggagaggagagtagagtcaaggatggccgaagcgtgtctcgggatactgctcggcttggctactgtcctatagtcgccatgaggcatcatggcgtcagtaaatagatgcaattccgaactgatgtctttgtttccactttctaacatcgataataatgtgatgaagactatcgctcttagacatagtgcaatgtagtcattagtcatcttgacttctcccttaaagctgcttctctctttgagttcatccctttgggtttctc

SEQ ID NO: 9369 - DNA, 1248 bp, Muscodor strobelii
  misc_feature: SGI cDNA ID NO. 562925
  misc_feature: Encodes the peptide sequence at SEQ ID NO 9370
atgaaagggtcatcagcgcaacactataacagcacagctagtttctcctacattggcgacatggatgttctgaatggaaactattcctacgtgccggcgagaccccgtatggagccagagactgccattgtcttgaggacttgggatgactacgagtatacagaaaaaagactagtatggctgcgtgctctgattgcggaagcgtcactgcagcgtaataacggatatcgagtattcttccttgttaatatcaaagaccctgatgtcgaattagaggaggatgatgtggcctatgacgagcttatgaaaaaatgtgtcccagaagagttccgggacatggcttttcttttcaacgaaagaacgctcaaagcgtggtatccgctcgtcactgagtaccgtcctcggtttcaaatgtaccaagccctccaaatattctcaaccaaattcccgcattacacatttttctggcatttagagatagatctgcgtttcacaggtcatgttcacgacatcttagaagcatctgctgcatttgctcgagatcagggccgacgcaacctctgggaacgaaacgggcgcttttatatcgccggactacatgataactcatacgaaaccttcaaatcagccgtcgatgtcgagataggggatagtggtatctggggatccgtggcagctactgaagttgtccctcagggaccgtcaagccctgaaagaaacgccatcagctggggcgtgggggaagaagcggatttgataacctttatgcccatgatcgatcctgttggcacaaaatgggtgcacgaagataaagttcacggtttcgctgatggagcgcttacgccgcgtcgattcgcaattgtcagcaatacacgctcttcacgccggcttcttcaactagtcggcgatgcccagcgccagcaaggacaatggctggcaactgaggccaccctagagacattttctctcttacatggtctgaaggccgtgactgtgcctcaaccaattatcttccacaaccaaatgacagcggaaaaactaaacgaggaacttaaccggggtcctcccagcaacagggctggtggcgatcgctcatcaatgctctacaccactgaaggttggatcgaagggccgtggtgggactccagcttctggttcatcaagaacaaagcgcagagcatttgggacgaatacatgaacggagctgagctaccaccgatgctactccatccggtcaaggaagagtaa

SEQ ID NO: 9370 - protein, 415 aa, Muscodor strobelii
  misc_feature: SGI Peptide ID NO. 562925
  misc_feature (36)..(362): NCBI GI: 255947750 Blast Desc: Pc22g06100 [Penicillium chrysogenum Wisconsin 54-1255] gi|211591659|emb|CAP97898.1| Pc22g06100 [Penicillium chrysogenum Wisconsin 54-1255]
  misc_feature (33)..(365): NCBI GI: 67902936 Blast Desc: AN8455.2 [Aspergillus nidulans FGSC A4] gi|40747921|gb|EAA67077.1| AN8455.2 [Aspergillus nidulans FGSC A4] gi|259484401|tpe|CBF80589.1| TPA: [Aspergillus nidulans FGSC
  misc_feature (36)..(413): NCBI GI: 255946692 Blast Desc: Pc22g00680 [Penicillium chrysogenum Wisconsin 54-1255] gi|211591130|emb|CAP97356.1| Pc22g00680 [Penicillium chrysogenum Wisconsin 54-1255]
  misc_feature (37)..(413): NCBI GI: 255950412 Blast Desc: Pc22g20730 [Penicillium chrysogenum Wisconsin 54-1255] gi|211592990|emb|CAP99361.1| Pc22g20730 [Penicillium chrysogenum Wisconsin 54-1255]
  misc_feature (35)..(365): NCBI GI: 115390376 Blast Desc: conserved [Aspergillus terreus NIH2624] gi|114195089|gb|EAU36789.1| conserved [Aspergillus terreus NIH2624]
  misc_feature (35)..(365): NCBI GI: 159126717 Blast Desc: conserved [Aspergillus fumigatus A1163]
  misc_feature (38)..(413): NCBI GI: 46136853 Blast Desc: FG09942.1 [Gibberella zeae PH-1]
  misc_feature (38)..(413): NCBI GI: 256731718 Blast Desc: NECHADRAFT_80371 [Nectria haematococca mpVI 77-13-4]
  misc_feature (35)..(365): NCBI GI: 70997621 Blast Desc: conserved [Aspergillus fumigatus Af293] gi|66851187|gb|EAL91513.1| conserved [Aspergillus fumigatus Af293]
  misc_feature (33)..(414): NCBI GI: 121713556 Blast Desc: conserved [Aspergillus clavatus NRRL 1] gi|119402542|gb|EAW12963.1| conserved [Aspergillus clavatus NRRL 1]
MKGSSAQHYNSTASFSYIGDMDVLNGNYSYVPARPRMEPETAIVLRTWDDYEYTEKRLVWLRALIAEASLQRNNGYRVFFLVNIKDPDVELEEDDVAYDELMKKCVPEEFRDMAFLFNERTLKAWYPLVTEYRPRFQMYQALQIFSTKFPHYTFFWHLEIDLRFTGHVHDILEASAAFARDQGRRNLWERNGRFYIAGLHDNSYETFKSAVDVEIGDSGIWGSVAATEVVPQGPSSPERNAISWGVGEEADLITFMPMIDPVGTKWVHEDKVHGFADGALTPRRFAIVSNTRSSRRLLQLVGDAQRQQGQWLATEATLETFSLLHGLKAVTVPQPIIFHNQMTAEKLNEELNRGPPSNRAGGDRSSMLYTTEGWIEGPWWDSSFWFIKNKAQSIWDEYMNGAELPPMLLHPVKEE

SEQ ID NO: 9371 - DNA, 1050 bp, Muscodor strobelii
  misc_feature: SGI cDNA ID NO. 562926
  misc_feature: Encodes the peptide sequence at SEQ ID NO 9372
atgtgctattcggagttcctgggctacacatgtggccacacgagtgtcgcagtcctccccctcttgggcccgaagctcatcaagccgcctgtttcctcttcagaggattccgagcatcaggtggctgaggccatctcaactctgcacgagggaaatggtgcaactatcccgctgtttcacgagacttcagacggtgataagacaaaggttgcgatccggctgaagagtctgtgggcagctgagtggagagaagatcacgccaaactgcacaaggagggcaagtgtgagtgcccggtaaccttcgagaaataccagcttaccgaggaggacaaaggatttcttgtggaagctgcccagcaaaagaagggcaaaaagaagaacacaaagaagcctcagtttatcggacaggagtttgtgcctggcgctaatcatcatgcttcttctacatcatcgtcgcaagaaggccgagcctcgtctgaatatggccatttctcccccgatcaaggccagccttcaaaaaatcgaacgaaaccgcgcaacactggcaagggcggcagaggaaagaagcggcgtagctacaattatggcggcggacaaatccaacgggctgctctcagcagctatgaaacagaaaatctcaagaatatgaccaccaatacggcgtttgcagagaagtatctaacgatgaacccgccagcaacagccctgaagtctatgaactacgagccaatgggggtccccatggacatccagcgcaacgacctctttgcattaaactatcagcccaatggactgccaattgctggctccatgatcaataccggagagcccacagccgaggagattgcgaacccgggtctatacccaactcctgctggccacccaatagctggtttcccgttcggagcaggccctgagggacggtctcatgcctcggcctttgatgattgcagcttgagctttgcacacttgtccattagcggccagcgccggtactccatccaattcccatttgacgagtccgatttgtcgcgctcgtcctatgattag

SEQ ID NO: 9372 - protein, 349 aa, Muscodor strobelii
  misc_feature: SGI Peptide ID NO. 562926
  misc_feature (40)..(105): NCBI GI: 85119582 Blast Desc: NCU02535 [Neurospora crassa OR74A] gi|28927478|gb|EAA36430.1| [Neurospora crassa OR74A]
  misc_feature (24)..(136): NCBI GI: 116180926 Blast Desc: CHGG_01091 [Chaetomium globosum CBS 148.51] gi|88185388|gb|EAQ92856.1| CHGG_01091 [Chaetomium globosum CBS 148.51]
  misc_feature (23)..(114): NCBI GI: 171696336 Blast Desc: protein product [Podospora anserina] gi|170948410|emb|CAP60574.1| protein product [Podospora anserina]
MCYSEFLGYTCGHTSVAVLPLLGPKLIKPPVSSSEDSEHQVAEAISTLHEGNGATIPLFHETSDGDKTKVAIRLKSLWAAEWREDHAKLHKEGKCECPVTFEKYQLTEEDKGFLVEAAQQKKGKKKNTKKPQFIGQEFVPGANHHASSTSSSQEGRASSEYGHFSPDQGQPSKNRTKPRNTGKGGRGKKRRSYNYGGGQIQRAALSSYETENLKNMTTNTAFAEKYLTMNPPATALKSMNYEPMGVPMDIQRNDLFALNYQPNGLPIAGSMINTGEPTAEEIANPGLYPTPAGHPIAGFPFGAGPEGRSHASAFDDCSLSFAHLSISGQRRYSIQFPFDESDLSRSSYD

SEQ ID NO: 9373 - DNA, 1647 bp, Muscodor strobelii
  misc_feature: SGI cDNA ID NO. 562927
  misc_feature: Elevated expression when VOC is produced
  misc_feature: Encodes the peptide sequence at SEQ ID NO 9374
atgtctacggccgccgtaatagacccctcgcaagtcgagctgggcaactccctgccgccctatggcccgcataccgtcacgatgcatgtccctggatgggatgcagcgatgcagttcgtcaatggcgacatgtcgctcatgatgaagatgaagtccatatatccgcgtttctctccgtggggaccgtcacgccagctctgtggtctcattgggcaaaaaatagggctacctcagggttatggctgcgcagcgtttctctccccagaagtctgggccatgaaccaggaacacgcaacaaatgccattagaaaagagcacaagctagaagcctcggagctcaagtactatgctgtggagatcaacggcgtcagactctacgtcgtggctttcccgatgcagaaatccatgggcgcgatcttcgaatggcagcacggaggcttagggttcagcactcgggcttctgaggctttgctccagcatcaagacgagatcaagatcctcggcgaggtcacagatgtgaccaaagcaccagagccgacatatttcaaggagacagagagccacgcggcgctgcgggagcgtattgcggagctaataatgcgtgcttgtgctgtggagcataaggtcgctgtcaaggccgatgacgtgactctgtatcagacgggcatggcggctattcataggctacatgacgcgattgtgtcgctgaggagcggcccgactgttgtttttggtgcggttttccatagtacttatcatttgtttgaggagagcacctcgggcattaagcattacggcgctgcatcggatgccgatgtggatgatttcgagaagtatttggagggaggcggagagtgttcacatgtgttcaccgagttccctagcaatcctgtgatggttagtgtggacttgatgaggttgagcaagttggccgataaatacggcttctacttagtcgctgacgacacatgtgcgtctttcgccaatattgatctactggccgcagcagacgtggttgtcacctccttgacgaagtctttctcaggttacgcggatgtgatggctggctcggtggtgctgaatccaaacagcacccgcgtttacgaagccctgaagcctgaagtctcttcaagattccacaatgagttctttgagggagacgctgcacacttgttagcgaacaacaaggacctcttccctcggactataatccataatcgtaatgccactgccgtcgcctcttacttcaactccctggcgcaggaattaggcagcgccgtcacaaaagtttgctatccaccgcattctcagggctccaaatacctcgagcctttcatgaggaagccgaccgacgagctcccacaaccaggatatggttgtctattgagcgttgaattcgataccctagagcatctcatcacattctacgaaaacgttaatctcttttgtgggcctcatctaggtgctcatctaactatctgcatgccttacaacgctatggtctatggaaaggagcacccagaagtgcatgctgcatatggtttgaagcaggaacagctacgcattgctgttgggtacgaggactcggatgttttgctccagaggtgtaaggatgcctacgcaaaagtgcttgaaactacgacctag

SEQ ID NO: 9374 - protein, 548 aa, Muscodor strobelii
  misc_feature: SGI Peptide ID NO. 562927
  misc_feature (184)..(541): Pfam Id: PF01053 Pfam Desc: Cys/Met metabolism PLP-dependent enzyme
  misc_feature (12)..(542): NCBI GI: 171695944 Blast Desc: protein product [Podospora anserina] gi|170948214|emb|CAP60378.1| protein product [Podospora anserina]
  misc_feature (14)..(539): NCBI GI: 261356008 Blast Desc: cystathionine gamma-synthase [Verticillium albo-atrum VaMs.102]
  misc_feature (6)..(545): NCBI GI: 256735250 Blast Desc: NECHADRAFT_74897 [Nectria haematococca mpVI 77-13-4]
  misc_feature (10)..(542): NCBI GI: 39958851 Blast Desc: MGG_09292 [Magnaporthe grisea 70-15] gi|145013248|gb|EDJ97889.1| MGG_09292 [Magnaporthe grisea 70-15]
  misc_feature (10)..(539): NCBI GI: 46107240 Blast Desc: FG00503.1 [Gibberella zeae PH-1]
  misc_feature (7)..(539): NCBI GI: 85111311 Blast Desc: NCU08117 [Neurospora crassa OR74A] gi|28925621|gb|EAA34640.1| [Neurospora crassa OR74A]
  misc_feature (11)..(417): NCBI GI: 116180906 Blast Desc: CHGG_01081 [Chaetomium globosum CBS 148.51] gi|88185378|gb|EAQ92846.1| CHGG_01081 [Chaetomium globosum CBS 148.51]
  misc_feature (12)..(534): NCBI GI: 116208474 Blast Desc: CHGG_03530 [Chaetomium globosum CBS 148.51] gi|88184127|gb|EAQ91595.1| CHGG_03530 [Chaetomium globosum CBS 148.51]
  misc_feature (7)..(547): NCBI GI: 255730253 Blast Desc: conserved [Candida tropicalis MYA-3404] gi|240132008|gb|EER31566.1| conserved [Candida tropicalis MYA-3404]
  misc_feature (6)..(539): NCBI GI: 189194561 Blast Desc: cystathionine gamma-synthase [Pyrenophora tritici-repentis Pt-1C-BFP] gi|187979183|gb|EDU45809.1| cystathionine gamma-synthase [Pyrenophora tritici-repentis
  misc_feature (12)..(532): SWISSPROT Homolog: EC 2.5.1.48 Cystathionine gamma-synthase
  misc_feature: Useful for introducing or modulating the production of volatile compounds
MSTAAVIDPSQVELGNSLPPYGPHTVTMHVPGWDAAMQFVNGDMSLMMKMKSIYPRFSPWGPSRQLCGLIGQKIGLPQGYGCAAFLSPEVWAMNQEHATNAIRKEHKLEASELKYYAVEINGVRLYVVAFPMQKSMGAIFEWQHGGLGFSTRASEALLQHQDEIKILGEVTDVTKAPEPTYFKETESHAALRERIAELIMRACAVEHKVAVKADDVTLYQTGMAAIHRLHDAIVSLRSGPTVVFGAVFHSTYHLFEESTSGIKHYGAASDADVDDFEKYLEGGGECSHVFTEFPSNPVMVSVDLMRLSKLADKYGFYLVADDTCASFANIDLLAAADVVVTSLTKSFSGYADVMAGSVVLNPNSTRVYEALKPEVSSRFHNEFFEGDAAHLLANNKDLFPRTIIHNRNATAVASYFNSLAQELGSAVTKVCYPPHSQGSKYLEPFMRKPTDELPQPGYGCLLSVEFDTLEHLITFYENVNLFCGPHLGAHLTICMPYNAMVYGKEHPEVHAAYGLKQEQLRIAVGYEDSDVLLQRCKDAYAKVLETTT

SEQ ID NO: 9375 - DNA, 2680 bp, Muscodor strobelii
  misc_feature: SGI EST ID NO. CUFF.22250.0
  misc_feature: Variant of the nucleotide sequence at SEQ ID NO 9373
ggccaacttgcgtctcagccgaaattcgcgatctgcaaccccgcttgcaacatggaaaggaattgacaaagtatgatcctttgtccacataagacctatgcttcgatgcatatctttcgttcccaagctctcattttcaagaatccagagtccagaacgccacgtcaattcaatgatctttaaataggccgcgagtcaaggctgataagcacttagctgatcagcgcggcggggtctgttggtgttagcttcaaccaggatttcaccgccacgatgccgcttggttcactccatgtaagaccttgtgaagtgcggtctgctgggtttgtttgggggacaatcaattcctccgttccgtgtaggctaatcgtttattcggcacggttacggggaaaggagttaggacttttattcgtgtactccttgcgtcgggatcggattaggcggggagggcctggatggcagggctgacggcctgacttgtcattatttaaacaacggcgtttgcctgactcgatattcaattgtacggtagcactcattgcttgatggtacaattctttagaaattttattttcgagagaacatattgtagttgttccgattaagaaatacgtgcacgatgtctacggccgccgtaatagacccctcgcaagtcgagctgggcaactccctgccgccctatggcccgcataccgtcacgatgcatgtccctggatgggatgcagcgatgcagttcgtcaatggcgacatgtcgctcatgatgaagatgaagtccatatatccgcgtttctctccgtggggaccgtcacgccagctctgtggtctcattgggcaaaaaatagggctacctcagggttatggctgcgcagcgtttctctccccagaagtctgggccatgaaccaggaacacgcaacaaatgccattagaaaagagcacaagctagaagcctcggagctcaagtactatgctgtggagatcaacggcgtcagactctacgtcgtggctttcccgatgcagaaatccatgggcgcgatcttcgaatggcagcacggaggcttagggttcagcactcgggcttctgaggctttgctccagcatcaagacgagatcaagatcctcggcgaggtcacagatgtgaccaaagcaccagagccgacatatttcaaggagacagagagccacgcggcgctgcgggagcgtattgcggagctaataatgcgtgcttgtgctgtggagcataaggtcgctgtcaaggccgatgacgtgactctgtatcagacgggcatggcggctattcataggctacatgacgcgattgtgtcgctgaggagcggcccgactgttgtttttggtgcggttttccatagtacttatcatttgtttgaggagagcacctcgggcattaagcattacggcgctgcatcggatgccgatgtggatgatttcgagaagtatttggagggaggcggagagtgttcacatgtgttcaccgagttccctagcaatcctgtgatggttagtgtggacttgatgaggttgagcaagttggccgataaatacggcttctacttagtcgctgacgacacatgtgcgtctttcgccaatattgatctactggccgcagcagacgtggttgtcacctccttgacgaagtctttctcaggttacgcggatgtgatggctggctcggtggtgctgaatccaaacagcacccgcgtttacgaagccctgaagcctgaagtctcttcaagattccacaatgagttctttgagggagacgctgcacacttgttagcgaacaacaaggacctcttccctcggactataatccataatcgtaatgccactgccgtcgcctcttacttcaactccctggcgcaggaattaggcagcgccgtcacaaaagtttgctatccaccgcattctcagggctccaaatacctcgagcctttcatgaggaagccgaccgacgagctcccacaaccaggatatggttgtctattgagcgttgaattcgataccctagagcatctcatcacattctacgaaaacgttaatctcttttgtgggcctcatctaggtgctcatctaactatctgcatgccttacaacgctatggtctatggaaaggagcacccagaagtgcatgctgcatatggtttgaagcaggaacagctacgcattgctgttgggtacgaggactcggatgttttgctccagaggtgtaaggatgcctacgcaaaagtgcttgaaactacgacctagcaaggtgattgttagaatacaatgaacatctctccatctgtacacaaggggcttgtgagcttgaccatcatgccgcttgcatcatacatggaaagcgaacgaaatgttactagtctatagccaaagtctgcagagaaacgccaggcagcaagacactcggtcgactgatgcctcatgagctctcatcgggctctggttgcatggaccattggttcacagagatgtttgtcgaagaaacgtctgcccattattctttgtacaccccgcgctaaacgcagtgaaaatagtgcaggtctcagtttgaggccctcttatttgttaaaacaccataataatgaatttccggcacgtgctgtgctacctgtctacagcacgagggcttgtccagcaaggactccaagctctccctga

SEQ ID NO: 9376 - DNA, 2457 bp, Muscodor strobelii
  misc_feature: SGI cDNA ID NO. 562928
  misc_feature: Elevated expression when VOC is produced
  misc_feature: Encodes the peptide sequence at SEQ ID NO 9377
atgctgatcatccaggatctcaagaccaatcagaccacctggcgatcctcgcgtcgcccgaacccgcgccgcaagtggcacgcccgcccgggcctcatcgtcatgaagttcggcgagcagctgcgctccagcgtcatccaggagtaccagtggtactacatcgactatgagggcctcaaggccgagcttaagaccgcctccgggcctcttgtcaaacccgaacacaccaacaacggcgtcgggccgtccgaccccgccgccggcaagaagaagaagaatgcctggaccgaggaggacgagcagcgtttcatcgccagactctatgccgagctcgaaaaggtctacaacaagaccaaggtcaaggagtccgagatccagcgccgcatagccgtcagcgagcgcgaggttaaggaagtcgtctcacgtgtcacggagcgcggtttgaacgagcagggtcctcccgaggaagagttcatattgttagaagaagacttgagcgacatcattgctgatgttcacgacctcgccaaatatgtccagctgaactatacgggtttttataagataatcaagaagcatgacaaattaaccaattggcacctacgaccttcattcgacgcggcactcaagaagaagccattctacaacgaagacttcgatgctgaagttgtcaaactatcaaacatgtacaacaatgtccgaacgagaggaaatcctgtcaaaggtgacagtgccgctggtggcagccaaggcagcttcgtccgccagacgacaaagtactgggtgcatccggacaatgtcacagaactaaagcttatcattctcaaacatcttccagtactagtattcaatgcaagcaaggagttcgaaattgcagactcggctatcacttctatatactacgataatcccgagaagtgggatttgtatgaaggccgtctgaagaaaacagaaggcgctgaggccattagattacgatggtatggcggcatgcaaaatgataccatatttgtggagcggaaaacacatcgtgaagactggaccggcgagaaatctgtcaaggctcggttcgcaacgaaggagaagaatgtaaatgcatatttgcgtggtgatctacttcccgcagccctgtttgaaaaggcccggaaagacggcaagaagtccgaaaaagccattgccgaggatgagcgattggctaaagaagtccaatactcggtcttaaagaaaggctacgtgcccgtctgccgatcgttctacaatcgcacggcatttcagctcccagctgatgctcgcgtgcgaatctctctcgatacagaattaaccatggtgcgcgaggataacctggacgggaagagaagaagcggtgacaactggagaagaatggacattggcatcgactacccgttctctcaactaccaccagaggatgttgtgcgcttcccttacgccgttttggaagtgaaactgcagactcaacacggccaagaaccaccagaatgggtacgacagcttatttcaagtcatcttgtagaagctgtaccaaagttctcaaagttcatacacggcacggcaaccttgttcccgaagcggatcaacctgcttcctttttggatgcctcaaatggatgtggatattcgcaagccagtgacacacagttttggcatccagcggccggggcagtcgcatagtggcactacatctgatgatgaagatgatctcgactccgatgcagaggatacagaagatgtaccatcacagactcctgctactaatctgtcgcgtggtgctcgagcccttgtgctcggcgacattgaaggccaaaccgcatcagaaccagtgggtaacgacgattatccgttatatgactccgatgacgaatcagacgaggaagaccggattgaggaggccagacgaattggtggatggacttattactcaacgttagcccaaagctatgccaacacagcagggcgaggagctgtccaagtcttgcagactattgtacccaaaccccgagcaacgcaagttccacgtagtaatcggaacatgatgtttttcggaggccaagacgtacagaacaagaagttcaaggcaccgaagggaaagaagatatacgtgcctgttagagttgagcccaaggtatactttgcggcggagagaacattccttggctggctcgaattctctatttacgttggtaccattgccgtcaccttgctgaattttggtgacaaaccgagcgccttgtctttcgctgccgctggcatctttactttactggctattctagcactttgctattccgttggaatttatctataccgaagcatgggcatccgcgaacgcagagtgatcaagtattacgacaaggttgggccgactgttttgtgcgtctcacttttcatcggcgtcgccctcaattttgcatttgaaggcagagagaggagtttgtggtaa

SEQ ID NO: 9377 - protein, 818 aa, Muscodor strobelii
  misc_feature: SGI Peptide ID NO. 562928
  misc_feature (35)..(210): Pfam Id: PF03105 Pfam Desc: SPX domain
  misc_feature (254)..(527): Pfam Id: PF09359 Pfam Desc: VTC domain
  misc_feature (1)..(818): NCBI GI: 171695946 Blast Desc: protein product [Podospora anserina] gi|170948215|emb|CAP60379.1| protein product [Podospora anserina]
  misc_feature (35)..(818): NCBI GI: 46107238 Blast Desc: FG00502.1 [Gibberella zeae PH-1]
  misc_feature (35)..(818): NCBI GI: 116180904 Blast Desc: CHGG_01080 [Chaetomium globosum CBS 148.51] gi|88185377|gb|EAQ92845.1| CHGG_01080 [Chaetomium globosum CBS 148.51]
  misc_feature (1)..(818): NCBI GI: 164422653 Blast Desc: vacuolar transporter chaperone 4 [Neurospora crassa OR74A] gi|157069763|gb|EAA34604.2| vacuolar transporter chaperone 4 [Neurospora crassa OR74A]
  misc_feature (1)..(811): NCBI GI: 154297372 Blast Desc: BC1G_12090 [Botryotinia fuckeliana B05.10] gi|150858595|gb|EDN33787.1| BC1G_12090 [Botryotinia fuckeliana B05.10]
  misc_feature (35)..(818): NCBI GI: 145605419 Blast Desc: MGG_09291 [Magnaporthe grisea 70-15] gi|145013249|gb|EDJ97890.1| MGG_09291 [Magnaporthe grisea 70-15]
  misc_feature (35)..(811): NCBI GI: 156062318 Blast Desc: SS1G_01275 [Sclerotinia sclerotiorum 1980] gi|154696611|gb|EDN96349.1| SS1G_01275 [Sclerotinia sclerotiorum 1980]
  misc_feature (35)..(818): NCBI GI: 261356007 Blast Desc: vacuolar transporter chaperone 4 [Verticillium albo-atrum VaMs.102]
  misc_feature (35)..(816): NCBI GI: 240105779 Blast Desc: SPX domain containing protein [Coccidioides posadasii C735 delta SOWgp]
  misc_feature (41)..(818): NCBI GI: 238842199 Blast Desc: vacuolar transporter chaperone 4 [Microsporum canis CBS 113480]
  misc_feature: Useful for introducing or modulating the production of volatile compounds
MLIIQDLKTNQTTWRSSRRPNPRRKWHARPGLIVMKFGEQLRSSVIQEYQWYYIDYEGLKAELKTASGPLVKPEHTNNGVGPSDPAAGKKKKNAWTEEDEQRFIARLYAELEKVYNKTKVKESEIQRRIAVSEREVKEVVSRVTERGLNEQGPPEEEFILLEEDLSDIIADVHDLAKYVQLNYTGFYKIIKKHDKLTNWHLRPSFDAALKKKPFYNEDFDAEVVKLSNMYNNVRTRGNPVKGDSAAGGSQGSFVRQTTKYWVHPDNVTELKLIILKHLPVLVFNASKEFEIADSAITSIYYDNPEKWDLYEGRLKKTEGAEAIRLRWYGGMQNDTIFVERKTHREDWTGEKSVKARFATKEKNVNAYLRGDLLPAALFEKARKDGKKSEKAIAEDERLAKEVQYSVLKKGYVPVCRSFYNRTAFQLPADARVRISLDTELTMVREDNLDGKRRSGDNWRRMDIGIDYPFSQLPPEDVVRFPYAVLEVKLQTQHGQEPPEWVRQLISSHLVEAVPKFSKFIHGTATLFPKRINLLPFWMPQMDVDIRKPVTHSFGIQRPGQSHSGTTSDDEDDLDSDAEDTEDVPSQTPATNLSRGARALVLGDIEGQTASEPVGNDDYPLYDSDDESDEEDRIEEARRIGGWTYYSTLAQSYANTAGRGAVQVLQTIVPKPRATQVPRSNRNMMFFGGQDVQNKKFKAPKGKKIYVPVRVEPKVYFAAERTFLGWLEFSIYVGTIAVTLLNFGDKPSALSFAAAGIFTLLAILALCYSVGIYLYRSMGIRERRVIKYYDKVGPTVLCVSLFIGVALNFAFEGRERSLW

SEQ ID NO: 9378 - DNA, 2817 bp, Muscodor strobelii
  misc_feature: SGI EST ID NO. CUFF.22254.0
  misc_feature: Variant of the nucleotide sequence at SEQ ID NO 9376
caaatctccaaactctcttgcacacaactcgaggcaatcatcgatcaacaattcgacagtgcagaactgtgcctaactcgctatacaagtggttatttgcttctggccttttcggcccgacgagtggtcatttgcagtctccgcgcctggcagaaatccatcacactttagctgcagcaggttgggcagtcgacgtcgcgtgcttgtacgtgcagacaggcgatgcaggcattttgtgaccccagccacagtctcacagaaatcagggtatagtatagctgggtatagttgatactaggtatataccaatcagaccacctggcgatcctcgcgtcgcccgaacccgcgccgcaagtggcacgcccgcccgggcctcatcgtcatgaagttcggcgagcagctgcgctccagcgtcatccaggagtaccagtggtactacatcgactatgagggcctcaaggccgagcttaagaccgcctccgggcctcttgtcaaacccgaacacaccaacaacggcgtcgggccgtccgaccccgccgccggcaagaagaagaagaatgcctggaccgaggaggacgagcagcgtttcatcgccagactctatgccgagctcgaaaaggtctacaacaagaccaaggtcaaggagtccgagatccagcgccgcatagccgtcagcgagcgcgaggttaaggaagtcgtctcacgtgtcacggagcgcggtttgaacgagcagggtcctcccgaggaagagttcatattgttagaagaagacttgagcgacatcattgctgatgttcacgacctcgccaaatatgtccagctgaactatacgggtttttataagataatcaagaagcatgacaaattaaccaattggcacctacgaccttcattcgacgcggcactcaagaagaagccattctacaacgaagacttcgatgctgaagttgtcaaactatcaaacatgtacaacaatgtccgaacgagaggaaatcctgtcaaaggtgacagtgccgctggtggcagccaaggcagcttcgtccgccagacgacaaagtactgggtgcatccggacaatgtcacagaactaaagcttatcattctcaaacatcttccagtactagtattcaatgcaagcaaggagttcgaaattgcagactcggctatcacttctatatactacgataatcccgagaagtgggatttgtatgaaggccgtctgaagaaaacagaaggcgctgaggccattagattacgatggtatggcggcatgcaaaatgataccatatttgtggagcggaaaacacatcgtgaagactggaccggcgagaaatctgtcaaggctcggttcgcaacgaaggagaagaatgtaaatgcatatttgcgtggtgatctacttcccgcagccctgtttgaaaaggcccggaaagacggcaagaagtccgaaaaagccattgccgaggatgagcgattggctaaagaagtccaatactcggtcttaaagaaaggctacgtgcccgtctgccgatcgttctacaatcgcacggcatttcagctcccagctgatgctcgcgtgcgaatctctctcgatacagaattaaccatggtgcgcgaggataacctggacgggaagagaagaagcggtgacaactggagaagaatggacattggcatcgactacccgttctctcaactaccaccagaggatgttgtgcgcttcccttacgccgttttggaagtgaaactgcagactcaacacggccaagaaccaccagaatgggtacgacagcttatttcaagtcatcttgtagaagctgtaccaaagttctcaaagttcatacacggcacggcaaccttgttcccgaagcggatcaacctgcttcctttttggatgcctcaaatggatgtggatattcgcaagccagtgacacacagttttggcatccagcggccggggcagtcgcatagtggcactacatctgatgatgaagatgatctcgactccgatgcagaggatacagaagatgtaccatcacagactcctgctactaatctgtcgcgtggtgctcgagcccttgtgctcggcgacattgaaggccaaaccgcatcagaaccagtgggtaacgacgattatccgttatatgactccgatgacgaatcagacgaggaagaccggattgaggaggccagacgaattggtggatggacttattactcaacgttagcccaaagctatgccaacacagcagggcgaggagctgtccaagtcttgcagactattgtacccaaaccccgagcaacgcaagttccacgtagtaatcggaacatgatgtttttcggaggccaagacgtacagaacaagaagttcaaggcaccgaagggaaagaagatatacgtgcctgttagagttgagcccaaggtatactttgcggcggagagaacattccttggctggctcgaattctctatttacgttggtaccattgccgtcaccttgctgaattttggtgacaaaccgagcgccttgtctttcgctgccgctggcatctttactttactggctattctagcactttgctattccgttggaatttatctataccgaagcatgggcatccgcgaacgcagagtgatcaagtattacgacaaggttgggccgactgttttgtgcgtctcacttttcatcggcgtcgccctcaattttgcatttgaaggcagagagaggagtttgtggtaaatgtataaaagtatagcaattgcatagcgatcaatatctattagaaaatatagccatcaaagaacaattttcaagttgtt

SEQ ID NO: 9379 - DNA, 1281 bp, Muscodor strobelii
  misc_feature: SGI cDNA ID NO. 562929
  misc_feature: Reduced expression when VOC is produced
  misc_feature: Encodes the peptide sequence at SEQ ID NO 9380
atgcaagacgacaaaatcgaaacccggataccaccgagctgtccagcatcaatatctcaaattctatatcacgcctggaaccatgacctagccggtctgaaaccactcctcaccgtcccagggagagccaacgtccaagagcccaccacaggagaaacaccattacacgcagcaatccgatcatgcgcatcagccacagaggatcaccccgtcgacatcgaagccgccaaggccgtattacaagaactattcttcagcggcgcaatctggaacgacatcgacagcaacaatgagacgccaggctgcttagccgatcgcttaggtcagaccgagctctacaacttatgtgtcgatgctgggctacgcgcagagttattacataaactcctagaaggttacgaagagattgactcacaagatgacgaggacatagcagaagtagaggatgaggaagaaggtgatggagtacaagtcgaagcggagcctgcagaggaagtcgagcccgaggatgtaatcctagagtctgacccagatcgccaattcgcgccacctaaaatcgaagatccggacgtcaacagcgaggaatacctccgcgccaacttgacgtacagtgagggcaaattggtagacgatgcgcagaacggagtaatgatggcctgggagacgtccatcatgcggtcctcggtcgaggcactgttacctggtctagctatcgggaagcgcatcctaaacatcggtttcggcatgggaataatcgacgcaatgttccacgaaacccacccttccaagcaccacatcatagaagcccacccagaagtcctaaaacacatatcaagcccagactgcaaattcggctcctcatgggaggagtccggtccaagcccaggcgcatacaaagtgcacgcaggcaaatggcaagacatcatgcccaaactcctcgagcagggcgaactatacgacgcaatctatttcgacacctttggcgaggactacagcgaattatatacattcttcaccgagtacgtacctggaatgctcgacgacggtggcgttttcggcttcttcaatggtctgggcgcagatcggaaagtgtgctacgatgtgtactcgaaagtcgtcgagatgcatctcactgatgccggtttggacgtggaatggaaggaactcgaagtcgatatgaaaggcttggaaaaggaaggagaaggggagtggcaaggcgtgaaacgacgctattggactttggacagtaagtctcacgagatatcagccactcaggtctga

SEQ ID NO: 9380 - protein, 426 aa, Muscodor strobelii
  misc_feature: SGI Peptide ID NO. 562929
  misc_feature (4)..(419): NCBI GI: 116180900 Blast Desc: CHGG_01078 [Chaetomium globosum CBS 148.51] gi|88185375|gb|EAQ92843.1| CHGG_01078 [Chaetomium globosum CBS 148.51]
  misc_feature (3)..(416): NCBI GI: 46107236 Blast Desc: FG00501.1 [Gibberella zeae PH-1] gi|90101611|sp|Q4IQK7.1|RMT2_GIBZE RecName: Full=Arginine N-methyltransferase 2
  misc_feature (4)..(417): NCBI GI: 171695948 Blast Desc: protein product [Podospora anserina] gi|170948216|emb|CAP60380.1| protein product [Podospora anserina]
  misc_feature (3)..(415): NCBI GI: 256734535 Blast Desc: NECHADRAFT_31691 [Nectria haematococca mpVI 77-13-4]
  misc_feature (3)..(416): NCBI GI: 85111236 Blast Desc: NCU08111 [Neurospora crassa OR74A] gi|74617791|sp|Q7SCW9.1|RMT2_NEUCR RecName: Full=Arginine N-methyltransferase 2 gi|28925581|gb|EAA34605.1| conserved crassa
  misc_feature (9)..(410): NCBI GI: 145605421 Blast Desc: MGG_09290 [Magnaporthe grisea 70-15] gi|145013250|gb|EDJ97891.1| MGG_09290 [Magnaporthe grisea 70-15]
  misc_feature (21)..(415): NCBI GI: 156062312 Blast Desc: SS1G_01272 [Sclerotinia sclerotiorum 1980] gi|154696608|gb|EDN96346.1| SS1G_01272 [Sclerotinia sclerotiorum 1980]
  misc_feature (16)..(416): NCBI GI: 154297360 Blast Desc: BC1G_12084 [Botryotinia fuckeliana B05.10] gi|150858589|gb|EDN33781.1| BC1G_12084 [Botryotinia fuckeliana B05.10]
  misc_feature (17)..(416): NCBI GI: 119480755 Blast Desc: arginine N-methyltransferase (Rmt2), [Neosartorya fischeri NRRL 181] gi|119408560|gb|EAW18509.1| arginine N-methyltransferase (Rmt2), [Neosartorya fischeri NRRL 181]
  misc_feature (17)..(416): NCBI GI: 159129326 Blast Desc: arginine N-methyltransferase (Rmt2), [Aspergillus fumigatus A1163]
  misc_feature: Useful for introducing or modulating the production of volatile compounds
MQDDKIETRIPPSCPASISQILYHAWNHDLAGLKPLLTVPGRANVQEPTTGETPLHAAIRSCASATEDHPVDIEAAKAVLQELFFSGAIWNDIDSNNETPGCLADRLGQTELYNLCVDAGLRAELLHKLLEGYEEIDSQDDEDIAEVEDEEEGDGVQVEAEPAEEVEPEDVILESDPDRQFAPPKIEDPDVNSEEYLRANLTYSEGKLVDDAQNGVMMAWETSIMRSSVEALLPGLAIGKRILNIGFGMGIIDAMFHETHPSKHHIIEAHPEVLKHISSPDCKFGSSWEESGPSPGAYKVHAGKWQDIMPKLLEQGELYDAIYFDTFGEDYSELYTFFTEYVPGMLDDGGVFGFFNGLGADRKVCYDVYSKVVEMHLTDAGLDVEWKELEVDMKGLEKEGEGEWQGVKRRYWTLDSKSHEISATQV

SEQ ID NO: 9381 - DNA, 3472 bp, Muscodor strobelii
  misc_feature: SGI EST ID NO. CUFF.22397.0
  misc_feature: Variant of the nucleotide sequence at SEQ ID NO 9379
agtcaccatctataaatcaataatcccagcgcgtcaggtcggccaccgagtcttggagatcatcagtattaggagaagacagagaaagcttcaattaaaggctcggtgctaatctagcacgacctccgtctttagagcaactaccctagaaagaacatgaccccgcgctaccccacgtatatgggtaaaacatgttccagtcagtaggattaaatatttaatacaaattcaaagttatatgatagaccaatccgctgctggatatatgaacaagctcgtcttgagataattgggtttcccagctcgtggcgaaactgtttacattataatctctaaaaccaatctagaaagtcccaagtaaatcaccacaatgcaagacgacaaaatcgaaacccggataccaccgagctgtccagcatcaatatctcaaattctatatcacgcctggaaccatgacctagccggtctgaaaccactcctcaccgtcccagggagagccaacgtccaagagcccaccacaggagaaacaccattacacgcagcaatccgatcatgcgcatcagccacagaggatcaccccgtcgacatcgaagccgccaaggccgtattacaagaactattcttcagcggcgcaatctggaacgacatcgacagcaacaatgagacgccaggctgcttagccgatcgcttaggtcagaccgagctctacaacttatgtgtcgatgctgggctacgcgcagagttattacataaactcctagaaggttacgaagagattgactcacaagatgacgaggacatagcagaagtagaggatgaggaagaaggtgatggagtacaagtcgaagcggagcctgcagaggaagtcgagcccgaggatgtaatcctagagtctgacccagatcgccaattcgcgccacctaaaatcgaagatccggacgtcaacagcgaggaatacctccgcgccaacttgacgtacagtgagggcaaattggtagacgatgcgcagaacggagtaatgatggcctgggagacgtccatcatgcggtcctcggtcgaggcactgttacctggtctagctatcgggaagcgcatcctaaacatcggtttcggcatgggaataatcgacgcaatgttccacgaaacccacccttccaagcaccacatcatagaagcccacccagaagtcctaaaacacatatcaagcccagactgcaaattcggctcctcatgggaggagtccggtccaagcccaggcgcatacaaagtgcacgcaggcaaatggcaagacatcatgcccaaactcctcgagcagggcgaactatacgacgcaatctatttcgacacctttggcgaggactacagcgaattatatacattcttcaccgagtacgtacctggaatgctcgacgacggtggcgttttcggcttcttcaatggtctgggcgcagatcggaaagtgtgctacgatgtgtactcgaaagtcgtcgagatgcatctcactgatgccggtttggacgtggaatggaaggaactcgaagtcgatatgaaaggcttggaaaaggaaggagaaggggagtggcaaggcgtgaaacgacgctattggactttggacaaatatcggctgccgattatcaccttgatgggataaatgaacacgaggcacgtacgaaagacaggatatacaggtgaatcgtgaatcgatttcgcaggatttgaaccaacccatctctatatctaaccaatctaacggacatttggagacactattctgaagtggtgcgcactattgctagctacactctgcaactttactttgcctggaaattctcaggatgtaaaatgccatggacatttccttgggcaactcgcttgagtgttagagcggcaattagtgcagcgccaacaccgcttccatcttcggctgccaagatctcaacagggtcctcctctttcatggatttcttggcaggccagtcgaggagctcgcgcagagcctgggcaccacgagccttaaagtgagggtacttattaaatacggacccgtcggcaccgacgtggcacggctccaaattcttcttggtgcagatggcagcgacgccacaagcagataggcgagcagcacgggtaccgatcaactcggcagctcgccgaatgagttcgagctcatggcgagtgcaggtcaagttaagcttgtccctgaacagatcgtgcgtctcttgcaagttctcgaaggggtcactatagcagtattagcatagccgacttttgcatgaatatcaagatccaaacaaacatactcctcgatggctgacaagaaggatgcatccaaagtgtatggccttcgcagattcttgatatcttgaccctcaaagatgtgaatatccttgttatcatggaggtctaccatgatcagacggaagatctctccgaggtacaggccggcgatacatttctcgaaggcctgttgtccggggcgaggagattccttgtcaatgatgatgtcgtactttgtccgtggaaggaccttgttctcgttgtcaaaagcgccccattcacagttgatggccatgggcaaatcgggaggtaagttcatatgggccaacttgggaatcgagccgcagttctccatgtaggccgcattgcaccctgtaccgaaaatgcaaccaatcttcatactggggtcggtgtaggcagaagcaatcagggtaccagtggtatcgttgatcaaagcactaacagtgataggaacaccctaatgcctcgtcagcatcgtacgtattggccagatagaaaagagactcacacgtgcgatcaaagcagcttcgagcatgggaacaacattctggccctcaacaccgttgatatcgaagcccttggtccatcgctgaagtacaccctcgtcgatatagttctgggtggcaggatacgagaaagtgaaaccaagtgggatcttaggtgaaccatggggaatctcctcacagtggatgtcaacgaattgctgtagacaatcggctatgtattcccagagttcttcggagtcgccggtcttgagctcttcgggcatgcgatatttggactgaataatgtcgaactccgacttcgtgtctgttaaggtaatctcacaaacacgcaaatttgtaccacccatatccaaagccaggaatgttccagtctcgtatccatctgggaaatccataacccaggttgggttcatcggctgcgattagttctaattagctctgcttgtcaccgaggtgagtgtgtgccttaacatacaatgctgccgccttccacactaagacctgattctcgttagcacaaactccctatttgtctctgaaaacaccatttacctttgtcgagctcggagacgaaatgatgcatgatctgcttgagcttggccgtgtctacagtgaatgcctcttccaatgccttgatctcggttaagaggtcctttggcacatcggcc

SEQ ID NO: 9382 - DNA, 1281 bp, Muscodor strobelii
  misc_feature: SGI cDNA ID NO. 562930
  misc_feature: Elevated expression when VOC is produced
  misc_feature: Encodes the peptide sequence at SEQ ID NO 9383
atgcaagacgacaaaatcgaaacccggataccaccgagctgtccagcatcaatatctcaaattctatatcacgcctggaaccatgacctagccggtctgaaaccactcctcaccgtcccagggagagccaacgtccaagagcccaccacaggagaaacaccattacacgcagcaatccgatcatgcgcatcagccacagaggatcaccccgtcgacatcgaagccgccaaggccgtattacaagaactattcttcagcggcgcaatctggaacgacatcgacagcaacaatgagacgccaggctgcttagccgatcgcttaggtcagaccgagctctacaacttatgtgtcgatgctgggctacgcgcagagttattacataaactcctagaaggttacgaagagattgactcacaagatgacgaggacatagcagaagtagaggatgaggaagaaggtgatggagtacaagtcgaagcggagcctgcagaggaagtcgagcccgaggatgtaatcctagagtctgacccagatcgccaattcgcgccacctaaaatcgaagatccggacgtcaacagcgaggaatacctccgcgccaacttgacgtacagtgagggcaaattggtagacgatgcgcagaacggagtaatgatggcctgggagacgtccatcatgcggtcctcggtcgaggcactgttacctggtctagctatcgggaagcgcatcctaaacatcggtttcggcatgggaataatcgacgcaatgttccacgaaacccacccttccaagcaccacatcatagaagcccacccagaagtcctaaaacacatatcaagcccagactgcaaattcggctcctcatgggaggagtccggtccaagcccaggcgcatacaaagtgcacgcaggcaaatggcaagacatcatgcccaaactcctcgagcagggcgaactatacgacgcaatctatttcgacacctttggcgaggactacagcgaattatatacattcttcaccgagtacgtacctggaatgctcgacgacggtggcgttttcggcttcttcaatggtctgggcgcagatcggaaagtgtgctacgatgtgtactcgaaagtcgtcgagatgcatctcactgatgccggtttggacgtggaatggaaggaactcgaagtcgatatgaaaggcttggaaaaggaaggagaaggggagtggcaaggcgtgaaacgacgctattggactttggacaaatatcggctgccgattatcaccttgatgggataa

SEQ ID NO: 9383 - protein, 426 aa, Muscodor strobelii
  misc_feature: SGI Peptide ID NO. 562930
  misc_feature (3)..(426): NCBI GI: 256734535 Blast Desc: NECHADRAFT_31691 [Nectria haematococca mpVI 77-13-4]
  misc_feature (3)..(420): NCBI GI: 46107236 Blast Desc: FG00501.1 [Gibberella zeae PH-1] gi|90101611|sp|Q4IQK7.1|RMT2_GIBZE RecName: Full=Arginine N-methyltransferase 2
  misc_feature (4)..(418): NCBI GI: 116180900 Blast Desc: CHGG_01078 [Chaetomium globosum CBS 148.51] gi|88185375|gb|EAQ92843.1| CHGG_01078 [Chaetomium globosum CBS 148.51]
  misc_feature (4)..(426): NCBI GI: 171695948 Blast Desc: protein product [Podospora anserina] gi|170948216|emb|CAP60380.1| protein product [Podospora anserina]
  misc_feature (3)..(426): NCBI GI: 85111236 Blast Desc: NCU08111 [Neurospora crassa OR74A] gi|74617791|sp|Q7SCW9.1|RMT2_NEUCR RecName: Full=Arginine N-methyltransferase 2 gi|28925581|gb|EAA34605.1| conserved crassa
  misc_feature (9)..(410): NCBI GI: 145605421 Blast Desc: MGG_09290 [Magnaporthe grisea 70-15] gi|145013250|gb|EDJ97891.1| MGG_09290 [Magnaporthe grisea 70-15]
  misc_feature (21)..(426): NCBI GI: 156062312 Blast Desc: SS1G_01272 [Sclerotinia sclerotiorum 1980] gi|154696608|gb|EDN96346.1| SS1G_01272 [Sclerotinia sclerotiorum 1980]
  misc_feature (16)..(426): NCBI GI: 154297360 Blast Desc: BC1G_12084 [Botryotinia fuckeliana B05.10] gi|150858589|gb|EDN33781.1| BC1G_12084 [Botryotinia fuckeliana B05.10]
  misc_feature (17)..(425): NCBI GI: 119480755 Blast Desc: arginine N-methyltransferase (Rmt2), [Neosartorya fischeri NRRL 181] gi|119408560|gb|EAW18509.1| arginine N-methyltransferase (Rmt2), [Neosartorya fischeri NRRL 181]
  misc_feature (17)..(425): NCBI GI: 159129326 Blast Desc: arginine N-methyltransferase (Rmt2), [Aspergillus fumigatus A1163]
  misc_feature: Useful for introducing or modulating the production of volatile compounds
MQDDKIETRIPPSCPASISQILYHAWNHDLAGLKPLLTVPGRANVQEPTTGETPLHAAIRSCASATEDHPVDIEAAKAVLQELFFSGAIWNDIDSNNETPGCLADRLGQTELYNLCVDAGLRAELLHKLLEGYEEIDSQDDEDIAEVEDEEEGDGVQVEAEPAEEVEPEDVILESDPDRQFAPPKIEDPDVNSEEYLRANLTYSEGKLVDDAQNGVMMAWETSIMRSSVEALLPGLAIGKRILNIGFGMGIIDAMFHETHPSKHHIIEAHPEVLKHISSPDCKFGSSWEESGPSPGAYKVHAGKWQDIMPKLLEQGELYDAIYFDTFGEDYSELYTFFTEYVPGMLDDGGVFGFFNGLGADRKVCYDVYSKVVEMHLTDAGLDVEWKELEVDMKGLEKEGEGEWQGVKRRYWTLDKYRLPIITLMG

SEQ ID NO: 9384 - DNA, 3472 bp, Muscodor strobelii; identical to SEQ ID NO: 9381
  misc_feature: SGI EST ID NO. CUFF.22397.0
  misc_feature: Variant of the nucleotide sequence at SEQ ID NO 9382

SEQ ID NO: 9385 - DNA, 1488 bp, Muscodor strobelii
  misc_feature: SGI cDNA ID NO. 562931
  misc_feature: Encodes the peptide sequence at SEQ ID NO 9386
atggttggcgtgggtcctcgaaagccgccgtcccgcaagggatctatggccgatgtgccaaaggacctcttaaccgagatcaaggcattggaagaggcattcactgtagacacggccaagctcaagcagatcatgcatcatttcgtctccgagctcgacaaaggtcttagtgtggaaggcggcagcattccgatgaacccaacctgggttatggatttcccagatggatacgagactggaacattcctggctttggatatgggtggtacaaatttgcgtgtttgtgagattaccttaacagacacgaagtcggagttcgacattattcagtccaaatatcgcatgcccgaagagctcaagaccggcgactccgaagaactctgggaatacatagccgattgtctacagcaattcgttgacatccactgtgaggagattccccatggttcacctaagatcccacttggtttcactttctcgtatcctgccacccagaactatatcgacgagggtgtacttcagcgatggaccaagggcttcgatatcaacggtgttgagggccagaatgttgttcccatgctcgaagctgctttgatcgcacgtggtgttcctatcactgttagtgctttgatcaacgataccactggtaccctgattgcttctgcctacaccgaccccagtatgaagattggttgcattttcggtacagggtgcaatgcggcctacatggagaactgcggctcgattcccaagttggcccatatgaacttacctcccgatttgcccatggccatcaactgtgaatggggcgcttttgacaacgagaacaaggtccttccacggacaaagtacgacatcatcattgacaaggaatctcctcgccccggacaacaggccttcgagaaatgtatcgccggcctgtacctcggagagatcttccgtctgatcatggtagacctccatgataacaaggatattcacatctttgagggtcaagatatcaagaatctgcgaaggccatacactttggatgcatccttcttgtcagccatcgaggatgaccccttcgagaacttgcaagagacgcacgatctgttcagggacaagcttaacttgacctgcactcgccatgagctcgaactcattcggcgagctgccgagttgatcggtacccgtgctgctcgcctatctgcttgtggcgtcgctgccatctgcaccaagaagaatttggagccgtgccacgtcggtgccgacgggtccgtatttaataagtaccctcactttaaggctcgtggtgcccaggctctgcgcgagctcctcgactggcctgccaagaaatccatgaaagaggaggaccctgttgagatcttggcagccgaagatggaagcggtgttggcgctgcactaattgccgctctaacactcaagcgagttgcccaaggaaatgtccatggcattttacatcctgagaatttccaggcaaagtaa

SEQ ID NO: 9386 - protein, 495 aa, Muscodor strobelii
  misc_feature: SGI Peptide ID NO. 562931
  misc_feature (21)..(225): Pfam Id: PF00349 Pfam Desc: Hexokinase
  misc_feature (227)..(476): Pfam Id: PF03727 Pfam Desc: Hexokinase
  misc_feature (229)..(476): Pfam Id: PF03727 Pfam Desc: Hexokinase
  misc_feature (1)..(493): NCBI GI: 156062314 Blast Desc: SS1G_01273 [Sclerotinia sclerotiorum 1980] gi|154696609|gb|EDN96347.1| SS1G_01273 [Sclerotinia sclerotiorum 1980]
  misc_feature (1)..(492): NCBI GI: 67937782 Blast Desc: hexokinase [Hypocrea jecorina]
  misc_feature (1)..(493): NCBI GI: 256735252 Blast Desc: hexokinase [Nectria haematococca mpVI 77-13-4]
  misc_feature (1)..(493): NCBI GI: 154297364 Blast Desc: hexokinase [Botryotinia fuckeliana B05.10] gi|120564541|gb|ABM30191.1| hexokinase [Botryotinia fuckeliana] gi|150858591|gb|EDN33783.1| hexokinase [Botryotinia fuckeliana
  misc_feature (1)..(493): NCBI GI: 261356005 Blast Desc: hexokinase [Verticillium albo-atrum VaMs.102]
  misc_feature (1)..(493): NCBI GI: 166797281 Blast Desc: hexokinase HXK1 [Gibberella moniliformis]
  misc_feature (11)..(493): NCBI GI: 46107234 Blast Desc: FG00500.1 [Gibberella zeae PH-1]
  misc_feature (16)..(493): NCBI GI: 39958811 Blast Desc: hexokinase [Magnaporthe grisea 70-15] gi|145013251|gb|EDJ97892.1| hexokinase [Magnaporthe grisea 70-15]
  misc_feature (14)..(493): NCBI GI: 164427891 Blast Desc: hexokinase [Neurospora crassa OR74A] gi|157071924|gb|EAA36437.2| hexokinase [Neurospora crassa OR74A]
  misc_feature (14)..(493): NCBI GI: 171695942 Blast Desc: protein product [Podospora anserina] gi|170948213|emb|CAP60377.1| protein product [Podospora anserina]
  misc_feature (1)..(486): SWISSPROT Homolog: EC 2.7.1.1 Hexokinase
MVGVGPRKPPSRKGSMADVPKDLLTEIKALEEAFTVDTAKLKQIMHHFVSELDKGLSVEGGSIPMNPTWVMDFPDGYETGTFLALDMGGTNLRVCEITLTDTKSEFDIIQSKYRMPEELKTGDSEELWEYIADCLQQFVDIHCEEIPHGSPKIPLGFTFSYPATQNYIDEGVLQRWTKGFDINGVEGQNVVPMLEAALIARGVPITVSALINDTTGTLIASAYTDPSMKIGCIFGTGCNAAYMENCGSIPKLAHMNLPPDLPMAINCEWGAFDNENKVLPRTKYDIIIDKESPRPGQQAFEKCIAGLYLGEIFRLIMVDLHDNKDIHIFEGQDIKNLRRPYTLDASFLSAIEDDPFENLQETHDLFRDKLNLTCTRHELELIRRAAELIGTRAARLSACGVAAICTKKNLEPCHVGADGSVFNKYPHFKARGAQALRELLDWPAKKSMKEEDPVEILAAEDGSGVGAALIAALTLKRVAQGNVHGILHPENFQAK

SEQ ID NO: 9387 - DNA, 2147 bp, Muscodor strobelii
  misc_feature: SGI EST ID NO. CUFF.22398.1
  misc_feature: Variant of the nucleotide sequence at SEQ ID NO 9385
cccatcttgataacttcaacaggagtggtccttttgtggaccaggacagcaattagattcgccctagccttctttgctttagagttgacatttataatgggcatccaaggttcgctcttttgtgtgcccctcttgacccgagagctccagcccgaccttcgtcattgttgaaaataatatcaatacgcagctgaccttgtaacttctgcgtcttcctgcgatcgtcaaccagctccccttcctgccaccatccttcgtcgagcacgactcctgtaagtcgagctgagtaagggtcttttagtggctgagccaagcttcgcttctttaacatcagctgcattccatcgctacccctccatctcatactaaaacctctttgtcgccgaggttaagacccagagctatcgcaatatatcgtgatatcgattctgttctacaacgattatattatttctataatcgacttctatcaaaatggttggcgtgggtcctcgaaagccgccgtcccgcaagggatctatggccgatgtgccaaaggacctcttaaccgagatcaaggcattggaagaggcattcactgtagacacggccaagctcaagcagatcatgcatcatttcgtctccgagctcgacaaaggtcttagtgtggaaggcggcagcattccgatgaacccaacctgggttatggatttcccagatggatacgagactggaacattcctggctttggatatgggtggtacaaatttgcgtgtttgtgagattaccttaacagacacgaagtcggagttcgacattattcagtccaaatatcgcatgcccgaagagctcaagaccggcgactccgaagaactctgggaatacatagccgattgtctacagcaattcgttgacatccactgtgaggagattccccatggttcacctaagatcccacttggtttcactttctcgtatcctgccacccagaactatatcgacgagggtgtacttcagcgatggaccaagggcttcgatatcaacggtgttgagggccagaatgttgttcccatgctcgaagctgctttgatcgcacgtggtgttcctatcactgttagtgctttgatcaacgataccactggtaccctgattgcttctgcctacaccgaccccagtatgaagattggttgcattttcggtacagggtgcaatgcggcctacatggagaactgcggctcgattcccaagttggcccatatgaacttacctcccgatttgcccatggccatcaactgtgaatggggcgcttttgacaacgagaacaaggtccttccacggacaaagtacgacatcatcattgacaaggaatctcctcgccccggacaacaggccttcgagaaatgtatcgccggcctgtacctcggagagatcttccgtctgatcatggtagacctccatgataacaaggatattcacatctttgagggtcaagatatcaagaatctgcgaaggccatacactttggatgcatccttcttgtcagccatcgaggatgaccccttcgagaacttgcaagagacgcacgatctgttcagggacaagcttaacttgacctgcactcgccatgagctcgaactcattcggcgagctgccgagttgatcggtacccgtgctgctcgcctatctgcttgtggcgtcgctgccatctgcaccaagaagaatttggagccgtgccacgtcggtgccgacgggtccgtatttaataagtaccctcactttaaggctcgtggtgcccaggctctgcgcgagctcctcgactggcctgccaagaaatccatgaaagaggaggaccctgttgagatcttggcagccgaagatggaagcggtgttggcgctgcactaattgccgctctaacactcaagcgagttgcccaaggaaatgtccatggcattttacatcctgagaatttccaggcaaagtaaagttgcagagtgtagctagcaatagtgcgcaccacttcagaatagtgtctccaaatgtccgttagattggttagatatagagatgggttggttcaaatcctgcgaaatcgattcacgattcacctgtatatcctgtctttcgtacgtgcctcgtgttcatttatcccatcaaggtgataatcggc

SEQ ID NO: 9388 - DNA, 1485 bp, Muscodor strobelii
  misc_feature: SGI cDNA ID NO. 562932
  misc_feature: Encodes the peptide sequence at SEQ ID NO 9389
atgaagttcgctgctgtcgccgcggcgtgtctttcactgctgccctccatatctgcccatgccaccagcaatgcgactcttgcagattcgtcagaggacatattgtctactcctttcaagcccccgcaagtcttcaagaacgccaacctcgttcacataatctcgctggagaagaactacgccaaggaaagcatcaacgtggtcattgagaacgtgtcgcccgacgcccaagatgaatacttcttgcccttcaccacccagcagatggccaaggtcggcgcctttgaggtcaaagacaggaaagatgagaaccttgccggattcgaggtcactgccgtcgagttcgacccttctagtgacacccagttctaccggataaagctgcctgcgccattgccttccaagggccagcagactctcggcatctcctactacctcctcgattcgctgtctcctctgccggcttctatcaagcaaaccgagaagcaatacctgtcctttgcattctccgcatactgcgcttccgcataccctacatcaaagcagaagaccgagctgaagatgccttcctccgatgtccccgactacaccaaagtcctcgcaaccagccccgagacgaaggaataccccgtcatctcaggatccaagctcacctacggccccttcacggatgtcccagcgggcgccacatcgcccgccaaggtgcgataccaattcaacaagcctgtgacgcacgttgccaatctcgagcgcgacatcgaggtcagccattggggaggcaacgtggccgtcgaggagcgctacaccctcctgcaccgcggcgcgagcctcgtcaacaacttcaaccgcgtccagtgggcttcatctgcttatttcgatcctaagactttcgcgcttaaggagctgaagatcccacttagcgcaggtaccaaggatgcgtactacacagatgttattggcaatgtgtcgacatcacgcttccgtgagggcaagcgagagaacctgctggagctgaagccccgctaccccatctttggcggctggaaatatccattcaccattggctggaacaccgattccaccaagtacctgaagaacgaaggcagcagccatgtcctccgagttcccttccttgagggaccaaagcagtctgaaggtatcgagtacgagcacgttgatgttcgtgtcattttacctgagggagccagcaatgttaagtacagcacttcagccccgacatcttcggttgtgagtgccagcgaagggacgctgaaaacatttctggatacctttggccgaaccgtcctcaccatcaaggcacgtaacttggttgacgaattacgggaccgcgaactagtcgtgacatatgactactctacggcaatggctcttcgcaagccatacattattttcacaagcatgataacagtctttgcagggctatggttcgtgtcgaagatccccgtatcattttcaccgaagtaa

SEQ ID NO: 9389 - protein, 494 aa, Muscodor strobelii
  misc_feature: SGI Peptide ID NO. 562932
  misc_feature (44)..(486): Pfam Id: PF04597 Pfam Desc: Ribophorin I
  misc_feature (39)..(494): NCBI GI: 116180912 Blast Desc: CHGG_01084 [Chaetomium globosum CBS 148.51] gi|88185381|gb|EAQ92849.1| CHGG_01084 [Chaetomium globosum CBS 148.51]
  misc_feature (30)..(492): NCBI GI: 171696354 Blast Desc: protein product [Podospora anserina] gi|170948419|emb|CAP60583.1| protein product [Podospora anserina]
  misc_feature (1)..(494): NCBI GI: 256734536 Blast Desc: NECHADRAFT_90136 [Nectria haematococca mpVI 77-13-4]
  misc_feature (1)..(494): NCBI GI: 39958788 Blast Desc: MGG_09287 [Magnaporthe grisea 70-15] gi|145013253|gb|EDJ97894.1| MGG_09287 [Magnaporthe grisea 70-15]
  misc_feature (1)..(494): NCBI GI: 85119605 Blast Desc: NCU02541 [Neurospora crassa OR74A] gi|28927484|gb|EAA36436.1| conserved [Neurospora crassa OR74A]
  misc_feature (1)..(494): NCBI GI: 46107232 Blast Desc: FG00499.1 [Gibberella zeae PH-1]
  misc_feature (1)..(494): NCBI GI: 156062316 Blast Desc: SS1G_01274 [Sclerotinia sclerotiorum 1980] gi|154696610|gb|EDN96348.1| SS1G_01274 [Sclerotinia sclerotiorum 1980]
  misc_feature (1)..(494): NCBI GI: 154297366 Blast Desc: oligosaccharyltransferase alpha subunit [Botryotinia fuckeliana B05.10] gi|150858592|gb|EDN33784.1| oligosaccharyltransferase alpha subunit [Botryotinia fuckeliana
  misc_feature (1)..(490): NCBI GI: 169600453 Blast Desc: SNOG_03060 [Phaeosphaeria nodorum SN15] gi|111068671|gb|EAT89791.1| SNOG_03060 [Phaeosphaeria nodorum SN15]
  misc_feature (9)..(494): NCBI GI: 189211333 Blast Desc: oligosaccharyltransferase alpha subunit [Pyrenophora tritici-repentis Pt-1C-BFP] gi|187978090|gb|EDU44716.1| oligosaccharyltransferase alpha subunit [Pyrenophora Pt-1C-BFP]
  misc_feature (41)..(478): SWISSPROT Homolog: EC 2.4.1.119 Dolichyl-diphosphooligosaccharide--protein glycotransferase
MKFAAVAAACLSLLPSISAHATSNATLADSSEDILSTPFKPPQVFKNANLVHIISLEKNYAKESINVVIENVSPDAQDEYFLPFTTQQMAKVGAFEVKDRKDENLAGFEVTAVEFDPSSDTQFYRIKLPAPLPSKGQQTLGISYYLLDSLSPLPASIKQTEKQYLSFAFSAYCASAYPTSKQKTELKMPSSDVPDYTKVLATSPETKEYPVISGSKLTYGPFTDVPAGATSPAKVRYQFNKPVTHVANLERDIEVSHWGGNVAVEERYTLLHRGASLVNNFNRVQWASSAYFDPKTFALKELKIPLSAGTKDAYYTDVIGNVSTSRFREGKRENLLELKPRYPIFGGWKYPFTIGWNTDSTKYLKNEGSSHVLRVPFLEGPKQSEGIEYEHVDVRVILPEGASNVKYSTSAPTSSVVSASEGTLKTFLDTFGRTVLTIKARNLVDELRDRELVVTYDYSTAMALRKPYIIFTSMITVFAGLWFVSKIPVSFSPK

SEQ ID NO: 9390 - DNA, 2152 bp, Muscodor strobelii
  misc_feature: SGI EST ID NO. CUFF.22256.0
  misc_feature: Variant of the nucleotide sequence at SEQ ID NO 9388
gcgggacgggcgctagaccgggcacctggcaagatccaatggtggggctagtctcggggcccctgtcgtttcgtcgcagtcgagcagttgcatggatggctgcatcaagcaacgtaagctgtaacttttggacaggtgtagctccgggtctcagttcccaccacggcgatagagcaacacggcagcaccacacgttcaagctaccacgatcgcaaacccaatcgccaaaacggccaccattgcttactcggcgccgctcgccccccttgtgtcctctgttccgcatctgcgtgccggttgccattgaggagaggaggctgctcgatcgatgagctctcccgccggcatctcgtcaccatgaagttcgctgctgtcgccgcggcgtgtctttcactgctgccctccatatctgcccatgccaccagcaatgcgactcttgcagattcgtcagaggacatattgtctactcctttcaagcccccgcaagtcttcaagaacgccaacctcgttcacataatctcgctggagaagaactacgccaaggaaagcatcaacgtggtcattgagaacgtgtcgcccgacgcccaagatgaatacttcttgcccttcaccacccagcagatggccaaggtcggcgcctttgaggtcaaagacaggaaagatgagaaccttgccggattcgaggtcactgccgtcgagttcgacccttctagtgacacccagttctaccggataaagctgcctgcgccattgccttccaagggccagcagactctcggcatctcctactacctcctcgattcgctgtctcctctgccggcttctatcaagcaaaccgagaagcaatacctgtcctttgcattctccgcatactgcgcttccgcataccctacatcaaagcagaagaccgagctgaagatgccttcctccgatgtccccgactacaccaaagtcctcgcaaccagccccgagacgaaggaataccccgtcatctcaggatccaagctcacctacggccccttcacggatgtcccagcgggcgccacatcgcccgccaaggtgcgataccaattcaacaagcctgtgacgcacgttgccaatctcgagcgcgacatcgaggtcagccattggggaggcaacgtggccgtcgaggagcgctacaccctcctgcaccgcggcgcgagcctcgtcaacaacttcaaccgcgtccagtgggcttcatctgcttatttcgatcctaagactttcgcgcttaaggagctgaagatcccacttagcgcaggtaccaaggatgcgtactacacagatgttattggcaatgtgtcgacatcacgcttccgtgagggcaagcgagagaacctgctggagctgaagccccgctaccccatctttggcggctggaaatatccattcaccattggctggaacaccgattccaccaagtacctgaagaacgaaggcagcagccatgtcctccgagttcccttccttgagggaccaaagcagtctgaaggtatcgagtacgagcacgttgatgttcgtgtcattttacctgagggagccagcaatgttaagtacagcacttcagccccgacatcttcggttgtgagtgccagcgaagggacgctgaaaacatttctggatacctttggccgaaccgtcctcaccatcaaggcacgtaacttggttgacgaattacgggaccgcgaactagtcgtgacatatgactactctacggcaatggctcttcgcaagccatacattattttcacaagcatgataacagtctttgcagggctatggttcgtgtcgaagatccccgtatcattttcaccgaagtaacgaatgaggaatgaggtttcgaactagagggatgagcgaagatttctagacacttctgtaggaatagtaaaaacgtgcctcatgttgcactaggagaagcgaacgtaaccagagaagaattcaagatatgaaaactgtcgatgtcttacccgtttactgtaaaatgtgtttcagttgatgtgctgttacagtcgttctggtcctcgatacctacaagcagaattgtgattggcctagatacaatacatatgaaggagaatagtacatggatgatatactcgatctgatatgcattcatcgctgctagagc

SEQ ID NO: 9391 - DNA, 1413 bp, Muscodor strobelii
  misc_feature: SGI cDNA ID NO. 562933
  misc_feature: Encodes the peptide sequence at SEQ ID NO 9392
atgctgcaagagtgtcaaattctaaaggacaatatcaagcatgtctattttcctaatagtaccgcatattccgaggatgtcgagtcatacttctctctcactgctcagttgacaccctggtgtttcgttcaacccgaaaacaccactgaggtagtgtcaactttaaggatcttatctacaaagactcaatgcaaatttgctgtccgcagtggtggccactcctctgttactggtgcaaataatattgaagatggtgttacgattgatcttagcctcatgaacaagacaacctacaacgctgagaccggactcgcatctgtccgtccagggtctcgatgggcggcagtctacgaaacacttgatcaacttggggtaggcataccaggaggacgcctaggcgaggtaggtgttggaggatacctacttggaggtggttgttctctctatatgtttcgatatggatttgcatgcgatagtgtccgccgctttgaagttgcgctcgccaacgggactgttgtcgacgctagcccagatgataattcagacctcttcaccgcattgaagggcggaggcaacaatttcggtattgtcacccgctttgatgtgcagacttttactccgagcctcatctggagtgcttacttcgaataccctgagagcgctggggctgctcacattactgctttgaaacactgggtcgataatctcgaatcgtaccagaacggctcggcggttgtttggtggagttatattcctgccatgaaccagacgatcgtcgtcaaatcattagccgataccggtggtaaagttgcagcgccggcttttgacgagtttctcggtattcctgggaacatctcagcgacttatttgatgtcaaatatatccggcttcgcaacaggcactcaagcctcgggctaccggaacatatggttcagcgtgacgttcaagaacgatgagcgtataattgccaaagccgtcgatctccatcgtacacttgtagaagagatgaaagctgaatcttccgatggcgattttgagacgcagtgtttcttccaagctctgccttcaatcgttgcaaaacacggggtcgagagaggcggaaatatcgtgggtattggcagtctcaaagacaatgccatggttctcctgggatcgattgcgctaaatggtattgaccaggaagagctcgcgcgtaagaagatgattgcgtggaaggacgcaatggtggcttacagcaagaacctcaatgagcatatcgattttatttacaaaaattacgccgatgggtcgcaggatgttctaagcagctatggagaaaagaacgtggagaaaatgttggccgtgtctatgaaatacgatcctgatgggatatttcagaaacgagttcctggaggattcaagataccgaactaa

SEQ ID NO: 9392 - protein, 470 aa, Muscodor strobelii
  misc_feature: SGI Peptide ID NO. 562933
  misc_feature (39)..(176): Pfam Id: PF01565 Pfam Desc: FAD binding domain
  misc_feature (5)..(468): NCBI GI: 46118786 Blast Desc: FG04732.1 [Gibberella zeae PH-1]
  misc_feature (5)..(468): NCBI GI: 169609567 Blast Desc: SNOG_07875 [Phaeosphaeria nodorum SN15] gi|111063031|gb|EAT84151.1| SNOG_07875 [Phaeosphaeria nodorum SN15]
  misc_feature (1)..(468): NCBI GI: 189198724 Blast Desc: conserved [Pyrenophora tritici-repentis Pt-1C-BFP] gi|187982798|gb|EDU48286.1| conserved [Pyrenophora tritici-repentis Pt-1C-BFP]
  misc_feature (2)..(469): NCBI GI: 256726365 Blast Desc: NECHADRAFT_39434 [Nectria haematococca mpVI 77-13-4]
  misc_feature (11)..(468): NCBI GI: 255945439 Blast Desc: Pc20g09930 [Penicillium chrysogenum Wisconsin 54-1255] gi|211588222|emb|CAP86322.1| Pc20g09930 [Penicillium chrysogenum Wisconsin 54-1255]
  misc_feature (14)..(468): NCBI GI: 256732288 Blast Desc: NECHADRAFT_41792 [Nectria haematococca mpVI 77-13-4]
  misc_feature (13)..(468): NCBI GI: 39966920 Blast Desc: MGG_01941 [Magnaporthe grisea 70-15] gi|145009563|gb|EDJ94219.1| MGG_01941 [Magnaporthe grisea 70-15]
  misc_feature (14)..(459): NCBI GI: 145237346 Blast Desc: An07g02360 [Aspergillus niger] gi|134075789|emb|CAK39325.1| protein product [Aspergillus niger]
  misc_feature (14)..(470): NCBI GI: 46110302 Blast Desc: FG02033.1 [Gibberella zeae PH-1]
  misc_feature (15)..(468): NCBI GI: 255953743 Blast Desc: Pc21g05780 [Penicillium chrysogenum Wisconsin 54-1255] gi|211589335|emb|CAP95475.1| Pc21g05780 [Penicillium chrysogenum Wisconsin 54-1255]
MLQECQILKDNIKHVYFPNSTAYSEDVESYFSLTAQLTPWCFVQPENTTEVVSTLRILSTKTQCKFAVRSGGHSSVTGANNIEDGVTIDLSLMNKTTYNAETGLASVRPGSRWAAVYETLDQLGVGIPGGRLGEVGVGGYLLGGGCSLYMFRYGFACDSVRRFEVALANGTVVDASPDDNSDLFTALKGGGNNFGIVTRFDVQTFTPSLIWSAYFEYPESAGAAHITALKHWVDNLESYQNGSAVVWWSYIPAMNQTIVVKSLADTGGKVAAPAFDEFLGIPGNISATYLMSNISGFATGTQASGYRNIWFSVTFKNDERIIAKAVDLHRTLVEEMKAESSDGDFETQCFFQALPSIVAKHGVERGGNIVGIGSLKDNAMVLLGSIALNGIDQEELARKKMIAWKDAMVAYSKNLNEHIDFIYKNYADGSQDVLSSYGEKNVEKMLAVSMKYDPDGIFQKRVPGGFKIPN

SEQ ID NO: 9393 - DNA, 623 bp, Muscodor strobelii
  misc_feature: SGI EST ID NO. CUFF.22269.0
  misc_feature: Variant of the nucleotide sequence at SEQ ID NO 9391
tacgggccggatctatgctctgcagcagcacaaccatacccacgtgggaaatgctacatatacaaactccactatatcacaacgcaggacgatgccactggtggttgaggtatggggtagatgcaacgctcttcaacagcaccatggttaatactgcatcgtaggaagagtttcccgtagttctaccgaatagactgtaggagactatggcgaaacagtaggtggttttggtatataacggcgtgcctttcctcagtataacatcttgcacaattaaacacaatgctgcaagaggtaagcaagcatgagatcaatagtaaagtttataacttccacaattttgttgggaggagttgctgttgggtctcaatggctggtattgtcttcagatagtcctgcatactgttgtcaaattctaaaggacaatatcaagcatgtctattttcctaatagtaccgcatattccgaggatgtcgagtcatacttctctctcactgctcagttgacaccctggtgtttcgttcaacccgaaaacaccactgaggtagtgtcaactttaaggatcttatctacaaagactcaatgcaaatttgctgtccgcagtggtggccactcctctgtta

SEQ ID NO: 9394 - DNA, 1038 bp, Muscodor strobelii
  misc_feature: SGI cDNA ID NO. 562934
  misc_feature: Reduced expression when VOC is produced
  misc_feature: Encodes the peptide sequence at SEQ ID NO 9395
atggatttctttttcagaagcaactccaaaggcatcgcagagcttgaaagacagtcatcacgatcaccgttagcacctcttacaccacagcctagagcaaccgcgccatcgccgctcaggaagactcagatgaaccgttcactatctattcgctctgggaagggcaatagtacgacatcgcctacgtctcggaaaggtttctcatttgcatcactccgtggctcaatccaaccggaactatctcgcaaactgtataagcttatcaagtcgacgaacaacttgatttcggcccacgaagcagccggcaaagagcgcgacaccattgctcgagagttatcagaatggggcgaacagacacaggacgagggcgtctctgatatcagcgacaagattggtgtcatcctcagtgaactcggtgcacaagaagatagctatgcacacaacctagatgacgcacgtggtatcctcaagactattcgtaacacggagaagagcgtacaaccgagccgagatagtaaaggcaagattgccgacgagatccagaaactcaagtccaaggagcctcagagtacgaagattgtaatccttgagcaggaactcgtgagagcagaggctgagaatctggttgctgaggcgcagctaacgaacgtcactcgctcgaagttaaaagaagcgtatgatgccgagttcgcagccgtcatcgagcgggcagagaagcagatcatcctcgctaagcacgggcgtcgtctcatccatctgctcgacgacactcccgtcacgcctggcgacacacgtcatggttatgaaaatgccggggccgctcgacaggtcctgaacgacgctgaggatgatcttaaggcttgggaaaagacgcgcggagaggaggcacatgaaagcacaacagatgctggttcggtcctgcaccgcacaggtgaggaatccaccacatctgaagcagctggcacatcgcctaaaggcgaggccactgctaaatcagacgctgcgcaggtttctcccatctcgccgcttgacgcttga

SEQ ID NO: 9395 - protein, 345 aa, Muscodor strobelii
  misc_feature: SGI Peptide ID NO. 562934
  misc_feature (45)..(291): NCBI GI: 164427893 Blast Desc: NCU02540 [Neurospora crassa OR74A] gi|157071925|gb|EAA36435.2| conserved [Neurospora crassa OR74A]
  misc_feature (38)..(288): NCBI GI: 46107228 Blast Desc: FG00497.1 [Gibberella zeae PH-1]
  misc_feature (45)..(289): NCBI GI: 261356004 Blast Desc: sphingolipid long chain base-responsive protein LSP1 [Verticillium albo-atrum VaMs.102]
  misc_feature (42)..(289): NCBI GI: 156045237 Blast Desc: SS1G_09807 [Sclerotinia sclerotiorum 1980] gi|154694202|gb|EDN93940.1| SS1G_09807 [Sclerotinia sclerotiorum 1980]
  misc_feature (22)..(336): NCBI GI: 154291550 Blast Desc: BC1G_15020 [Botryotinia fuckeliana B05.10] gi|150846736|gb|EDN21929.1| BC1G_15020 [Botryotinia fuckeliana B05.10]
  misc_feature (45)..(305): NCBI GI: 225681119 Blast Desc: conserved [Paracoccidioides brasiliensis Pb03]
  misc_feature (69)..(289): NCBI GI: 242777490 Blast Desc: conserved [Talaromyces stipitatus ATCC 10500] gi|218722663|gb|EED22081.1| conserved [Talaromyces stipitatus ATCC 10500]
  misc_feature (45)..(289): NCBI GI: 226292177 Blast Desc: long chain base Stimulates Phosphorylation [Paracoccidioides brasiliensis Pb18]
  misc_feature (44)..(289): NCBI GI: 212533189 Blast Desc: conserved [Penicillium marneffei ATCC 18224] gi|210072115|gb|EEA26204.1| conserved [Penicillium marneffei ATCC 18224]
  misc_feature (67)..(339): NCBI GI: 154274910 Blast Desc: conserved [Ajellomyces capsulatus NAm1] gi|150414746|gb|EDN10108.1| conserved [Ajellomyces capsulatus NAm1]
  misc_feature: Useful for introducing or modulating the production of volatile compounds
MDFFFRSNSKGIAELERQSSRSPLAPLTPQPRATAPSPLRKTQMNRSLSIRSGKGNSTTSPTSRKGFSFASLRGSIQPELSRKLYKLIKSTNNLISAHEAAGKERDTIARELSEWGEQTQDEGVSDISDKIGVILSELGAQEDSYAHNLDDARGILKTIRNTEKSVQPSRDSKGKIADEIQKLKSKEPQSTKIVILEQELVRAEAENLVAEAQLTNVTRSKLKEAYDAEFAAVIERAEKQIILAKHGRRLIHLLDDTPVTPGDTRHGYENAGAARQVLNDAEDDLKAWEKTRGEEAHESTTDAGSVLHRTGEESTTSEAAGTSPKGEATAKSDAAQVSPISPLDA

SEQ ID NO: 9396 - DNA, 2546 bp, Muscodor strobelii
  misc_feature: SGI EST ID NO. CUFF.22715.1
  misc_feature: Variant of the nucleotide sequence at SEQ ID NO 9394
ttgtcttgtatcttgaaggcgaaatttctagataaattcccaagcttccgctctctgaggtttgaagttcttgagatttgttcattctcatctatacaactcatcaagaattactactctgtctatcaccgatcagctgatagtctgccaagatcactttcaaaatcacgtatctactcttcagctccaaaagaaccaataaaatttgtccattagacacacctactacttaaatcttgctccgccagtgaccaggccgcgagcaactacttatcacttatgccctacacaacaactacaactacaacacggtatttccatcataccgacccagctaagatgtgtttccgcacagaaccagcgcgcaaatattactaccatgaggagtacatacctgttcgacagcaccatggccaccaccaccactctcaccagaccagagtctcaacgccagtgcgtgtcagttacccacgtgtaagcacaagcagccatcgacacagcggaccgatcgtctacgagcggacaagccagacgcgataccgctgaagcaacaattcattcgctcgtttgttcaatactgaatgagttcggatgagggccaaatgcaagggcccgaacgatcttgcgtgacgcaaaacagagtctccatctcgaaatcgtcaattggcggttcgaggtgtggtagccaattacgtcatcgttcttaagtgggctgcccgtcgactgaacaccacaagagcatcaacaatcgcttcctttcacctcttttagaaataagggttatgtaatgctttgggtatctatatcatatttgtatttaattatttgcaaacgttcacgattttaattttgttaacggttgttggattgaagcgggtggttgaacatcctttggcgcttggtggcctccgtcagcggcgttctagatcgtggggacttaggtggtatgtgaaatttgacctaggcgctatgtacgattggatgatactacgttgaggggttcattaggggtcctcgagaattcgcctaagggaagacatgacatcaatgacatatgcaccttctatcaagtccgcattctggttcctctgtcatgtcttagtttcgtttcgagggctgcacgtcgctctttatgtttgatagtaatgacgtatgacctggacctgaaagatacttttgagtaacgaccgtatacgccagaatcaatggaactactatacaaatatataaatattctcaagcaattttaaacccttgttcctgtcagatcgtccgatcagtcgactgtcccgaatcctggaatccgtttctatcaaacctacatcttggtctctatcgcctatacttatctaatatcatcatcgaaactgatctctcgaaaccttgtacacaatgaaccgttcactatctattcgctctgggaagggcaatagtacgacatcgcctacgtctcggaaaggtttctcatttgcatcactccgtggctcaatccaaccggaactatctcgcaaactgtataagcttatcaagtcgacgaacaacttgatttcggcccacgaagcagccggcaaagagcgcgacaccattgctcgagagttatcagaatggggcgaacagacacaggacgagggcgtctctgatatcagcgacaagattggtgtcatcctcagtgaactcggtgcacaagaagatagctatgcacacaacctagatgacgcacgtggtatcctcaagactattcgtaacacggagaagagcgtacaaccgagccgagatagtaaaggcaagattgccgacgagatccagaaactcaagtccaaggagcctcagagtacgaagattgtaatccttgagcaggaactcgtgagagcagaggctgagaatctggttgctgaggcgcagctaacgaacgtcactcgctcgaagttaaaagaagcgtatgatgccgagttcgcagccgtcatcgagcgggcagagaagcagatcatcctcgctaagcacgggcgtcgtctcatccatctgctcgacgacactcccgtcacgcctggcgacacacgtcatggttatgaaaatgccggggccgctcgacaggtcctgaacgacgctgaggatgatcttaaggcttgggaaaagacgcgcggagaggaggcacatgaaagcacaacagatgctggttcggtcctgcaccgcacaggtgaggaatccaccacatctgaagcagctggcacatcgcctaaaggcgaggccactgctaaatcagacgctgcgcaggtttctcccatctcgccgcttgacgcttgatcataccttgacgtggtttatgggcaacgattattggaccaaagtttagttaagaagtcgaaacgggtttaatgtattgtactttagttgggatctttgagagcgagcctgtatcgtctgagtggtatggtacgcctaattcgggagaacacgtaataaagtagtggtattcacgcaactaatcgtagtttctctcgtcaagtgagggagaaaacaattaatactgaaaaacaatttatgcccaa

SEQ ID NO: 9397 - DNA, 1482 bp, Muscodor strobelii
  misc_feature: SGI cDNA ID NO. 562935
  misc_feature: Reduced expression when VOC is produced
  misc_feature: Encodes the peptide sequence at SEQ ID NO 9398
atggatctgttcgtagccactgggcggcaactccgacgatctacgccgaggatatgtcagagttgcaaccagaagctcagacagcagcgagctcggtcgtacgcgagcacatcacagccagacatctatgatgtcgtctgcgtagggggcggacctgcgggactgagcctcctggctgcgctgaaggcgaatccaaccacggccggtctccgcgtagcgcttgtcgaagcgcaagatcttagcaaactgcgatcctggcaatcccctcgcgaccgcttttcgaaccgctgcagctctcttactccatcctcggccaattttctgaacaagatcggagcatggagccatatacagcgagaccggattcaaccttatcacgagatgcaagtttgggatggcgtctcagatgctcgcatcgaattcgactgggcacccggcgcagctcccaacggaaagacgattgcatacatgatcgagaacctaaatatgacctccggtctcctcaagcggatcgacgagttaaagggtatcacgacgtatgatggggcacgggtcgacaagattggcttgggagaagagacagaagagctcgatttcagagaatggcctatcgtccacctggccgacgggaaacagttagcagcacgcctgctggtcggcgccgacggagccaacagtcctgtacggacattcgctggaatcgatagcaaaggctgggactatgggcgtcacggagttgtggcgaccttggagctggaaggcagtggatgggcaggcgacgacatgaagatagcatatcaaaggttcctacccacgggacctatcgccatgctaccactaccggggaacagatctacacttgtgtggtctacggcacctgcaaatgccgcgcttctaaagagtctgtctgccaaagactttgttgctctcgtgaatgccgcattccgtcttacccccgtggatctacaatacatgcacaccatgccctcaggacacgaagacgaggtcgcatggagattacaaaacacgagcttcgatgctcaggccataccacagaccgtcattggggtacaagagggaaccatcgcttcgttccctttgaaaatgcgccacgcagatacatacatcggcgagcgcatcgccctcgtaggcgacgccgcacacacagtgcacccactcgcaggccaaggtctcaatcaaggacaaggtgacgtagagagtctagccaagacaatcgactacgctgtttcgcacggtcaagacattgggactcggatgtccttggaatcgtataactcggagagatatgcggcaaatcatgtacttctcggagtggtcgataagctgcacaagctgtatgccgttgagagtggaccgctcgtgcctttgagatcttggggtctcaatgctgtcaatgcgatggggcctctcaagacttttttcatgcagcaggcggctggcaatggctttaagctgttttga

SEQ ID NO: 9398 - protein, 493 aa, Muscodor strobelii
  misc_feature: SGI Peptide ID NO. 562935
  misc_feature (42)..(446): Pfam Id: PF01494 Pfam Desc: FAD binding domain
  misc_feature (44)..(80): Pfam Id: PF01266 Pfam Desc: FAD dependent oxidoreductase
  misc_feature (362)..(399): Pfam Id: PF01494 Pfam Desc: FAD binding domain
  misc_feature (44)..(77): Pfam Id: PF05834 Pfam Desc: Lycopene cyclase protein
  misc_feature (9)..(493): NCBI GI: 261356169 Blast Desc: ubiquinone biosynthesis monooxygenase COQ6 [Verticillium albo-atrum VaMs.102]
  misc_feature (12)..(493): NCBI GI: 85119586 Blast Desc: NCU02536 [Neurospora crassa OR74A] gi|28927479|gb|EAA36431.1| NCU02536 [Neurospora crassa OR74A]
  misc_feature (18)..(493): NCBI GI: 256735316 Blast Desc: [Nectria haematococca mpVI 77-13-4]
  misc_feature (11)..(493): NCBI GI: 171696338 Blast Desc: protein product [Podospora anserina] gi|170948411|emb|CAP60575.1| protein product [Podospora anserina]
  misc_feature (18)..(493): NCBI GI: 46105494 Blast Desc: FG00375.1 [Gibberella zeae PH-1]
  misc_feature (13)..(493): NCBI GI: 116180924 Blast Desc: CHGG_01090 [Chaetomium globosum CBS 148.51] gi|88185387|gb|EAQ92855.1| CHGG_01090 [Chaetomium globosum CBS 148.51]
  misc_feature (16)..(487): NCBI GI: 189211891 Blast Desc: ubiquinone biosynthesis monooxygenase COQ6 [Pyrenophora tritici-repentis Pt-1C-BFP] gi|187979472|gb|EDU46098.1| ubiquinone biosynthesis monooxygenase
  misc_feature (11)..(493): NCBI GI: 156045657 Blast Desc: SS1G_10019 [Sclerotinia sclerotiorum 1980] gi|154694412|gb|EDN94150.1| SS1G_10019 [Sclerotinia sclerotiorum 1980]
  misc_feature (11)..(493): NCBI GI: 154309519 Blast Desc: BC1G_07230 [Botryotinia fuckeliana B05.10] gi|150852253|gb|EDN27445.1| BC1G_07230 [Botryotinia fuckeliana B05.10]
  misc_feature (12)..(424): NCBI GI: 145605427 Blast Desc: MGG_11732 [Magnaporthe grisea 70-15] gi|145013255|gb|EDJ97896.1| MGG_11732 [Magnaporthe grisea 70-15]
  misc_feature: Useful for introducing or modulating the production of volatile compounds
MDLFVATGRQLRRSTPRICQSCNQKLRQQRARSYASTSQPDIYDVVCVGGGPAGLSLLAALKANPTTAGLRVALVEAQDLSKLRSWQSPRDRFSNRCSSLTPSSANFLNKIGAWSHIQRDRIQPYHEMQVWDGVSDARIEFDWAPGAAPNGKTIAYMIENLNMTSGLLKRIDELKGITTYDGARVDKIGLGEETEELDFREWPIVHLADGKQLAARLLVGADGANSPVRTFAGIDSKGWDYGRHGVVATLELEGSGWAGDDMKIAYQRFLPTGPIAMLPLPGNRSTLVWSTAPANAALLKSLSAKDFVALVNAAFRLTPVDLQYMHTMPSGHEDEVAWRLQNTSFDAQAIPQTVIGVQEGTIASFPLKMRHADTYIGERIALVGDAAHTVHPLAGQGLNQGQGDVESLAKTIDYAVSHGQDIGTRMSLESYNSERYAANHVLLGVVDKLHKLYAVESGPLVPLRSWGLNAVNAMGPLKTFFMQQAAGNGFKLF

SEQ ID NO: 9399 - DNA, 1737 bp, Muscodor strobelii
  misc_feature: SGI EST ID NO. CUFF.22327.1
  misc_feature: Variant of the nucleotide sequence at SEQ ID NO 9397
ctcagattgggccttggcgccgacggcagcgaagaacatggtgtttccggcgtctgcaagcgccaatctcttctcaaacaaaataggatggatctgttcgtagccactgggcggcaactccgacgatctacgccgaggatatgtcagagttgcaaccagaagctcagacagcagcgagctcggtcgtacgcgagcacatcacagccagacatctatgatgtcgtctgcgtagggggcggacctgcgggactgagcctcctggctgcgctgaaggcgaatccaaccacggccggtctccgcgtagcgcttgtcgaagcgcaagatcttagcaaactgcgatcctggcaatcccctcgcgaccgcttttcgaaccgctgcagctctcttactccatcctcggccaattttctgaacaagatcggagcatggagccatatacagcgagaccggattcaaccttatcacgagatgcaagtttgggatggcgtctcagatgctcgcatcgaattcgactgggcacccggcgcagctcccaacggaaagacgattgcatacatgatcgagaacctaaatatgacctccggtctcctcaagcggatcgacgagttaaagggtatcacgacgtatgatggggcacgggtcgacaagattggcttgggagaagagacagaagagctcgatttcagagaatggcctatcgtccacctggccgacgggaaacagttagcagcacgcctgctggtcggcgccgacggagccaacagtcctgtacggacattcgctggaatcgatagcaaaggctgggactatgggcgtcacggagttgtggcgaccttggagctggaaggcagtggatgggcaggcgacgacatgaagatagcatatcaaaggttcctacccacgggacctatcgccatgctaccactaccggggaacagatctacacttgtgtggtctacggcacctgcaaatgccgcgcttctaaagagtctgtctgccaaagactttgttgctctcgtgaatgccgcattccgtcttacccccgtggatctacaatacatgcacaccatgccctcaggacacgaagacgaggtcgcatggagattacaaaacacgagcttcgatgctcaggccataccacagaccgtcattggggtacaagagggaaccatcgcttcgttccctttgaaaatgcgccacgcagatacatacatcggcgagcgcatcgccctcgtaggcgacgccgcacacacagtgcacccactcgcaggccaaggtctcaatcaaggacaaggtgacgtagagagtctagccaagacaatcgactacgctgtttcgcacggtcaagacattgggactcggatgtccttggaatcgtataactcggagagatatgcggcaaatcatgtacttctcggagtggtcgataagctgcacaagctgtatgccgttgagagtggaccgctcgtgcctttgagatcttggggtctcaatgctgtcaatgcgatggggcctctcaagacttttttcatgcagcaggcggctggcaatggctttaagctgttttgaggcggagagcaagatgtccgatatgtacatgtatagtagatgtagattattacgtaccttacgtatacacccttagattgtacagaaagtacatgactctcagatgagcttaagagattagctcctgatctcacagcaacagtgactcggtaagagagccatatcaac

SEQ ID NO: 9400 - DNA, 1191 bp, Muscodor strobelii
  misc_feature: SGI cDNA ID NO. 562936
  misc_feature: Reduced expression when VOC is produced
  misc_feature: Encodes the peptide sequence at SEQ ID NO 9401
atgctccctcgactgcgacagcatcgcaacaaccctcacaccatggcgccttcctctggacgacgggccccgacggccgaagagatcgatgcccgcaagatcgttggtattaataaagagaccgtcacaaacatcgtctctgacgagtaccccgagaactttgccaacgaagagcatgcctgggataaggaggagtttcgtcgcggcttcaaggtccagtggcaccagaacgaccagttcgaagcccaattctccctcatcggcgtcgacgcctccatcgccaacgccttccgccgcattctcatcgccgagatccccacccttgccatcgagaccgtcttcgtcttcaacaacacatccgtcatccaagacgaagtcctcgcccacagacttggcctcatacccttcaccgggaacaaggagggcatccgcgacttcctcggcttctggaagaagcctgagcccggtgaggatccgtatgttaactccttcgactccaacaccgtccagctcaaactgaacgccacatgcacacacaacaaggacgctgccaaggacgccttcaagccggaagacctgtaccatggttcgagcgtctacgcgcgggacttagagttcattccccagggagaccaggagaaatacttctccggccccgagaacgtcatccgtcccgtcaatccagatattctgatcgccaagctgcggccaggccaagttatcgacatcgagatgcacatgcacaagggcttcggctacgaccacgccaagtactcgccggtcgccaccgcaagctaccgcctgcttcccacaatcaagatactatcgcccatcttaggagacgatgcgcgcaaattccagaactgcttcatgcccggtgtcatcgagctggagaaagtcacgcgcaaagaggccagcactcagggcagtgggtatgagggctcggaaggagaggtcaaagctgtcgtcaaggaccccatgcgcgacaccgtcagccgagaggtgctgaggcatcctgagttcgatggcaaggtgaaactcggtcgacggaaggatcacttcatcttctctatcgagagtacgggacagtgggacagtgatgagttgttcatggaggctgtcaagacactgaagaagaagtgtcaggtcctgaggccgcaggtcaccggtatggtatatacccatgtctag

SEQ ID NO: 9401 - protein, 396 aa, Muscodor strobelii
  misc_feature: SGI Peptide ID NO. 562936
  misc_feature (113)..(259): Pfam Id: PF01000 Pfam Desc: RNA polymerase Rpb3/RpoA insert domain
  misc_feature (80)..(386): Pfam Id: PF01193 Pfam Desc: RNA polymerase Rpb3/Rpb11 dimerisation domain
  misc_feature (22)..(392): NCBI GI: 116180930 Blast Desc: CHGG_01093 [Chaetomium globosum CBS 148.51] gi|88185390|gb|EAQ92858.1| CHGG_01093 [Chaetomium globosum CBS 148.51]
  misc_feature (15)..(392): NCBI GI: 46105474 Blast Desc: FG00365.1 [Gibberella zeae PH-1]
  misc_feature (22)..(392): NCBI GI: 171696332 Blast Desc: protein product [Podospora anserina] gi|170948408|emb|CAP60572.1| protein product [Podospora anserina]
  misc_feature (22)..(392): NCBI GI: 85119573 Blast Desc: DNA-directed RNA polymerases I and III 40 kDa polypeptide [Neurospora crassa OR74A] gi|28927476|gb|EAA36428.1| DNA-directed RNA polymerases I and III 40 kDa polypeptide crassa
  misc_feature (22)..(392): NCBI GI: 156061627 Blast Desc: SS1G_02959 [Sclerotinia sclerotiorum 1980] gi|154700360|gb|EDO00099.1| SS1G_02959 [Sclerotinia sclerotiorum 1980]
  misc_feature (25)..(392): NCBI GI: 39958750 Blast Desc: MGG_09284 [Magnaporthe grisea 70-15] gi|145013258|gb|EDJ97899.1| MGG_09284 [Magnaporthe grisea 70-15]
  misc_feature (24)..(392): NCBI GI: 261356163 Blast Desc: DNA-directed RNA polymerases I and III subunit RPAC1 [Verticillium albo-atrum VaMs.102]
  misc_feature (1)..(392): NCBI GI: 154319504 Blast Desc: BC1G_02233 [Botryotinia fuckeliana B05.10] gi|150855891|gb|EDN31083.1| BC1G_02233 [Botryotinia fuckeliana B05.10]
  misc_feature (15)..(394): NCBI GI: 226279119 Blast Desc: DNA-directed RNA polymerases I and III subunit RPAC1 [Paracoccidioides brasiliensis Pb01]
  misc_feature (15)..(394): NCBI GI: 226287322 Blast Desc: DNA-directed RNA polymerases I and III subunit RPAC1 [Paracoccidioides brasiliensis Pb18]
  misc_feature (88)..(392): SWISSPROT Homolog: EC 2.7.7.6 DNA-directed RNA polymerase
  misc_feature: Useful for introducing or modulating the production of volatile compounds
MLPRLRQHRNNPHTMAPSSGRRAPTAEEIDARKIVGINKETVTNIVSDEYPENFANEEHAWDKEEFRRGFKVQWHQNDQFEAQFSLIGVDASIANAFRRILIAEIPTLAIETVFVFNNTSVIQDEVLAHRLGLIPFTGNKEGIRDFLGFWKKPEPGEDPYVNSFDSNTVQLKLNATCTHNKDAAKDAFKPEDLYHGSSVYARDLEFIPQGDQEKYFSGPENVIRPVNPDILIAKLRPGQVIDIEMHMHKGFGYDHAKYSPVATASYRLLPTIKILSPILGDDARKFQNCFMPGVIELEKVTRKEASTQGSGYEGSEGEVKAVVKDPMRDTVSREVLRHPEFDGKVKLGRRKDHFIFSIESTGQWDSDELFMEAVKTLKKKCQVLRPQVTGMVYTHV

SEQ ID NO: 9402 - DNA, 1665 bp, Muscodor strobelii
  misc_feature: SGI EST ID NO. CUFF.22284.0
  misc_feature: Variant of the nucleotide sequence at SEQ ID NO 9400
cctcgactgcgacagcatcgcaacaaccctcacaccatggcgccttcctctggacgacgggccccgacggccgaagagatcgatgcccgcaagatcgttggtattaataaagagaccgtcacaaacatcgtctctgacgagtaccccgagaactttgccaacgaagagcatgcctgggataaggaggagtttcgtcgcggcttcaaggtccagtggcaccagaacgaccagttcgaagcccaattctccctcatcggcgtcgacgcctccatcgccaacgccttccgccgcattctcatcgccgagatccccacccttgccatcgagaccgtcttcgtcttcaacaacacatccgtcatccaagacgaagtcctcgcccacagacttggcctcatacccttcaccgggaacaaggagggcatccgcgacttcctcggcttctggaagaagcctgagcccggtgaggatccgtatgttaactccttcgactccaacaccgtccagctcaaactgaacgccacatgcacacacaacaaggacgctgccaaggacgccttcaagccggaagacctgtaccatggttcgagcgtctacgcgcgggacttagagttcattccccagggagaccaggagaaatacttctccggccccgagaacgtcatccgtcccgtcaatccagatattctgatcgccaagctgcggccaggccaagttatcgacatcgagatgcacatgcacaagggcttcggctacgaccacgccaagtactcgccggtcgccaccgcaagctaccgcctgcttcccacaatcaagatactatcgcccatcttaggagacgatgcgcgcaaattccagaactgcttcatgcccggtgtcatcgagctggagaaagtcacgcgcaaagaggccagcactcagggcagtgggtatgagggctcggaaggagaggtcaaagctgtcgtcaaggaccccatgcgcgacaccgtcagccgagaggtgctgaggcatcctgagttcgatggcaaggtgaaactcggtcgacggaaggatcacttcatcttctctatcgagagtacgggacagtgggacagtgatgagttgttcatggaggctgtcaagacactgaagaagaagtgtcaggtcctgaggccgcaggtcaccggtatggtatatacccatgtctagacgtcgcgcatcagcgacagcatcagcagagtatgaggaagagcgcgagcatgtgggcattgtcttcagtttggtttttctgcatgtgcggacggagttcggctgcagtgtaaatatggctggcgttcatctggaaaaaagggatcttgtttgctcttccgacactataatcatgccacacttctggccgttgttcaaggtgcctagctgggaaatgtcagtgattgtatcaaattcgatgtgaatctcaagcactactagcacacgaaagatccatcttcacagcaaaagtaacaaagagataatgctagaggcatctaccaaagactacaagaccattgtttgttctctctgccatttaagaggcccgccatcctactacccccgtccagctgcggcctgcatgccattagtggtagcattgatcttcttcacacaaaggcattgttcataaagacaatagaaatcgttcaaacccct

SEQ ID NO: 9403 - DNA, 582 bp, Muscodor strobelii
  misc_feature: SGI cDNA ID NO. 562937
  misc_feature: Encodes the peptide sequence at SEQ ID NO 9404
atgacatccactctaacgtccaaaaaggcttacagagcaatcgtccgctcccaagaaggttgtttcgtagtatgcacctttgcaagactcaagcgcttcgaacccggaatggactttaagctgtacccagtgcaccgtccgaagatttgcaagtgcaggctagcttccaacccagaaaaatacgaggaaaatgaggaaatactgaatgttcacgtttctaaactctgggtgccgggggtacgtgaactgtccgatatacttgagactttggggaggttgagtattgggcttcctgttagccctgaacttgatcttgcctgggatgaggagaaaaaatgctgggtgaagagccttgaggaaatttgggaggagaagatggatagtgacgacttgtggggcgagatactgccggagttactaccggagattctacgggagaatctagggattggtggtgacgagagtggtgagaacgaaacggttgtgtctgagacaagtgaggccacgtcatccatgccgcaggacaagagtgagaagcgtgcgagagaggctgctgatccgagctggcattgggatctttga

SEQ ID NO: 9404 - protein, 193 aa, Muscodor strobelii
  misc_feature: SGI Peptide ID NO. 562937
MTSTLTSKKAYRAIVRSQEGCFVVCTFARLKRFEPGMDFKLYPVHRPKICKCRLASNPEKYEENEEILNVHVSKLWVPGVRELSDILETLGRLSIGLPVSPELDLAWDEEKKCWVKSLEEIWEEKMDSDDLWGEILPELLPEILRENLGIGGDESGENETVVSETSEATSSMPQDKSEKRAREAADPSWHWDL

SEQ ID NO: 9405 - DNA, 286 bp, Muscodor strobelii
  misc_feature: SGI EST ID NO. CUFF.22290.0
  misc_feature: Variant of the nucleotide sequence at SEQ ID NO 9403
aaaaaatgctgggtgaagagccttgaggaaatttgggaggagaagatggatagtgacgacttgtggggcgagatactgccggagttactaccggagattctacgggagaatctagggattggtggtgacgagagtggtgagaacgaaacggttgtgtctgagacaagtgaggccacgtcatccatgccgcaggacaagagtgagaagcgtgcgagagaggctgctgatccgagctggcattgggatctttgagttccggtaattcctctgtgttgatattaagcga

SEQ ID NO: 9406 - DNA, 990 bp, Muscodor strobelii
  misc_feature: SGI cDNA ID NO. 562938
  misc_feature: Elevated expression when VOC is produced
  misc_feature: Encodes the peptide sequence at SEQ ID NO 9407
atggcgaatattcagagcctgcccgatgaactgcagctcgccacagctcagcacgtcaaatacatccagagtctagacacgagaaaggacgaatatgattattggctgacagaacatctacgtctaaacggactttattggggacttaccgcattgcaccttctgcgccaccctgacgcccttccacgagacgaagccatcgacttcgtcttgtcatgccagcatgaaagcggaggttttggggctgctccgcggcatgatgctcacatgctctacaccgtcagcgccgtgcagatccttgctctgctagatgcatttgatgaactcgagaagcgcggatcaggcaaggaaaaggtggcgactttcatggcaaatcttcaaaatcaagagactggctccttcgccggtgatgaatggggtgaagaagatactcgcttcctatacggcgcattcaacgcactgtctctcctcgatatgctacatctcgtagatgtcgacaaggcggtgaatcatgttgcctcttgcgcaaatttcgacgggggctatggtgtcaatccgggcgatgaatcgcactcgggtcagatttttacgtgcgtagctgcgctcacgattgccaaacgacaagacttaataaacaaggacaagctcgccggttggttaagcgaacgtcagcttcccaacggcggtctcaatggccgaccagagaaacaggaggatgtatgctatagttggtgggtactcagtagtctctcaatgatcgaccgcacacactggatcgatcgagacaaactcatcgccttcatccttcgttgccaagataccgagaatggtggtatctcggacagaccaaataacatggtcgatgtctggcacaccctctttgggctgactggtttaagtcttttgggttatcccggcttggatactattgatccagtctattgtttgccaaaatcgacaacggatcgtgtactcaacaaatctaaatag

SEQ ID NO: 9407 - protein, 329 aa, Muscodor strobelii
  misc_feature: SGI Peptide ID NO. 562938
  misc_feature (259)..(303): Pfam Id: PF00432 Pfam Desc: Prenyltransferase and squalene oxidase repeat
  misc_feature (211)..(254): Pfam Id: PF00432 Pfam Desc: Prenyltransferase and squalene oxidase repeat
  misc_feature (61)..(104): Pfam Id: PF00432 Pfam Desc: Prenyltransferase and squalene oxidase repeat
  misc_feature (163)..(206): Pfam Id: PF00432 Pfam Desc: Prenyltransferase and squalene oxidase repeat
  misc_feature (114)..(158): Pfam Id: PF00432 Pfam Desc: Prenyltransferase and squalene oxidase repeat
  misc_feature (4)..(326): NCBI GI: 171695928 Blast Desc: protein product [Podospora anserina] gi|170948206|emb|CAP60370.1| protein product [Podospora anserina]
  misc_feature (3)..(326): NCBI GI: 116180888 Blast Desc: conserved [Chaetomium globosum CBS 148.51] gi|88185369|gb|EAQ92837.1| conserved [Chaetomium globosum CBS 148.51]
  misc_feature (3)..(327): NCBI GI: 85116427 Blast Desc: geranylgeranyltransferase beta subunit [Neurospora crassa OR74A] gi|28926857|gb|EAA35820.1| geranylgeranyltransferase beta subunit [Neurospora crassa OR74A]
  misc_feature (6)..(328): NCBI GI: 39958997 Blast Desc: MGG_09304 [Magnaporthe grisea 70-15] gi|145013236|gb|EDJ97877.1| MGG_09304 [Magnaporthe grisea 70-15]
  misc_feature (2)..(327): NCBI GI: 261356153 Blast Desc: type-2 proteins geranylgeranyltransferase subunit beta [Verticillium albo-atrum VaMs.102]
  misc_feature (12)..(327): NCBI GI: 119177123 Blast Desc: CIMG_07542 [Coccidioides immitis RS]
  misc_feature (12)..(327): NCBI GI: 240107763 Blast Desc: Type II protein geranylgeranyltransferase beta subunit, [Coccidioides posadasii C735 delta SOWgp]
  misc_feature (6)..(313): NCBI GI: 156061529 Blast Desc: SS1G_02909 [Sclerotinia sclerotiorum 1980] gi|154700311|gb|EDO00050.1| SS1G_02909 [Sclerotinia sclerotiorum 1980]
  misc_feature (2)..(327): NCBI GI: 145247989 Blast Desc: An13g01040 [Aspergillus niger] gi|134080990|emb|CAK41504.1| protein product [Aspergillus niger]
  misc_feature (13)..(327): NCBI GI: 169765548 Blast Desc: [Aspergillus oryzae RIB40] gi|83765100|dbj|BAE55243.1| protein product [Aspergillus oryzae]
  misc_feature (11)..(323): SWISSPROT Homolog: EC 2.5.1.60 Protein geranylgeranyltransferase type II
  misc_feature: Useful for introducing or modulating the production of volatile compounds
MANIQSLPDELQLATAQHVKYIQSLDTRKDEYDYWLTEHLRLNGLYWGLTALHLLRHPDALPRDEAIDFVLSCQHESGGFGAAPRHDAHMLYTVSAVQILALLDAFDELEKRGSGKEKVATFMANLQNQETGSFAGDEWGEEDTRFLYGAFNALSLLDMLHLVDVDKAVNHVASCANFDGGYGVNPGDESHSGQIFTCVAALTIAKRQDLINKDKLAGWLSERQLPNGGLNGRPEKQEDVCYSWWVLSSLSMIDRTHWIDRDKLIAFILRCQDTENGGISDRPNNMVDVWHTLFGLTGLSLLGYPGLDTIDPVYCLPKSTTDRVLNKSK

SEQ ID NO: 9408 - DNA, 1502 bp, Muscodor strobelii
  misc_feature: SGI EST ID NO. CUFF.22306.0
  misc_feature: Variant of the nucleotide sequence at SEQ ID NO 9406
ccgcggggttgatgctctcaacagtgagatgcattgtcatcaaatcgatgaaggcaggcagccattgaccatttgcttaaggaaaatcttcacagtaaaattgattccatcgatacttgagacttagggacttgccattgttcataccaagatccctctgccttgtgaagctgtatcaagtctagacaaccccaaggcgctctctttgcaggaatgacaccctccttgaagtagctcaacacgaatttcactatcagaagactatataccttgccaagcatcaatagtcatggcgaatattcagagcctgcccgatgaactgcagctcgccacagctcagcacgtcaaatacatccagagtctagacacgagaaaggacgaatatgattattggctgacagaacatctacgtctaaacggactttattggggacttaccgcattgcaccttctgcgccaccctgacgcccttccacgagacgaagccatcgacttcgtcttgtcatgccagcatgaaagcggaggttttggggctgctccgcggcatgatgctcacatgctctacaccgtcagcgccgtgcagatccttgctctgctagatgcatttgatgaactcgagaagcgcggatcaggcaaggaaaaggtggcgactttcatggcaaatcttcaaaatcaagagactggctccttcgccggtgatgaatggggtgaagaagatactcgcttcctatacggcgcattcaacgcactgtctctcctcgatatgctacatctcgtagatgtcgacaaggcggtgaatcatgttgcctcttgcgcaaatttcgacgggggctatggtgtcaatccgggcgatgaatcgcactcgggtcagatttttacgtgcgtagctgcgctcacgattgccaaacgacaagacttaataaacaaggacaagctcgccggttggttaagcgaacgtcagcttcccaacggcggtctcaatggccgaccagagaaacaggaggatgtatgctatagttggtgggtactcagtagtctctcaatgatcgaccgcacacactggatcgatcgagacaaactcatcgccttcatccttcgttgccaagataccgagaatggtggtatctcggacagaccaaataacatggtcgatgtctggcacaccctctttgggctgactggtttaagtcttttgggttatcccggcttggatactattgatccagtctattgtttgccaaaatcgacaacggatcgtgtactcaacaaatctaaatagcgacaaataataatgatacaccacattatcttgatgcccttcgtgatagcaagtacggcatagcagcttgaagctcaggacagctaccatagactgagcagcgtgcatgaaccggatatcgtaatcacgaggttaatctgtattcatctcttcgctagtgtcttcatagccattttcgctttataatttcaaacaattctagatctcaaccacaatctcgtcc

SEQ ID NO: 9409 - DNA, 2142 bp, Muscodor strobelii
  misc_feature: SGI cDNA ID NO. 562939
  misc_feature: Reduced expression when VOC is produced
  misc_feature: Encodes the peptide sequence at SEQ ID NO 9410
atgggacgcaggtccgccccccagccgctggccctcgacgacaaactgccgtctgcaggcactgactccagaggcccgccttcatccactgctgccacacttagctcgcccgactccattgccccgggagcatcagacgctcgaagcccgcgctcagcacgctcgccagcattcgccaacgaccacgccctccaggtcatttcgcccgtcacctccaacaagtccgagcgctccccacgctcgccattcagcaagttcaacccagcccggcgaccacagacccagcagggcgagccccgccaggagcctctcgagacacacgacaagctgccgctgcgctctgccgacgacgcacagctcgcccagcagacgagccagtaccccaaccaagctgtgcgacacccgccgcccgcgcccttcctcaagcaatccgcgacgtcgcctgctcttccatacccaagcaacgggcgaaccgacgaagaaaagcacgcgagaagcggcagcaggttcctgttcttcggcaagggctcaaagcaactccagcacaaccacgatcgcagcgctagcagcagcgaggctatgacacgaggcgctgatggcccgcctgtgggcgagagcgttgtgcacaacgcctcgaagcaacctgaacagtcgtcccctgatgcctcgattagcgaaccgccagcggctctgttgccaaccggctcagacgtatcgctgccatctacggccgagaccgatacatccaagaagaataaacccaatgcgttcatgggacgccgtaataaactaacaaaagaggatcagtccccgagagagcccatgacgatcaagatgcccgagccagaccgtttacatgcctccaatggaccggctcctttgaagacggccccaatccacgctgatgcgcgtgaaaggtccttcagacataagatggattcatctttgagaaaccaatcggcagatcgggctgtccgagacccctcgtcgaacaaagaatatcgcagcgataaagagaacaggagccacccatcttccatcaaagacggcggaggttccaacttctttagtggcctcaaatcctcaggcagacaggcggcagacatgatcagtaaaggcattttcggaaaaggcggccgtagcgctagcacgaacgagagggaatcggcggttgatgatgaacactatgtgctgaaaaccttgaatttgcctctcgacgaacagacacgaaagacgagaatttccaagagattggaagaatcacgagataagacggaattctggatgcctgcgttcccatggagggctatcgactacctcaacttcaacggtatagactcggaagggctctaccgtgtcccaggcagtggcccacagatcaagaaatggcaacggagatttgacgaagaacacgacatcgatctcttcgtccaagatgatctttatgacatcaatattattggatccatgctgaaagcatggttacgtgaactgcccgacgagctttttccaaaggaagcgcaagaagagatctcgaagtcgtgcaccggctcagaggaaacgccccctccgctgttgattaaaaagttatcccaactcccaccgtacaaatattatctcctcttcgccatcacgtgtcatcttagtcttttgttagctcactccgacaagaacaagatggatttccgaaatctgtgtatttgttttcagccttgcatgaagatagacgccttctgtttcaagttccttgtttgcgactggcggttgtgttggcagggctgcaagaatgaggggatgtacattaggcaagagtatgagcttttccagcaacctttgcccaaaggtctcaacgcagactatggggacgacaaacgcgaagagcgggccgcgtcatcgtccgaagggagtaaggagcgcgcatacaaacaggaggaacatgaggacggcgcccgcgacaagattgtggtgtcgaaaagatcgaatggtaacctgaaacctcagtactcaacaccgcccaacatcaccgtattgcctgatcgagataggcccgagagacctgagagacccgatgagacgccgccacaacggacacaactgcgacctctgtcacccatcaagcctctatcaccacttggattttga

SEQ ID NO: 9410 - protein, 713 aa, Muscodor strobelii
  misc_feature: SGI Peptide ID NO. 562939
  misc_feature (430)..(579): Pfam Id: PF00620 Pfam Desc: RhoGAP domain
  misc_feature (430)..(573): Pfam Id: PF00620 Pfam Desc: RhoGAP domain
  misc_feature (1)..(713): NCBI GI: 145605413 Blast Desc: MGG_09303 [Magnaporthe grisea 70-15] gi|145013237|gb|EDJ97878.1| MGG_09303 [Magnaporthe grisea 70-15]
  misc_feature (191)..(713): NCBI GI: 256733079 Blast Desc: NECHADRAFT_92688 [Nectria haematococca mpVI 77-13-4]
  misc_feature (149)..(713): NCBI GI: 46125461 Blast Desc: FG07108.1 [Gibberella zeae PH-1]
  misc_feature (111)..(613): NCBI GI: 171695930 Blast Desc: protein product [Podospora anserina] gi|170948207|emb|CAP60371.1| protein product [Podospora anserina]
  misc_feature (1)..(713): NCBI GI: 116180890 Blast Desc: CHGG_01073 [Chaetomium globosum CBS 148.51] gi|88185370|gb|EAQ92838.1| CHGG_01073 [Chaetomium globosum CBS 148.51]
  misc_feature (312)..(713): NCBI GI: 261356156 Blast Desc: conserved [Verticillium albo-atrum VaMs.102]
  misc_feature (194)..(615): NCBI GI: 156036164 Blast Desc: SS1G_12768 [Sclerotinia sclerotiorum 1980] gi|154698176|gb|EDN97914.1| SS1G_12768 [Sclerotinia sclerotiorum 1980]
  misc_feature (337)..(614): NCBI GI: 164422659 Blast Desc: NCU10647 [Neurospora crassa OR74A] gi|157069766|gb|EDO64891.1| conserved [Neurospora crassa OR74A]
  misc_feature (151)..(674): NCBI GI: 119177129 Blast Desc: CIMG_07545 [Coccidioides immitis RS]
  misc_feature (292)..(674): NCBI GI: 240107762 Blast Desc: RhoGAP domain containing protein [Coccidioides posadasii C735 delta SOWgp]
  misc_feature: Useful for introducing or modulating the production of volatile compounds
MGRRSAPQPLALDDKLPSAGTDSRGPPSSTAATLSSPDSIAPGASDARSPRSARSPAFANDHALQVISPVTSNKSERSPRSPFSKFNPARRPQTQQGEPRQEPLETHDKLPLRSADDAQLAQQTSQYPNQAVRHPPPAPFLKQSATSPALPYPSNGRTDEEKHARSGSRFLFFGKGSKQLQHNHDRSASSSEAMTRGADGPPVGESVVHNASKQPEQSSPDASISEPPAALLPTGSDVSLPSTAETDTSKKNKPNAFMGRRNKLTKEDQSPREPMTIKMPEPDRLHASNGPAPLKTAPIHADARERSFRHKMDSSLRNQSADRAVRDPSSNKEYRSDKENRSHPSSIKDGGGSNFFSGLKSSGRQAADMISKGIFGKGGRSASTNERESAVDDEHYVLKTLNLPLDEQTRKTRISKRLEESRDKTEFWMPAFPWRAIDYLNFNGIDSEGLYRVPGSGPQIKKWQRRFDEEHDIDLFVQDDLYDINIIGSMLKAWLRELPDELFPKEAQEEISKSCTGSEETPPPLLIKKLSQLPPYKYYLLFAITCHLSLLLAHSDKNKMDFRNLCICFQPCMKIDAFCFKFLVCDWRLCWQGCKNEGMYIRQEYELFQQPLPKGLNADYGDDKREERAASSSEGSKERAYKQEEHEDGARDKIVVSKRSNGNLKPQYSTPPNITVLPDRDRPERPERPDETPPQRTQLRPLSPIKPLSPLGF

SEQ ID NO: 9411 - DNA, 4787 bp, Muscodor strobelii
  misc_feature: SGI EST ID NO. CUFF.22545.0
  misc_feature: Variant of the nucleotide sequence at SEQ ID NO 9409
cacatacattgttgttgctactgctgcagcaagcgctttctccttctaatacccacgcgtctgtgtgcgtgtacaggacacagcttaggcccaggcgcttgtggtgcttgaggtgacccgtgactctggatgtacatgtaccctgaggtagtagatgatcctgatatttgacggacgacttcgatattggttctaccttatttccaaattccattgcctgcgagactggcctgggttatttccgttgccatctattgcgtgtacgaccacatcctctaatctccaacccggccctctatcctcggcgccccgactgcagctcgaatgccagacggtggactgccacacccgggaatcaggatccaggtacatgcagagtccaacatccagacatcctgatacagcattccactgccgcacgagacaagcgctctcctggctcgccctccctcagcgcgcgcccgtcaccagagaattgcccgatgcggcctgcttgcctgcccgtcactagcaccccgtcactgctggcattgggtacgccactgcgcatgcaataatgggacgcaggtccgccccccagccgctggccctcgacgacaaactgccgtctgcaggcactgactccagaggcccgccttcatccactgctgccacacttagctcgcccgactccattgccccgggagcatcagacgctcgaagcccgcgctcagcacgctcgccagcattcgccaacgaccacgccctccaggtcatttcgcccgtcacctccaacaagtccgagcgctccccacgctcgccattcagcaagttcaacccagcccggcgaccacagacccagcagggcgagccccgccaggagcctctcgagacacacgacaagctgccgctgcgctctgccgacgacgcacagctcgcccagcagacgagccagtaccccaaccaagctgtgcgacacccgccgcccgcgcccttcctcaagcaatccgcgacgtcgcctgctcttccatacccaagcaacgggcgaaccgacgaagaaaagcacgcgagaagcggcagcaggttcctgttcttcggcaagggctcaaagcaactccagcacaaccacgatcgcagcgctagcagcagcgaggctatgacacgaggcgctgatggcccgcctgtgggcgagagcgttgtgcacaacgcctcgaagcaacctgaacagtcgtcccctgatgcctcgattagcgaaccgccagcggctctgttgccaaccggctcagacgtatcgctgccatctacggccgagaccgatacatccaagaagaataaacccaatgcgttcatgggacgccgtaataaactaacaaaagaggatcagtccccgagagagcccatgacgatcaagatgcccgagccagaccgtttacatgcctccaatggaccggctcctttgaagacggccccaatccacgctgatgcgcgtgaaaggtccttcagacataagatggattcatctttgagaaaccaatcggcagatcgggctgtccgagacccctcgtcgaacaaagaatatcgcagcgataaagagaacaggagccacccatcttccatcaaagacggcggaggttccaacttctttagtggcctcaaatcctcaggcagacaggcggcagacatgatcagtaaaggcattttcggaaaaggcggccgtagcgctagcacgaacgagagggaatcggcggttgatgatgaacactatgtgctgaaaaccttgaatttgcctctcgacgaacagacacgaaagacgagaatttccaagagattggaagaatcacgagataagacggaattctggatgcctgcgttcccatggagggctatcgactacctcaacttcaacggtatagactcggaagggctctaccgtgtcccaggcagtggcccacagatcaagaaatggcaacggagatttgacgaagaacacgacatcgatctcttcgtccaagatgatctttatgacatcaatattattggatccatgctgaaagcatggttacgtgaactgcccgacgagctttttccaaaggaagcgcaagaagagatctcgaagtcgtgcaccggctcagaggaaacgccccctccgctgttgattaaaaagttatcccaactcccaccgtacaaatattatctcctcttcgccatcacgtgtcatcttagtcttttgttagctcactccgacaagaacaagatggatttccgaaatctgtgtatttgttttcagccttgcatgaagatagacgccttctgtttcaagttccttgtttgcgactggcggttgtgttggcagggctgcaagaatgaggggatgtacattaggcaagagtatgagcttttccagcaacctttgcccaaaggtctcaacgcagactatggggacgacaaacgcgaagagcgggccgcgtcatcgtccgaagggagtaaggagcgcgcatacaaacaggaggaacatgaggacggcgcccgcgacaagattgtggtgtcgaaaagatcgaatggtaacctgaaacctcagtactcaacaccgcccaacatcaccgtattgcctgatcgagataggcccgagagacctgagagacccgatgagacgccgccacaacggacacaactgcgacctctgtcacccatcaagcctctatcaccacttggattttgatttgagttatgaacgtcattcattggcaggtattagccgagccccgaccgcattccacactcctacatttcgaggttggttcaatcaattcaaggtgcatggtgtcgacttgatcaaaagactgatccagggttgccgatgctgccttgaagctcgacacctattgcaaagagcgtgcaacctgctacctctacgacacttatcgaccggggataaagcagattattactcaatggtgtgcgttgcttcgccgatttgcgaaacttggttgaggcatggttttgcatgtgtacactttcatcataagattgcgaaatggactctggataagcgcaacctggcttgaacttcgagcttgacggctccttttgcggatttcgatactttcattggcccagtaacgttctgttcccattatctggtataccccttcgaatttgcagtggttttcacgacgtgttggtggaactagcgatggcgatggcgatggaacgctcaccagaagaagaaagagaagcaaagaggcttctgggggagtatttgagtatggaacattggagacagttgtttgcttggatggttgccttcatcacatttacgccggtgctaacagatggcatggttttcagtggcactgtttgaatataaagaatccgtgctcagtggttgggtaagacgggaaaggcaggaaagaagcagcattttcgcgaggcgtaatgaccaggaggcgagcagagtacaccgtatgacgacgtaatgtaacgctatggcgataccacagacggcttcgaggttagcgatggagttggagcatctactgcgtaggagggtggaggtcccgcttgtgcttatatcatatcatcatgaagggtcttgcagagggcatgtgaaggcccatttcgaaactcggttggcattggcgatcataagcagagattatagatggcatgcagactgcaccgttgaaaccgagagatgtcgttagctgtgcccaagtgctatgattttttgttttgacttcatttctggattgatggatatatcattttcatagagcgtgcaatcgagacgcactgcgcaagacaaatcgatgtctctgatactcgtaaggcatcgtcgtccgtgactctactagtgaatgatcagcgccattcccgacaactcgctgaactgacgacgaaccgagcataagctatgcctggccatcatcttgcctcgtctcttttccttcccaccaaaacaccatccgactagaagtcaccaatcacgccggccgtgacacccctcatttcctcctacccttccccctaacagccttccgtctagcctctttctcctcgcgctccttcttctcatcgacctcgaccaaccaatcctgctgcaccataccccttctccttgcgctcgatccgtccgtctttgttgtagccccaggtcttctcccactggcccgtctcctcgttgtacttctgcgacttcatgcggcgctgctctcgtgtcttgggcttgataccgcgtttcgcggcgaattgctcccatttcgtgggctgcttggcttcgggcagaggcttctcgcgcgggaggggtgtggtggggtgcgggagggtgaggaggacgcctgagggtgtggatgttatggggcaggttgttaggagttgatctagaggggtagttgttaggttcaagtgtatgggggtagtgggtgggtgggagatgtacttattaagctctgggcgccgtcccgggctgtggcgatgagctgggcttctaaggggctgacgccgatggatgtggagggcgtgtcggcgggtgtggaggatgagagggggttggcgtcgttggcgaggaggagaccgaggtcgaatgtgtagggtgttggcttgttgactgctacttcgagctttgtctttccgctcgatgggagagacattgtgattgttggtcgccgacgcgggcgcggtggaaagatgctacgataagacgatgtcgatatgacagtgtgtttggaggcgatcgatgtgttcgggtgttgtgtgaaagggtttttgtcgtaatgcgctgtggtttagattggctatgatggtagttg

SEQ ID NO: 9412 - DNA, 519 bp, Muscodor strobelii
  misc_feature: SGI cDNA ID NO. 562940
  misc_feature: Reduced expression when VOC is produced
  misc_feature: Encodes the peptide sequence at SEQ ID NO 9413
atgtctctcccatcgagcggaaagacaaagctcgaagtagcagtcaacaagccaacaccctacacattcgacctcggtctcctcctcgccaacgacgccaaccccctctcatcctccacacccgccgacacgccctccacatccatcggcgtcagccccttagaagcccagctcatcgccacagcccgggacggcgcccagagcttaataaatcaactcctaacaacctgccccataacatccacaccctcaggcgtcctcctcaccctcccgcaccccaccacacccctcccgcgcgagaagcctctgcccgaagccaagcagcccacgaaatgggagcaattcgccgcgaaacgcggtatcaagcccaagacacgagagcagcgccgcatgaagtcgcagaagtacaacgaggagacgggccagtgggagaagacctggggctacaacaaagacggacggatcgagcgcaaggagaaggggtatggtgcagcaggattggttggtcgaggtcgatga

SEQ ID NO: 9413 - protein, 172 aa, Muscodor strobelii
  misc_feature: SGI Peptide ID NO. 562940
  misc_feature (11)..(172): Pfam Id: PF04939 Pfam Desc: Ribosome biogenesis regulatory protein (RRS1)
  misc_feature (11)..(149): Pfam Id: PF04939 Pfam Desc: Ribosome biogenesis regulatory protein (RRS1)
  misc_feature (8)..(149): NCBI GI: 39958972 Blast Desc: MGG_09302 [Magnaporthe grisea 70-15] gi|145013238|gb|EDJ97879.1| MGG_09302 [Magnaporthe grisea 70-15]
  misc_feature (10)..(153): NCBI GI: 116180892 Blast Desc: CHGG_01074 [Chaetomium globosum CBS 148.51] gi|88185371|gb|EAQ92839.1| CHGG_01074 [Chaetomium globosum CBS 148.51]
  misc_feature (1)..(153): NCBI GI: 256732629 Blast Desc: [Nectria haematococca mpVI 77-13-4]
  misc_feature (1)..(153): NCBI GI: 46125459 Blast Desc: FG07107.1 [Gibberella zeae PH-1]
  misc_feature (10)..(153): NCBI GI: 85111319 Blast Desc: NCU08121 [Neurospora crassa OR74A] gi|28925625|gb|EAA34644.1| conserved [Neurospora crassa OR74A]
  misc_feature (10)..(156): NCBI GI: 171695932 Blast Desc: protein product [Podospora anserina] gi|170948208|emb|CAP60372.1| protein product [Podospora anserina]
  misc_feature (9)..(153): NCBI GI: 156036162 Blast Desc: SS1G_12767 [Sclerotinia sclerotiorum 1980] gi|154698175|gb|EDN97913.1| SS1G_12767 [Sclerotinia sclerotiorum 1980]
  misc_feature (9)..(153): NCBI GI: 154314321 Blast Desc: BC1G_05254 [Botryotinia fuckeliana B05.10] gi|150848899|gb|EDN24092.1| BC1G_05254 [Botryotinia fuckeliana B05.10]
  misc_feature (5)..(153): NCBI GI: 261356157 Blast Desc: conserved [Verticillium albo-atrum VaMs.102]
  misc_feature (10)..(162): NCBI GI: 121711335 Blast Desc: ribosome biogenesis protein (Rrs1), [Aspergillus clavatus NRRL 1] gi|119401434|gb|EAW11857.1| ribosome biogenesis protein (Rrs1), [Aspergillus clavatus NRRL 1]
  misc_feature: Useful for introducing or modulating the production of volatile compounds
MSLPSSGKTKLEVAVNKPTPYTFDLGLLLANDANPLSSSTPADTPSTSIGVSPLEAQLIATARDGAQSLINQLLTTCPITSTPSGVLLTLPHPTTPLPREKPLPEAKQPTKWEQFAAKRGIKPKTREQRRMKSQKYNEETGQWEKTWGYNKDGRIERKEKGYGAAGLVGRGR

SEQ ID NO: 9414 - DNA, 3550 bp, Muscodor strobelii
  misc_feature: SGI EST ID NO. CUFF.22546.2
  misc_feature: Variant of the nucleotide sequence at SEQ ID NO 9412
caactaccatcatagccaatctaaaccacagcgcattacgacaaaaaccctttcacacaacacccgaacacatcgatcgcctccaaacacactgtcatatcgacatcgtcttatcgtagcatctttccaccgcgcccgcgtcggcgaccaacaatcacaatgtctctcccatcgagcggaaagacaaagctcgaagtagcagtcaacaagccaacaccctacacattcgacctcggtctcctcctcgccaacgacgccaaccccctctcatcctccacacccgccgacacgccctccacatccatcggcgtcagccccttagaagcccagctcatcgccacagcccgggacggcgcccagagcttaataaatcaactcctaacaacctgccccataacatccacaccctcaggcgtcctcctcaccctcccgcaccccaccacacccctcccgcgcgagaagcctctgcccgaagccaagcagcccacgaaatgggagcaattcgccgcgaaacgcggtatcaagcccaagacacgagagcagcgccgcatgaagtcgcagaagtacaacgaggagacgggccagtgggagaagacctggggctacaacaaagacggacggatcgagcgcaaggagaaggggtatggtgcagcaggattggttggtcgaggtcgatgagaagaaggagcgcgaggagaaagaggctagacggaaggctgttagggggaagggtaggaggaaatgaggggtgtcacggccggcgtgattggtgacttctagtcggatggtgttttggtgggaaggaaaagagacgaggcaagatgatggccaggcatagcttatgctcggttcgtcgtcagttcagcgagttgtcgggaatggcgctgatcattcactagtagagtcacggacgacgatgccttacgagtatcagagacatcgatttgtcttgcgcagtgcgtctcgattgcacgctctatgaaaatgatatatccatcaatccagaaatgaagtcaaaacaaaaaatcatagcacttgggcacagctaacgacatctctcggtttcaacggtgcagtctgcatgccatctataatctctgcttatgatcgccaatgccaaccgagtttcgaaatgggccttcacatgccctctgcaagacccttcatgatgatatgatataagcacaagcgggacctccaccctcctacgcagtagatgctccaactccatcgctaacctcgaagccgtctgtggtatcgccatagcgttacattacgtcgtcatacggtgtactctgctcgcctcctggtcattacgcctcgcgaaaatgctgcttctttcctgcctttcccgtcttacccaaccactgagcacggattctttatattcaaacagtgccactgaaaaccatgccatctgttagcaccggcgtaaatgtgatgaaggcaaccatccaagcaaacaactgtctccaatgttccatactcaaatactcccccagaagcctctttgcttctctttcttcttctggtgagcgttccatcgccatcgccatcgctagttccaccaacacgtcgtgaaaaccactgcaaattcgaaggggtataccagataatgggaacagaacgttactgggccaatgaaagtatcgaaatccgcaaaaggagccgtcaagctcgaagttcaagccaggttgcgcttatccagagtccatttcgcaatcttatgatgaaagtgtacacatgcaaaaccatgcctcaaccaagtttcgcaaatcggcgaagcaacgcacaccattgagtaataatctgctttatccccggtcgataagtgtcgtagaggtagcaggttgcacgctctttgcaataggtgtcgagcttcaaggcagcatcggcaaccctggatcagtcttttgatcaagtcgacaccatgcaccttgaattgattgaaccaacctcgaaatgtaggagtgtggaatgcggtcggggctcggctaatacctgccaatgaatgacgttcataactcaaatcaaaatccaagtggtgatagaggcttgatgggtgacagaggtcgcagttgtgtccgttgtggcggcgtctcatcgggtctctcaggtctctcgggcctatctcgatcaggcaatacggtgatgttgggcggtgttgagtactgaggtttcaggttaccattcgatcttttcgacaccacaatcttgtcgcgggcgccgtcctcatgttcctcctgtttgtatgcgcgctccttactcccttcggacgatgacgcggcccgctcttcgcgtttgtcgtccccatagtctgcgttgagacctttgggcaaaggttgctggaaaagctcatactcttgcctaatgtacatcccctcattcttgcagccctgccaacacaaccgccagtcgcaaacaaggaacttgaaacagaaggcgtctatcttcatgcaaggctgaaaacaaatacacagatttcggaaatccatcttgttcttgtcggagtgagctaacaaaagactaagatgacacgtgatggcgaagaggagataatatttgtacggtgggagttgggataactttttaatcaacagcggagggggcgtttcctctgagccggtgcacgacttcgagatctcttcttgcgcttcctttggaaaaagctcgtcgggcagttcacgtaaccatgctttcagcatggatccaataatattgatgtcataaagatcatcttggacgaagagatcgatgtcgtgttctgaagattggttagtatattgagctcaaacgtgaaggttagagtgcgtggcataccttcgtcaaatctccgttgccatttcttgatctgtgggccactgcctgggacacggtagagcccttccgagtctataccgttgaagttgaggtagtcgatagccctccatgggaacgcaggcatccagaattccgtcttatctcgtgattcttccaatctcttggaaattctcgtctttcgtgtctgttcgtcgagaggcaaattcaaggttttcagcacatagtgttcatcatcaaccgccgattccctctcgttcgtgctagcgctacggccgccttttccgaaaatgcctttactgatcatgtctgccgcctgtctgcctgaggatttgaggccactaaagaagttggaacctccgccgtctttgatggaagatgggtggctcctgttctctttatcgctgcgatattctttgttcgacgaggggtctcggacagcccgatctgccgattggtttctcaaagatgaatccatcttatgtctgaaggacctttcacgcgcatcagcgtggattggggccgtcttcaaaggagccggtccattggaggcatgtaaacggtctggctcgggcatcttgatcgtcatgggctctctcggggactgatcctcttttgttagtttattacggcgtcccatgaacgcattgggtttattcttcttggatgtatcggtctcggccgtagatggcagcgatacgtctgagccggttggcaacagagccgctggcgg

SEQ ID NO: 9415 - DNA, 1446 bp, Muscodor strobelii
  misc_feature: SGI cDNA ID NO. 562941
  misc_feature: Elevated expression when VOC is produced
  misc_feature: Encodes the peptide sequence at SEQ ID NO 9416
atgtctcagcaagagcagggcaagcattacacacgtatccgagtccacgatgacgatgatgtcggcaagctgtatcctctcctcctgaaatacattcgagagcctgaattggccttgtccgttagagaattcgtcttccggcatcatctgccatcacacccgctatatcttgggggcccgtcgaagcgagtagacatcatcgaacaggaggagaacaatcgtgacatatcccaggagcacgatattttccagcttgtgacaaaccaactagggcttgaagagccagagaggtctgaatgggtcagaatcctgacatgggcgaagccagaacttgtcactgcccgtgaacagtctagggcggctgatgaccattatcacaaggttgaacccttttaccggcatcgtactgagagatttgcccatcatgctgcagcagttctattactgttatgtccgaacatcgagatactcaagtacgaggcaggtagtacaatcgttgcggatgtgcttcgtcgcaataattacggcatgttgccagcacaacacctgcttaagctccgcggagttactatttttccgacttctcactgggggatgggcgacgagaggttctttatctacctctaccttctaggcgaagtgcaactgtttcatcgactcccagcaatcgaaactctatccgcagatggtgtcggggaagggatgggcgaggaatcccctcccaacacctcgaatctgaagaaactacgatttcgtcactcgatgtttggaatggacaccatggggcctataatggggatgcctaagcacttggaagaattcactttgactacgggcggccgggctacaaacgatggcgggtatcttgcaatagaccccaaagacattggcgaggccctctgcaagcataggacatcgctacgaaagattgaccttgacctcgacgacatcattggcatacatagagaagacgaacaatgttacgacgaggacgaatacagccacgacgagtggtacgacaaggatgaagagatcagcttgggatctaatgatacagctccaatccaagcaacggcagattatggatttacgatggggtctatgcacaactacacggcgttgacacacctcagcgtcggcattgggcttcttctagggcccgtttacaagaccgacgatgccccattcagactgatcgatgcgctgccggtctcactcgagtatctaatgattcgaggatacgtgagaggaaatgtcaaccgctatgatgaccaaatcgatgagttcctgggtctcaaggcagagcggctgcctgtgctaagagaggtccatgggatagatgagctgattccttgtggagaattggtcacggacccggatcactatccagatgaactgtggaagcctgaggctgaggacgatgagtggttagaggcaaccgtatga

SEQ ID NO: 9416 - protein, 481 aa, Muscodor strobelii
  misc_feature: SGI Peptide ID NO. 562941
  misc_feature (10)..(475): NCBI GI: 46116462 Blast Desc: FG04073.1 [Gibberella zeae PH-1]
  misc_feature (9)..(450): NCBI GI: 226281418 Blast Desc: conserved [Paracoccidioides brasiliensis Pb01]
  misc_feature (139)..(450): NCBI GI: 226293602 Blast Desc: conserved [Paracoccidioides brasiliensis Pb18]
  misc_feature (139)..(450): NCBI GI: 225678767 Blast Desc: PABG_07138 [Paracoccidioides brasiliensis Pb03]
  misc_feature (182)..(478): NCBI GI: 242809367 Blast Desc: conserved [Talaromyces stipitatus ATCC 10500] gi|218715979|gb|EED15401.1| conserved [Talaromyces stipitatus ATCC 10500]
  misc_feature (13)..(470): NCBI GI: 242806396 Blast Desc: conserved [Talaromyces stipitatus ATCC 10500] gi|218715360|gb|EED14782.1| conserved [Talaromyces stipitatus ATCC 10500]
  misc_feature (139)..(474): NCBI GI: 255947228 Blast Desc: Pc22g03380 [Penicillium chrysogenum Wisconsin 54-1255] gi|211591398|emb|CAP97626.1| Pc22g03380 [Penicillium chrysogenum Wisconsin 54-1255]
  misc_feature (8)..(472): NCBI GI: 238484481 Blast Desc: conserved [Aspergillus flavus NRRL3357] gi|220701529|gb|EED57867.1| conserved [Aspergillus flavus NRRL3357]
  misc_feature (182)..(460): NCBI GI: 212537385 Blast Desc: conserved [Penicillium marneffei ATCC 18224] gi|210068590|gb|EEA22681.1| conserved [Penicillium marneffei ATCC 18224]
  misc_feature (13)..(467): NCBI GI: 212538583 Blast Desc: conserved [Penicillium marneffei ATCC 18224] gi|210069189|gb|EEA23280.1| conserved [Penicillium marneffei ATCC 18224]
  misc_feature: Useful for introducing or modulating the production of volatile compounds
MSQQEQGKHYTRIRVHDDDDVGKLYPLLLKYIREPELALSVREFVFRHHLPSHPLYLGGPSKRVDIIEQEENNRDISQEHDIFQLVTNQLGLEEPERSEWVRILTWAKPELVTAREQSRAADDHYHKVEPFYRHRTERFAHHAAAVLLLLCPNIEILKYEAGSTIVADVLRRNNYGMLPAQHLLKLRGVTIFPTSHWGMGDERFFIYLYLLGEVQLFHRLPAIETLSADGVGEGMGEESPPNTSNLKKLRFRHSMFGMDTMGPIMGMPKHLEEFTLTTGGRATNDGGYLAIDPKDIGEALCKHRTSLRKIDLDLDDIIGIHREDEQCYDEDEYSHDEWYDKDEEISLGSNDTAPIQATADYGFTMGSMHNYTALTHLSVGIGLLLGPVYKTDDAPFRLIDALPVSLEYLMIRGYVRGNVNRYDDQIDEFLGLKAERLPVLREVHGIDELIPCGELVTDPDHYPDELWKPEAEDDEWLEATV

SEQ ID NO: 9417 - DNA, 2111 bp, Muscodor strobelii
  misc_feature: SGI EST ID NO. CUFF.22324.0
  misc_feature: Variant of the nucleotide sequence at SEQ ID NO 9415
ggaaactattcccccaaatttttccgtattgctggaatgtctttacgaattgtcataaaaccgccattcttagcctttgcaatagcgttctttgcaattgcatggtttaagtaccttagcatgtctcagcaagagcagggcaagcattacacacgtatccgagtccacgatgacgatgatgtcggcaagctgtatcctctcctcctgaaatacattcgagagcctgaattggccttgtccgttagagaattcgtcttccggcatcatctgccatcacacccgctatatcttgggggcccgtcgaagcgagtagacatcatcgaacaggaggagaacaatcgtgacatatcccaggagcacgatattttccagcttgtgacaaaccaactagggcttgaagagccagagaggtctgaatgggtcagaatcctgacatgggcgaagccagaacttgtcactgcccgtgaacagtctagggcggctgatgaccattatcacaaggttgaacccttttaccggcatcgtactgagagatttgcccatcatgctgcagcagttctattactgttatgtccgaacatcgagatactcaagtacgaggcaggtagtacaatcgttgcggatgtgcttcgtcgcaataattacggcatgttgccagcacaacacctgcttaagctccgcggagttactatttttccgacttctcactgggggatgggcgacgagaggttctttatctacctctaccttctaggcgaagtgcaactgtttcatcgactcccagcaatcgaaactctatccgcagatggtgtcggggaagggatgggcgaggaatcccctcccaacacctcgaatctgaagaaactacgatttcgtcactcgatgtttggaatggacaccatggggcctataatggggatgcctaagcacttggaagaattcactttgactacgggcggccgggctacaaacgatggcgggtatcttgcaatagaccccaaagacattggcgaggccctctgcaagcataggacatcgctacgaaagattgaccttgacctcgacgacatcattggcatacatagagaagacgaacaatgttacgacgaggacgaatacagccacgacgagtggtacgacaaggatgaagagatcagcttgggatctaatgatacagctccaatccaagcaacggcagattatggatttacgatggggtctatgcacaactacacggcgttgacacacctcagcgtcggcattgggcttcttctagggcccgtttacaagaccgacgatgccccattcagactgatcgatgcgctgccggtctcactcgagtatctaatgattcgaggatacgtgagaggaaatgtcaaccgctatgatgaccaaatcgatgagttcctgggtctcaaggcagagcggctgcctgtgctaagagaggtccatgggatagatgagctgattccttgtggagaattggtcacggacccggatcactatccagatgaactgtggaagcctgaggctgaggacgatgagtggttagaggcaaccgtatgaatcgattatctagattcatgtagcatcccggtatgcaagcatgtatactttatagctatcaataagtccacggttccggttcactctgagtgtcgagaacactggttcgattcctggctctacccttttgcaattccctcccccccttttaacactatgtggacctttttcattctctctcatattttcttctatgtacctaatcttttaatgctgcgcttactctcatcttatatgaaagtcgaagacataggatttcgcgtggctgaggcgtgccttacatatcttgacatccttcggtaattagctgcaggcgatttctttggttcttccgcagccattccgaagaatcacgctaagcatttccaccgcagccctagactagtcgacctcccgacgaggggccctctattcggaagcaagttgttttagacagtgggagcctggtatctccttctagagtattttactctaggttctttgtcagagatgaatacatatgtccactcctagatggctagattagttccacaccttgaatagat

SEQ ID NO: 9418 - DNA, 1407 bp, Muscodor strobelii
  misc_feature: SGI cDNA ID NO. 562942
  misc_feature: Reduced expression when VOC is produced
  misc_feature: Encodes the peptide sequence at SEQ ID NO 9419
atggcgagccgaaactgctggaggtgcctgtcgaggccctcgcagcgcgtcatctcgtttgcgccaacgccgacgcctctgccgctcgcttcgacctcaaccgccgccgccttctcgacttcagcccaccacctcgccagagccgcggaagcagggtcgggccggcacgttcgtgccggcaagaaactgaccctcgggaagaagaagaagcagcaggtcagcttcaaggccccggccatcggcgaacgaaaggcgttccgcaagcgcatccagctcagcaacgacaacgccctcaaggtcaccggcctgcacgacctcacccccgacgccttgatagaccccgagtctgtcggcaccgtcgcctccatccccgcccctgtcgtcgaccagttgcggacatgcgagggcttcaaatcctcccagaactggaacctgttccactcaccgcacatgctcgtccgcgccgagaccgtcgatctcgccaagcagataactgacgccgtcggcaagaaagagacgctgaggctggtcgtcaccggtgataggggttcgggaaagagcatagttggtctgcaggccctggctacgggctttttgaacaacatggtcgtcatgcatctgcccgaaggccaagaactcaccaacgcgtccaccgaatactccaccatccacaactcggagcaattctcccagcccgtctacgccgtcaagttgatgcaggccatgctccagtcgaaccaagccgtgctgtcacagcacaaagtccaactcgaccacctccacctgcccgtctccctatcccgcagcatgaccctcgcccaagtcctagctgccaccaaagagcccgacttcgcctggcccgtcttccaagccttctggaaggagctactgctccccggccgcccaccggtcctcttctctctcgacggtctcgcccacatcatgcgcatcagcgagtaccgctccccgtccttccaattaatccacagccacgacctaggcatcgtacgcatgttcgccgacgcgttgggtggcaagacggccttccccaacggcgctgccatcatcggcgtgacctctaagggaaacgcgcccatcatcccctccatggataaagcaattgcccaagcatccgccgcgcaaaagggcgaggcgatcccgcctcgagaccctttgtttcggaaatacgacgaccgcgtctttgagtcgctgaaaggggtgagggtcttggaggttcagggtgtttctaggactgaggctagatcgctcatggagtactgggctgcgtctggtatcttgaggtcccgcgtggatgagaaacatgtcaccgagaagtggactatggctggacggggtatcctcgctgagatggagcgggtttcgctttttgatcttagagctacgtag

SEQ ID NO: 9419 - protein, 468 aa, Muscodor strobelii
  misc_feature: SGI Peptide ID NO. 562942
  misc_feature (1)..(466): NCBI GI: 116180894 Blast Desc: CHGG_01075 [Chaetomium globosum CBS 148.51] gi|88185372|gb|EAQ92840.1| CHGG_01075 [Chaetomium globosum CBS 148.51]
  misc_feature (1)..(467): NCBI GI: 85111317 Blast Desc: NCU08120 [Neurospora crassa OR74A] gi|28925624|gb|EAA34643.1| conserved [Neurospora crassa OR74A]
  misc_feature (1)..(466): NCBI GI: 39958959 Blast Desc: MGG_09301 [Magnaporthe grisea 70-15] gi|145013239|gb|EDJ97880.1| MGG_09301 [Magnaporthe grisea 70-15]
  misc_feature (1)..(466): NCBI GI: 171695934 Blast Desc: protein product [Podospora anserina] gi|170948209|emb|CAP60373.1| protein product [Podospora anserina]
  misc_feature (1)..(462): NCBI GI: 154314319 Blast Desc: BC1G_05253 [Botryotinia fuckeliana B05.10] gi|150848898|gb|EDN24091.1| BC1G_05253 [Botryotinia fuckeliana B05.10]
  misc_feature (1)..(466): NCBI GI: 46125457 Blast Desc: FG07106.1 [Gibberella zeae PH-1]
  misc_feature (1)..(466): NCBI GI: 261356158 Blast Desc: 37S ribosomal protein S23 [Verticillium albo-atrum VaMs.102]
  misc_feature (1)..(466): NCBI GI: 256733078 Blast Desc: [Nectria haematococca mpVI 77-13-4]
  misc_feature (66)..(462): NCBI GI: 169601656 Blast Desc: SNOG_03698 [Phaeosphaeria nodorum SN15] gi|111067783|gb|EAT88903.1| SNOG_03698 [Phaeosphaeria nodorum SN15]
  misc_feature (86)..(462): NCBI GI: 156036160 Blast Desc: SS1G_12766 [Sclerotinia sclerotiorum 1980] gi|154698174|gb|EDN97912.1| SS1G_12766 [Sclerotinia sclerotiorum 1980]
  misc_feature: Useful for introducing or modulating the production of volatile compounds
MASRNCWRCLSRPSQRVISFAPTPTPLPLASTSTAAAFSTSAHHLARAAEAGSGRHVRAGKKLTLGKKKKQQVSFKAPAIGERKAFRKRIQLSNDNALKVTGLHDLTPDALIDPESVGTVASIPAPVVDQLRTCEGFKSSQNWNLFHSPHMLVRAETVDLAKQITDAVGKKETLRLVVTGDRGSGKSIVGLQALATGFLNNMVVMHLPEGQELTNASTEYSTIHNSEQFSQPVYAVKLMQAMLQSNQAVLSQHKVQLDHLHLPVSLSRSMTLAQVLAATKEPDFAWPVFQAFWKELLLPGRPPVLFSLDGLAHIMRISEYRSPSFQLIHSHDLGIVRMFADALGGKTAFPNGAAIIGVTSKGNAPIIPSMDKAIAQASAAQKGEAIPPRDPLFRKYDDRVFESLKGVRVLEVQGVSRTEARSLMEYWAASGILRSRVDEKHVTEKWTMAGRGILAEMERVSLFDLRAT

SEQ ID NO: 9420 - DNA, 1647 bp, Muscodor strobelii
  misc_feature: SGI EST ID NO. CUFF.22549.0
  misc_feature: Variant of the nucleotide sequence at SEQ ID NO 9418
tccaactcgaccaaggccaaaagcgagcctcaattcattaccagaggccagcaacatacacgtccacattgtcattgccgttgccattgcattgccgtctgcataagcttggctatggcgagccgaaactgctggaggtgcctgtcgaggccctcgcagcgcgtcatctcgtttgcgccaacgccgacgcctctgccgctcgcttcgacctcaaccgccgccgccttctcgacttcagcccaccacctcgccagagccgcggaagcagggtcgggccggcacgttcgtgccggcaagaaactgaccctcgggaagaagaagaagcagcaggtcagcttcaaggccccggccatcggcgaacgaaaggcgttccgcaagcgcatccagctcagcaacgacaacgccctcaaggtcaccggcctgcacgacctcacccccgacgccttgatagaccccgagtctgtcggcaccgtcgcctccatccccgcccctgtcgtcgaccagttgcggacatgcgagggcttcaaatcctcccagaactggaacctgttccactcaccgcacatgctcgtccgcgccgagaccgtcgatctcgccaagcagataactgacgccgtcggcaagaaagagacgctgaggctggtcgtcaccggtgataggggttcgggaaagagcatagttggtctgcaggccctggctacgggctttttgaacaacatggtcgtcatgcatctgcccgaaggccaagaactcaccaacgcgtccaccgaatactccaccatccacaactcggagcaattctcccagcccgtctacgccgtcaagttgatgcaggccatgctccagtcgaaccaagccgtgctgtcacagcacaaagtccaactcgaccacctccacctgcccgtctccctatcccgcagcatgaccctcgcccaagtcctagctgccaccaaagagcccgacttcgcctggcccgtcttccaagccttctggaaggagctactgctccccggccgcccaccggtcctcttctctctcgacggtctcgcccacatcatgcgcatcagcgagtaccgctccccgtccttccaattaatccacagccacgacctaggcatcgtacgcatgttcgccgacgcgttgggtggcaagacggccttccccaacggcgctgccatcatcggcgtgacctctaagggaaacgcgcccatcatcccctccatggataaagcaattgcccaagcatccgccgcgcaaaagggcgaggcgatcccgcctcgagaccctttgtttcggaaatacgacgaccgcgtctttgagtcgctgaaaggggtgagggtcttggaggttcagggtgtttctaggactgaggctagatcgctcatggagtactgggctgcgtctggtatcttgaggtcccgcgtggatgagaaacatgtcaccgagaagtggactatggctggacggggtatcctcgctgagatggagcgggtttcgctttttgatcttagagctacgtagagattaggctaaagggatggaatgtgaaataggttggtcgtgtaaagaaggaagagggaaatcttggtgtatctggctagatgtagataactgtatattgtacaataccaccatgttaacattcag

SEQ ID NO: 9421 - DNA, 2472 bp, Muscodor strobelii
  misc_feature: SGI cDNA ID NO. 562943
  misc_feature: Encodes the peptide sequence at SEQ ID NO 9422
atggcgctcttacagtacaagcagatcgtcaattacgaggagcagcaaggcgcctttgaggacttcctcacctccttcaagacctctcccgaacagaccctgacccatgccatcggtcagatcaacattgacgaggatgacctgagtgacgagtatgattttatggacgacgatgacgaggcacaacatgagcgacgacgccgagaaaaggccacttcaaggctgcccaagcacaaatatgccgacatgatgcagaagctcgcagatcgctcgctggacgaggtgttaatagagctagacgatcttgtcacatacgaaaacgacacaaacgaatccttgaaactggttgagtctatcgagtccaacaccaagcactatgtcgagattatgtccagagccatcgacaagaagatgcccgctcccacaaccggtgtcacgttcaaagacgatgtcctggatgtcatcatggagcgaagacaggctcgaaaccgggagatccaagatgcagccgcgaacgaccaggatccggaaagcgctaggaatatattccccgcagagctcacccgccgatacacgcttgtcttcaagcccagaacgtccacggcagataaccccgtcaaggcgttggctgtgcggcaagtgaggggcgataacttgggccacctgatcaccgtccgaggcatagtaacccgaacgtcagacgtcaagcccatagttcaagtcagcgcgtacacttgcgatcgctgcggtagcgaactcttccagccgatcacctcaaagcagtatgcccctgagactgtctgcaagtcagaagactgcaggcaaaaccagtcaaaaggccaactcttcccatcctctcgcgcttcgaaatttctacccttccaggaagtcaagattcaggagatggccgagcaagtacccatcggccagattcctcgcactctgaccgtcatgtgctatggcagcgctgttcgacaggtcaaccctggcgacgttgtggacatcgctggcatcttcttgccgactccctacacagggttcaaggccatgcgggccgggctattgacagacacctacctcgaagcccaccacataactcagcacaagaaggcatatgatgagatgatcatcgatgacaagctcttacgccgaatcagcacctacagtcagtccggagccgtatacgagatgctggccaagtctattgcgccagaaatctttgggcatcttgatgtaaaaaaggcactattacttctccttgttggaggcgtcacgaaaaccatgggcgatggtatgcgcatccgtggtgatatcaatatctgcttaatgggtgaccccggtgtggccaaatctcagttgttgaagtacatctccaaggtagcgcctcgtggtgtatacacgtcgggccgtggatccagtggtgttggtctgacggctgccgttatgcgtgatccggtaacagatgagatggtgctggaaggtggtgcgttggtgcttgctgacaacggcatttgctgtatcgatgaatttgacaagatggacgacaacgatcgaaccgctatccacgaagtcatggaacaacagaccatttccatctccaaggccggtatctccaccactctgaacgccaggacttcgatcctcgcggccgccaatcccgtctacggtcgctacaaccctcgtatctctcctgttgagaatatcaacctgcccgccgctcttctctcccgtttcgacgtgttattccttcttctcgatacacccactcgtgacagcgatgctcagctggccaagcacgtagcttacgtccacatgcacagcaagcatcccgatctctacgcggcgaacggaaacggcgagagcgcaagtacagtcttcacaccgcacgaggtccgagcctacgtcgcgcaagcccgcacgtaccgacccacggtcccggagtccgtgacggaatatcttactaagacatatgtccgcatgcgcgatgctcagcgccgggcagaaaagcggaataagcagttcacctacaccacgacgcgtacccttctcggtgtcgtccgtcttgctcaggctctagctcgtctacgcttcgccaccgaggtttcgcaagacgacgtagatgaggcgttgcgtctgatcgaggcttcgaaggagagtctcgccgcacatgaaggtgccggtgggcgccgtgctttgaatgccgctagtcgtatatacaacctcgttaagacgcttgcggatagcggggcgtgtcgtcctggcgacgacgaggatgatgaggagggtacggtcgagcttagcatgcgcaaggttcgcgaacgtgtgctggctaaggggttcactgaggatcaatggttgagcgctttggatgagtatactaatcttgatgtttggcaaaccgctggcaatggcagtagattggtgttcatcactgccaatgacgaggcaggggatgatgacgatatggagtaa

SEQ ID NO: 9422 - protein, 823 aa, Muscodor strobelii
  misc_feature: SGI Peptide ID NO. 562943
  misc_feature (439)..(586): Pfam Id: PF07728 Pfam Desc: ATPase family associated with various cellular activities (AAA)
  misc_feature (381)..(718): Pfam Id: PF00493 Pfam Desc: MCM2/3/5 family
  misc_feature (1)..(814): NCBI GI: 116180896 Blast Desc: CHGG_01076 [Chaetomium globosum CBS 148.51] gi|88185373|gb|EAQ92841.1| CHGG_01076 [Chaetomium globosum CBS 148.51]
  misc_feature (3)..(821): NCBI GI: 145605415 Blast Desc: conserved [Magnaporthe grisea 70-15] gi|145013240|gb|EDJ97881.1| conserved [Magnaporthe grisea 70-15]
  misc_feature (1)..(822): NCBI GI: 46125455 Blast Desc: FG07105.1 [Gibberella zeae PH-1]
  misc_feature (1)..(820): NCBI GI: 256732628 Blast Desc: [Nectria haematococca mpVI 77-13-4]
  misc_feature (1)..(822): NCBI GI: 85111315 Blast Desc: DNA replication licensing factor mcm7 [Neurospora crassa OR74A] gi|28925623|gb|EAA34642.1| DNA replication licensing factor mcm7 [Neurospora crassa OR74A]
  misc_feature (1)..(823): NCBI GI: 261356159 Blast Desc: DNA replication licensing factor mcm7 [Verticillium albo-atrum VaMs.102]
  misc_feature (1)..(820): NCBI GI: 171695936 Blast Desc: protein product [Podospora anserina] gi|170948210|emb|CAP60374.1| protein product [Podospora anserina]
  misc_feature (1)..(812): NCBI GI: 154314275 Blast Desc: conserved [Botryotinia fuckeliana B05.10] gi|150848876|gb|EDN24069.1| conserved [Botryotinia fuckeliana B05.10]
  misc_feature (1)..(815): NCBI GI: 169783532 Blast Desc: [Aspergillus oryzae RIB40] gi|83774972|dbj|BAE65095.1| protein product [Aspergillus oryzae]
  misc_feature (1)..(818): NCBI GI: 119480939 Blast Desc: DNA replication licensing factor Mcm7, [Neosartorya fischeri NRRL 181] gi|119408652|gb|EAW18601.1| DNA replication licensing factor Mcm7, [Neosartorya fischeri NRRL 181]
MALLQYKQIVNYEEQQGAFEDFLTSFKTSPEQTLTHAIGQINIDEDDLSDEYDFMDDDDEAQHERRRREKATSRLPKHKYADMMQKLADRSLDEVLIELDDLVTYENDTNESLKLVESIESNTKHYVEIMSRAIDKKMPAPTTGVTFKDDVLDVIMERRQARNREIQDAAANDQDPESARNIFPAELTRRYTLVFKPRTSTADNPVKALAVRQVRGDNLGHLITVRGIVTRTSDVKPIVQVSAYTCDRCGSELFQPITSKQYAPETVCKSEDCRQNQSKGQLFPSSRASKFLPFQEVKIQEMAEQVPIGQIPRTLTVMCYGSAVRQVNPGDVVDIAGIFLPTPYTGFKAMRAGLLTDTYLEAHHITQHKKAYDEMIIDDKLLRRISTYSQSGAVYEMLAKSIAPEIFGHLDVKKALLLLLVGGVTKTMGDGMRIRGDINICLMGDPGVAKSQLLKYISKVAPRGVYTSGRGSSGVGLTAAVMRDPVTDEMVLEGGALVLADNGICCIDEFDKMDDNDRTAIHEVMEQQTISISKAGISTTLNARTSILAAANPVYGRYNPRISPVENINLPAALLSRFDVLFLLLDTPTRDSDAQLAKHVAYVHMHSKHPDLYAANGNGESASTVFTPHEVRAYVAQARTYRPTVPESVTEYLTKTYVRMRDAQRRAEKRNKQFTYTTTRTLLGVVRLAQALARLRFATEVSQDDVDEALRLIEASKESLAAHEGAGGRRALNAASRIYNLVKTLADSGACRPGDDEDDEEGTVELSMRKVRERVLAKGFTEDQWLSALDEYTNLDVWQTAGNGSRLVFITANDEAGDDDDME

SEQ ID NO: 9423 - DNA, 7252 bp, Muscodor strobelii
  misc_feature: SGI EST ID NO. CUFF.22827.1
  misc_feature: Variant of the nucleotide sequence at SEQ ID NO 9421
aaagagttatcaaagccaagggcaaggataatttatacagctactaagtgttacaaagactaatgacgaggaccgcagtggtgagctcacataaggctgctccgtccaccaatctccatactgccctgcccatccctcatctcaccactccgcccaacaacaaattctctataaatgcgctccaacctgcttcgttcctgagagctgatactagccctcgtattctctagtgcattgatcagatgcttccagccgatcaagacttctgtgtctttgctattcttatccttatgtccatgctgctcatccattgctcccggacccctattgcccaattttgcgcgcttcctcgctagcttgatctctgtaagcttagcggcaatggcggcattttcagcgagctcagcggatctattgtgcccctttctagtttcgtcttgcgcagacccttcggtgccgtaccgaaattgaacaaaatttctagctcgagtcatggttgccttcttgtctcgtgacgttccgttgctttgtttgctccccggtgtctgtaactctaggtcattcagtacatcatgaatagcctccagctgtgcattagacatgagcgcttggagatccgctccagagaaaccctcggtgcgttttcccacttcggcaagcccttcttcagatgaccagatctcttcactgactttgactttcttccctagggcttgaatgatgtcaatccggtcattcaggttagggaagtcgcatagcaagcttttgtccagacgtcctggtctaagcaaggccggatcaataagatcaggccgggacgtagcagccaatacgtagactcccgataaaccctcggcgccgtccatttgtgtaaggagctgattgacaacgcgatctgtgacacctgtggagtcgtggccacgttttggtgcgatagaatcaaattcatcaaagaacaaaacgcacggtttagcagctgatgctctctcaaaaagatcgcgaacgctcttctcactagcaccaatgtacttgttcaaaatttcaggacccttgacagaaatgaagttaagaccacattccccggccacagcgctagccaggagtgttttaccacaaccaggataaccatataagaggaggccagatcgaagtcgcagcgggcattgagcaaagatgggagcgtatttcgtgggatactgaagagtttccagcaagatttgtcttgtttcttggagaccaccaatcgagtcaaacgtggtagtcgatgtttgcaacgtaacattgcgaagtgaggccggggtgaatccttttaatgcactaccgaaatccgcacgactgagttggactatattcagagacgacttcgaagaagtttcgctcactgagcgtattaatgcctcgttacgagctctagagacaagcagaagaaggtctccaggcatgtagccatcagtctccccagccaggtcaagaaagtcgagatctggatctaaaaggaatccatcagttttcggctttgatatcgagttgcttctactcggttggctgccgccatccatccatgcgccaccatcttcactgatactgccattggcagtcgtaggacgactaccatctgtagtggaagcatggttgtgagatagagagacagtatgctgtttgacggccgtctcaaggactcgtctccgtccatctttatccggagccttcaagtctacgatctcgcgaacaatatgcccaccaattatgacattattgagagaatctttgccttgagctgtggcaagtagaacaacaccgctgtcgcggctgcaatactgccgaacaatcgcacagatagtctcgctaacctgccgactccgcccgttatcattgcccacttgaagctccgtctcagcaggacatagtttatcaacatcgtcaagtacaacaacagctttgccgccaagcctggcaccccagcttgctgccatgaagatccgattaagagtctctttgatcgtggatatgcggctttcgtcattgactaatttccggcatgaaaagtacgtcgtgtgaaaaagaaagtcatcccgaagcgtctgcgcgaggtgttgcgccactgaagttttgccagatcccaaagcacccgtgagtaaaacagaagatatatgtgataaatgagatcttaaatctgcaaggagtgtgtctattccaaccaaagtggaatcgctcgagggcagcgcgttgtcatcagagagcttttcttcaaaccatgatgggcggggtattggtggttgcacgtctagggacagagaccgatcggaacctaggaaccatttaggactgtcttgagagcttgacgttcctgatggtgtttcaaacttgacaacaccaccctcccaaccttgagggcattcaagtccgtcatacacgccaagcaccataccgtcagtaatcgctccgtgtagaagaccgcctcccgagcctttgataccatatatatgagatatcctcttgctggcttcttctttctctgctttcgattccccgccaaatttcagaccacccgaatttcttgcatctcgagcagcaaatgggtagactttcaatttctcgggccgcggagacggctgaggtgcaggctcaattttggcgatacctccaaccagtcctggacagcctaacactgcacagagcgggctggaaaaggccacggtttgactacttggagggtcgtcccacgctcggagatgggcaaccaccttctccacagattttgcggcctcagggtacgcggcgtcttgttgttgctgttgaggatcaatcggaggctgtagacctgctggcttgaccattttgacagctacgtagttgacacctcgaaaatcgttggagaagagaagatctcgatccacccaaacactaagatcttccgtcaccaccgcatcgtcgaaccactcgctgcatagactgcgttcgacggccctcgagaacagcgctggcttcttttcttcgcgaccactctttcgacggaccgtgctggcgatgctcttgccgcttctccttgacgcacctccgacactacggttttcgcgattacctttggacggctgggatcgagtcttgggagctacgatgacttcggcgtcaggggcgatcttgacaaaggcgacatctgctgaaggtggtggtgttatggagaggactctgatgttggccgtcgatgtaggggagagatggagagtcagagggtgaggggtcgagggagagccttggctggggatatatgcgggattcgggacgacacggatttgcgacaacatgttcagttccaggaatgtggcgtgaagctcaatgatctcccagtcttcaggcgtcagaggttctatgttcacggtatgcgcaagaggcggatcgacatgtatggtggcggtaatcttctggccgtcgaagaggcccaacgtcgctgctaacgtcgcatcgacttcgaccgaggcaacctcgcgttcccgtccactgctgatgccgtctcggtcgactatgggtgcgagtttccgcttgctgggcatgccggtccaaccgagatatagggatcgctgagcggacgaggccggcggtccagagccatctggtgttggcggcgcacggtagctaagttcgacaacgacgttttgggcaggcttcacagtgatgattagaagtctaactccacaagtggtttacaagagcagcttcttacagtattgatgtttacaagtacattaacgagagaattaggcaggttcaccaggcagtttttcaagtgaactagtgagatctcgccagccgttgagggcgcattcttccgcggggccatgatgagaatgaagagaggacgaagagagcaggtttaaagcaagtctggaagcgattgacagcacataagaagagcacactggtgggcgacctgaaactatatacaattgttggagaaatgcatggaaattatcgtcaagtcggcgggcgcattagagaggtcgttgtcgcatattgctcagtctggacgatcatggagatttgaaagagtgtagctagtagtacataagactgtacatggcatcttgcagctgcgggctgcacgtgggccggggaccgaggcattgaagagatgccggcaaaggtgccaagaaaactggaactagggatctcatggttaaattccgtaggagcataaagacagctacacgcattgaggtggctataaagagattggcatatcgggggctgagttagatgggtgtgtggctgatgagaaacgcgaaaagtcgcgttcggtgggcagttgcaattcaacctccagggaaggcgcgtcgggctcaggcgcatccagccacccctcttagccccctgtcgcattggatgcaagtggatgagagtgctcaattggacctgtcgcaaatcatagcggcgcttcctcgactcactcggcatttcctatcacaacaccgtctgcacttcttgtcttctgagttcacagcgccccaagccgcacgaagacacagcagtcgccatggcgctcttacagtacaagcagatcgtcaattacgaggagcagcaaggcgcctttgaggacttcctcacctccttcaagacctctcccgaacagaccctgacccatgccatcggtcagatcaacattgacgaggatgacctgagtgacgagtatgattttatggacgacgatgacgaggcacaacatgagcgacgacgccgagaaaaggccacttcaaggctgcccaagcacaaatatgccgacatgatgcagaagctcgcagatcgctcgctggacgaggtgttaatagagctagacgatcttgtcacatacgaaaacgacacaaacgaatccttgaaactggttgagtctatcgagtccaacaccaagcactatgtcgagattatgtccagagccatcgacaagaagatgcccgctcccacaaccggtgtcacgttcaaagacgatgtcctggatgtcatcatggagcgaagacaggctcgaaaccgggagatccaagatgcagccgcgaacgaccaggatccggaaagcgctaggaatatattccccgcagagctcacccgccgatacacgcttgtcttcaagcccagaacgtccacggcagataaccccgtcaaggcgttggctgtgcggcaagtgaggggcgataacttgggccacctgatcaccgtccgaggcatagtaacccgaacgtcagacgtcaagcccatagttcaagtcagcgcgtacacttgcgatcgctgcggtagcgaactcttccagccgatcacctcaaagcagtatgcccctgagactgtctgcaagtcagaagactgcaggcaaaaccagtcaaaaggccaactcttcccatcctctcgcgcttcgaaatttctacccttccaggaagtcaagattcaggagatggccgagcaagtacccatcggccagattcctcgcactctgaccgtcatgtgctatggcagcgctgttcgacaggtcaaccctggcgacgttgtggacatcgctggcatcttcttgccgactccctacacagggttcaaggccatgcgggccgggctattgacagacacctacctcgaagcccaccacataactcagcacaagaaggcatatgatgagatgatcatcgatgacaagctcttacgccgaatcagcacctacagtcagtccggagccgtatacgagatgctggccaagtctattgcgccagaaatctttgggcatcttgatgtaaaaaaggcactattacttctccttgttggaggcgtcacgaaaaccatgggcgatggtatgcgcatccgtggtgatatcaatatctgcttaatgggtgaccccggtgtggccaaatctcagttgttgaagtacatctccaaggtagcgcctcgtggtgtatacacgtcgggccgtggatccagtggtgttggtctgacggctgccgttatgcgtgatccggtaacagatgagatggtgctggaaggtggtgcgttggtgcttgctgacaacggcatttgctgtatcgatgaatttgacaagatggacgacaacgatcgaaccgctatccacgaagtcatggaacaacagaccatttccatctccaaggccggtatctccaccactctgaacgccaggacttcgatcctcgcggccgccaatcccgtctacggtcgctacaaccctcgtatctctcctgttgagaatatcaacctgcccgccgctcttctctcccgtttcgacgtgttattccttcttctcgatacacccactcgtgacagcgatgctcagctggccaagcacgtagcttacgtccacatgcacagcaagcatcccgatctctacgcggcgaacggaaacggcgagagcgcaagtacagtcttcacaccgcacgaggtccgagcctacgtcgcgcaagcccgcacgtaccgacccacggtcccggagtccgtgacggaatatcttactaagacatatgtccgcatgcgcgatgctcagcgccgggcagaaaagcggaataagcagttcacctacaccacgacgcgtacccttctcggtgtcgtccgtcttgctcaggctctagctcgtctacgcttcgccaccgaggtttcgcaagacgacgtagatgaggcgttgcgtctgatcgaggcttcgaaggagagtctcgccgcacatgaaggtgccggtgggcgccgtgctttgaatgccgctagtcgtatatacaacctcgttaagacgcttgcggatagcggggcgtgtcgtcctggcgacgacgaggatgatgaggagggtacggtcgagcttagcatgcgcaaggttcgcgaacgtgtgctggctaaggggttcactgaggatcaatggttgagcgctttggatgagtatactaatcttgatgtttggcaaaccgctggcaatggcagtagattggtgttcatcactgccaatgacgaggcaggggatgatgacgatatggagtaagataaatagagcggatcgatgcagttatttggttctgagacgcgggcgttggggcggtacttgaattcatgagtgagatgatggtctggtttgttgtataatgagcacgggccagagtgcgacgagttagatgtcggatgacgcaaagatgttggactgtggatgtcatacctataccatgttgtggatgaaaacaagagtggagatgagaagatacaaatgagacttgatcaaaacactaactttttc

SEQ ID NO: 9424 - DNA, 3693 bp, Muscodor strobelii
  misc_feature: SGI cDNA ID NO. 562944
  misc_feature: Encodes the peptide sequence at SEQ ID NO 9425
atggccccgcggaagaatgcgccctcaacggctggcgagatctcactagttcacttgaaaaactgcctggtgaacctgcctaattctctcgttaatgtacttgtaaacatcaatactcctgcccaaaacgtcgttgtcgaacttagctaccgtgcgccgccaacaccagatggctctggaccgccggcctcgtccgctcagcgatccctatatctcggttggaccggcatgcccagcaagcggaaactcgcacccatagtcgaccgagacggcatcagcagtggacgggaacgcgaggttgcctcggtcgaagtcgatgcgacgttagcagcgacgttgggcctcttcgacggccagaagattaccgccaccatacatgtcgatccgcctcttgcgcataccgtgaacatagaacctctgacgcctgaagactgggagatcattgagcttcacgccacattcctggaactgaacatgttgtcgcaaatccgtgtcgtcccgaatcccgcatatatccccagccaaggctctccctcgacccctcaccctctgactctccatctctcccctacatcgacggccaacatcagagtcctctccataacaccaccaccttcagcagatgtcgcctttgtcaagatcgcccctgacgccgaagtcatcgtagctcccaagactcgatcccagccgtccaaaggtaatcgcgaaaaccgtagtgtcggaggtgcgtcaaggagaagcggcaagagcatcgccagcacggtccgtcgaaagagtggtcgcgaagaaaagaagccagcgctgttctcgagggccgtcgaacgcagtctatgcagcgagtggttcgacgatgcggtggtgacggaagatcttagtgtttgggtggatcgagatcttctcttctccaacgattttcgaggtgtcaactacgtagctgtcaaaatggtcaagccagcaggtctacagcctccgattgatcctcaacagcaacaacaagacgccgcgtaccctgaggccgcaaaatctgtggagaaggtggttgcccatctccgagcgtgggacgaccctccaagtagtcaaaccgtggccttttccagcccgctctgtgcagtgttaggctgtccaggactggttggaggtatcgccaaaattgagcctgcacctcagccgtctccgcggcccgagaaattgaaagtctacccatttgctgctcgagatgcaagaaattcgggtggtctgaaatttggcggggaatcgaaagcagagaaagaagaagccagcaagaggatatctcatatatatggtatcaaaggctcgggaggcggtcttctacacggagcgattactgacggtatggtgcttggcgtgtatgacggacttgaatgccctcaaggttgggagggtggtgttgtcaagtttgaaacaccatcaggaacgtcaagctctcaagacagtcctaaatggttcctaggttccgatcggtctctgtccctagacgtgcaaccaccaataccccgcccatcatggtttgaagaaaagctctctgatgacaacgcgctgccctcgagcgattccactttggttggaatagacacactccttgcagatttaagatctcatttatcacatatatcttctgttttactcacgggtgctttgggatctggcaaaacttcagtggcgcaacacctcgcgcagacgcttcgggatgactttctttttcacacgacgtacttttcatgccggaaattagtcaatgacgaaagccgcatatccacgatcaaagagactcttaatcggatcttcatggcagcaagctggggtgccaggcttggcggcaaagctgttgttgtacttgacgatgttgataaactatgtcctgctgagacggagcttcaagtgggcaatgataacgggcggagtcggcaggttagcgagactatctgtgcgattgttcggcagtattgcagccgcgacagcggtgttgttctacttgccacagctcaaggcaaagattctctcaataatgtcataattggtgggcatattgttcgcgagatcgtagacttgaaggctccggataaagatggacggagacgagtccttgagacggccgtcaaacagcatactgtctctctatctcacaaccatgcttccactacagatggtagtcgtcctacgactgccaatggcagtatcagtgaagatggtggcgcatggatggatggcggcagccaaccgagtagaagcaactcgatatcaaagccgaaaactgatggattccttttagatccagatctcgactttcttgacctggctggggagactgatggctacatgcctggagaccttcttctgcttgtctctagagctcgtaacgaggcattaatacgctcagtgagcgaaacttcttcgaagtcgtctctgaatatagtccaactcagtcgtgcggatttcggtagtgcattaaaaggattcaccccggcctcacttcgcaatgttacgttgcaaacatcgactaccacgtttgactcgattggtggtctccaagaaacaagacaaatcttgctggaaactcttcagtatcccacgaaatacgctcccatctttgctcaatgcccgctgcgacttcgatctggcctcctcttatatggttatcctggttgtggtaaaacactcctggctagcgctgtggccggggaatgtggtcttaacttcatttctgtcaagggtcctgaaattttgaacaagtacattggtgctagtgagaagagcgttcgcgatctttttgagagagcatcagctgctaaaccgtgcgttttgttctttgatgaatttgattctatcgcaccaaaacgtggccacgactccacaggtgtcacagatcgcgttgtcaatcagctccttacacaaatggacggcgccgagggtttatcgggagtctacgtattggctgctacgtcccggcctgatcttattgatccggccttgcttagaccaggacgtctggacaaaagcttgctatgcgacttccctaacctgaatgaccggattgacatcattcaagccctagggaagaaagtcaaagtcagtgaagagatctggtcatctgaagaagggcttgccgaagtgggaaaacgcaccgagggtttctctggagcggatctccaagcgctcatgtctaatgcacagctggaggctattcatgatgtactgaatgacctagagttacagacaccggggagcaaacaaagcaacggaacgtcacgagacaagaaggcaaccatgactcgagctagaaattttgttcaatttcggtacggcaccgaagggtctgcgcaagacgaaactagaaaggggcacaatagatccgctgagctcgctgaaaatgccgccattgccgctaagcttacagagatcaagctagcgaggaagcgcgcaaaattgggcaataggggtccgggagcaatggatgagcagcatggacataaggataagaatagcaaagacacagaagtcttgatcggctggaagcatctgatcaatgcactagagaatacgagggctagtatcagctctcaggaacgaagcaggttggagcgcatttatagagaatttgttgttgggcggagtggtgagatgagggatgggcagggcagtatggagattggtggacggagcagccttatgtga

SEQ ID NO: 9425 - protein, 1230 aa, Muscodor strobelii
  misc_feature: SGI Peptide ID NO. 562944
  misc_feature (880)..(1069): Pfam Id: PF00004 Pfam Desc: ATPase family associated with various cellular activities (AAA)
  misc_feature (132)..(224): Pfam Id: PF09262 Pfam Desc: Peroxisome biogenesis factor 1, N-terminal
  misc_feature (881)..(906): Pfam Id: PF07726 Pfam Desc: ATPase family associated with various cellular activities (AAA)
  misc_feature (1)..(1230): NCBI GI: 171695938 Blast Desc: protein product [Podospora anserina] gi|170948211|emb|CAP60375.1| protein product [Podospora anserina]
  misc_feature (1)..(1230): NCBI GI: 46125453 Blast Desc: FG07104.1 [Gibberella zeae PH-1]
  misc_feature (1)..(1230): NCBI GI: 256733077 Blast Desc: [Nectria haematococca mpVI 77-13-4]
  misc_feature (1)..(1230): NCBI GI: 39958932 Blast Desc: MGG_09299 [Magnaporthe grisea 70-15] gi|145013241|gb|EDJ97882.1| MGG_09299 [Magnaporthe grisea 70-15]
  misc_feature (1)..(1230): NCBI GI: 85111313 Blast Desc: NCU08118 [Neurospora crassa OR74A] gi|28925622|gb|EAA34641.1| NCU08118 [Neurospora crassa OR74A]
  misc_feature (5)..(1230): NCBI GI: 156036132 Blast Desc: SS1G_12752 [Sclerotinia sclerotiorum 1980] gi|154698160|gb|EDN97898.1| SS1G_12752 [Sclerotinia sclerotiorum 1980]
  misc_feature (1)..(1153): NCBI GI: 116180898 Blast Desc: CHGG_01077 [Chaetomium globosum CBS 148.51] gi|88185374|gb|EAQ92842.1| CHGG_01077 [Chaetomium globosum CBS 148.51]
  misc_feature (5)..(1230): NCBI GI: 154314277 Blast Desc: BC1G_05232 [Botryotinia fuckeliana B05.10] gi|150848877|gb|EDN24070.1| BC1G_05232 [Botryotinia fuckeliana B05.10]
  misc_feature (1)..(1230): NCBI GI: 169783530 Blast Desc: [Aspergillus oryzae RIB40] gi|83774971|dbj|BAE65094.1| protein product [Aspergillus oryzae]
  misc_feature (1)..(1230): NCBI GI: 145252566 Blast Desc: An16g04880 [Aspergillus niger] gi|134083348|emb|CAK42915.1| protein product [Aspergillus niger]
MAPRKNAPSTAGEISLVHLKNCLVNLPNSLVNVLVNINTPAQNVVVELSYRAPPTPDGSGPPASSAQRSLYLGWTGMPSKRKLAPIVDRDGISSGREREVASVEVDATLAATLGLFDGQKITATIHVDPPLAHTVNIEPLTPEDWEIIELHATFLELNMLSQIRVVPNPAYIPSQGSPSTPHPLTLHLSPTSTANIRVLSITPPPSADVAFVKIAPDAEVIVAPKTRSQPSKGNRENRSVGGASRRSGKSIASTVRRKSGREEKKPALFSRAVERSLCSEWFDDAVVTEDLSVWVDRDLLFSNDFRGVNYVAVKMVKPAGLQPPIDPQQQQQDAAYPEAAKSVEKVVAHLRAWDDPPSSQTVAFSSPLCAVLGCPGLVGGIAKIEPAPQPSPRPEKLKVYPFAARDARNSGGLKFGGESKAEKEEASKRISHIYGIKGSGGGLLHGAITDGMVLGVYDGLECPQGWEGGVVKFETPSGTSSSQDSPKWFLGSDRSLSLDVQPPIPRPSWFEEKLSDDNALPSSDSTLVGIDTLLADLRSHLSHISSVLLTGALGSGKTSVAQHLAQTLRDDFLFHTTYFSCRKLVNDESRISTIKETLNRIFMAASWGARLGGKAVVVLDDVDKLCPAETELQVGNDNGRSRQVSETICAIVRQYCSRDSGVVLLATAQGKDSLNNVIIGGHIVREIVDLKAPDKDGRRRVLETAVKQHTVSLSHNHASTTDGSRPTTANGSISEDGGAWMDGGSQPSRSNSISKPKTDGFLLDPDLDFLDLAGETDGYMPGDLLLLVSRARNEALIRSVSETSSKSSLNIVQLSRADFGSALKGFTPASLRNVTLQTSTTTFDSIGGLQETRQILLETLQYPTKYAPIFAQCPLRLRSGLLLYGYPGCGKTLLASAVAGECGLNFISVKGPEILNKYIGASEKSVRDLFERASAAKPCVLFFDEFDSIAPKRGHDSTGVTDRVVNQLLTQMDGAEGLSGVYVLAATSRPDLIDPALLRPGRLDKSLLCDFPNLNDRIDIIQALGKKVKVSEEIWSSEEGLAEVGKRTEGFSGADLQALMSNAQLEAIHDVLNDLELQTPGSKQSNGTSRDKKATMTRARNFVQFRYGTEGSAQDETRKGHNRSAELAENAAIAAKLTEIKLARKRAKLGNRGPGAMDEQHGHKDKNSKDTEVLIGWKHLINALENTRASISSQERSRLERIYREFVVGRSGEMRDGQGSMEIGGRSSLM

SEQ ID NO: 9426 - DNA, 7439 bp, Muscodor strobelii
  misc_feature: SGI EST ID NO. CUFF.22826.0
  misc_feature: Variant of the nucleotide sequence at SEQ ID NO 9424
gaaaaagttagtgttttgatcaagtctcatttgtatcttctcatctccactcttgttttcatccacaacatggtataggtatgacatccacagtccaacatctttgcgtcatccgacatctaactcgtcgcactctggcccgtgctcattatacaacaaaccagaccatcatctcactcatgaattcaagtaccgccccaacgcccgcgtctcagaaccaaataactgcatcgatccgctctatttatcttactccatatcgtcatcatcccctgcctcgtcattggcagtgatgaacaccaatctactgccattgccagcggtttgccaaacctattgtatttcattagcatctgtgaccaattgcggcagaagggagggagagaaaactcacatcaagattagtatactcatccaaagcgctcaaccattgatcctcagtgaaccccttagccagcacacgttcgcgaaccttgcgcatgctaagctcgaccgtaccctcctcatcatcctcgtcgtcgccaggacgacacgccccgctatccgcaagcgtcttaacgaggttgtatatacgactagcggcattcaaagcacggcgcccaccggcaccttcatgtgcggcgagactctccttcgaagcctcgatcagacgcaacgcctcatctacgtcgtcttgcgaaacctcggtggcgaagcgtagacgagctagagcctgagcaagacggacgacaccgagaagggtacgcgtcgtggtgtaggtgaactgcttattccgcttttctgcccggcgctgagcatcgcgcatgcggacatatgtcttagtaagatattccgtcacggactccgggaccgtgggtcggtacgtgcgggcttgcgcgacgtaggctcggacctcgtgcggtgtgaagactgtacttgcgctctcgccgtttccgttcgccgcgtagagatcgggatgcttgctgtgcatgtggacgtaagctacgtgcttggccagctgagcatcgctgtcacgagtgggtgtatcgagaagaaggaataacacgtcgaaacgggagagaagagcggcgggcaggttgatattctcaacaggagagatacgagggttgtagcgaccgtagacgggattggcggccgcgaggatcgaagtcctggcgttcagagtggtggagataccggccttggagatggaaatggtctgttgttccatgacttcgtggatagcggttcgatcgttgtcgtccatcttgtcaaattcatcgatacagcaaatgccgttgtcagcaagcaccaacgcaccaccttccagcaccatctcatctgttaccggatcacgcataacggcagccgtcagaccaacaccactggatccacggcccgacgtgtatacaccacgaggcgctaccttggagatgtacttcaacaactgagatttggccacaccggggtcacccattaagcagatattgatatcaccacggatgcgcataccatcgcccatggttttcgtgacgcctccaacaaggagaagtaatagtgccttttttacatcaagatgcccaaagatttctggcgcaatagacttggccagcatctcgtatacggctccggactgactgtaggtgctgattcggcgtaagagcttgtcatcgatgatcatctcatcatatgccttcttgtgctgagttatgtggtgggcttcgaggtaggtgtctgtcaatagcccggcccgcatggccttgaaccctgtgtagggagtcggcaagaagatgccagcgatgtccacaacgtcgccagggttgacctgtcgaacagcgctgccatagcacatgacggtcagagtgcgaggaatctggccgatgggtacttgctcggccatctcctgaatcttgacttcctggaagggtagaaatttcgaagcgcgagaggatgggaagagttggccttttgactggttttgcctgcagtcttctgacttgcagacagtctcaggggcatactgctttgaggtgatcggctggaagagttcgctaccgcagcgatcgcaagtgtacgcgctgacttgaactatgggcttgacgtctgacgttcgggttactatgcctcggacggtgatcaggtggcccaagttatcgcccctcacttgccgcacagccaacgccttgacggggttatctgccgtggacgttctgggcttgaagacaagcgtgtatcggcgggtgagctctgcggggaatatattcctagcgctttccggatcctggtcgttcgcggctgcatcttggatctcccggtttcgagcctgtcttcgctccatgatgacatccaggacatcgtctttgaacctgaaatggttgcattagtacatgggaaggaaccccgaaacgccaagaggccattggcttacgtgacaccggttgtgggagcgggcatcttcttgtcgatggctctggacataatctcgacatagtgcttggtgttggactcgatagactcaaccagtttcaaggattcgtttgtgtcgttttcgtactggtgtctgtcagtggaagcagagaaaggagtgcgcaggggcctctgctcactgtgacaagatcgtctagctctattaacacctcgtccagcgagcgatctgcgagcttctgcatcatgtcggcatatttgtgcttgggcagccttgaagtggccttttctcggcgtcgtcgctcatgttgtgcctcgtcatcgtcgtccataaaatcatactcgtcactcaggtcatcctcgtcaatgttgatctgaccgatggcatgggtcagggtctgttcgggagaggtcttgaaggaggtgaggaagtcctcaaaggcgcctaatttgcaacaagagttagcttgatagtatagttacttcgacttccgactttaagaggacgaactgaccttgctgctcctcgtaattgacgatctgcttgtactgtaagagcgccatggcgactgctgtgtcttcgtgcggcttggggcgctgtgaactcagaagacaagaagtgcagacggtgttgtgataggaaatgccgagtgagtcgaggaagcgccgctatgatttgcgacaggtccaattgagcactctcatccacttgcatccaatgcgacagggggctaagaggggtggctggatgcgcctgagcccgacgcgccttccctggaggttgaattgcaactgcccaccgaacgcgacttttcgcgtttctcatcagccacacacccatctaactcagcccccgatatgccaatctctttatagccacctcaatgcgtgtagctgtctttatgctcctacggaatttaaccatgagatccctagttccagttttcttggcacctttgccggcatctcttcaatgcctcggtccccggcccacgtgcagcccgcagctgcaagatgccatgtacagtcttatgtactactagctacactctttcaaatctccatgatcgtccagactgagcaatatgcgacaacgacctctctaatgcgcccgccgacttgacgataatttccatgcatttctccaacaattgtatatagtttcaggtcgcccaccagtgtgctcttcttatgtgctgtcaatcgcttccagacttgctttaaacctgctctcttcgtcctctcttcattctcatcatggccccgcggaagaatgcgccctcaacggctggcgagatctcactagttcacttgaaaaactgcctggtgaacctgcctaattctctcgttaatgtacttgtaaacatcaatactcctgcccaaaacgtcgttgtcgaacttagctaccgtgcgccgccaacaccagatggctctggaccgccggcctcgtccgctcagcgatccctatatctcggttggaccggcatgcccagcaagcggaaactcgcacccatagtcgaccgagacggcatcagcagtggacgggaacgcgaggttgcctcggtcgaagtcgatgcgacgttagcagcgacgttgggcctcttcgacggccagaagattaccgccaccatacatgtcgatccgcctcttgcgcataccgtgaacatagaacctctgacgcctgaagactgggagatcattgagcttcacgccacattcctggaactgaacatgttgtcgcaaatccgtgtcgtcccgaatcccgcatatatccccagccaaggctctccctcgacccctcaccctctgactctccatctctcccctacatcgacggccaacatcagagtcctctccataacaccaccaccttcagcagatgtcgcctttgtcaagatcgcccctgacgccgaagtcatcgtagctcccaagactcgatcccagccgtccaaaggtaatcgcgaaaaccgtagtgtcggaggtgcgtcaaggagaagcggcaagagcatcgccagcacggtccgtcgaaagagtggtcgcgaagaaaagaagccagcgctgttctcgagggccgtcgaacgcagtctatgcagcgagtggttcgacgatgcggtggtgacggaagatcttagtgtttgggtggatcgagatcttctcttctccaacgattttcgaggtgtcaactacgtagctgtcaaaatggtcaagccagcaggtctacagcctccgattgatcctcaacagcaacaacaagacgccgcgtaccctgaggccgcaaaatctgtggagaaggtggttgcccatctccgagcgtgggacgaccctccaagtagtcaaaccgtggccttttccagcccgctctgtgcagtgttaggctgtccaggactggttggaggtatcgccaaaattgagcctgcacctcagccgtctccgcggcccgagaaattgaaagtctacccatttgctgctcgagatgcaagaaattcgggtggtctgaaatttggcggggaatcgaaagcagagaaagaagaagccagcaagaggatatctcatatatatggtatcaaaggctcgggaggcggtcttctacacggagcgattactgacggtatggtgcttggcgtgtatgacggacttgaatgccctcaaggttgggagggtggtgttgtcaagtttgaaacaccatcaggaacgtcaagctctcaagacagtcctaaatggttcctaggttccgatcggtctctgtccctagacgtgcaaccaccaataccccgcccatcatggtttgaagaaaagctctctgatgacaacgcgctgccctcgagcgattccactttggttggaatagacacactccttgcagatttaagatctcatttatcacatatatcttctgttttactcacgggtgctttgggatctggcaaaacttcagtggcgcaacacctcgcgcagacgcttcgggatgactttctttttcacacgacgtacttttcatgccggaaattagtcaatgacgaaagccgcatatccacgatcaaagagactcttaatcggatcttcatggcagcaagctggggtgccaggcttggcggcaaagctgttgttgtacttgacgatgttgataaactatgtcctgctgagacggagcttcaagtgggcaatgataacgggcggagtcggcaggttagcgagactatctgtgcgattgttcggcagtattgcagccgcgacagcggtgttgttctacttgccacagctcaaggcaaagattctctcaataatgtcataattggtgggcatattgttcgcgagatcgtagacttgaaggctccggataaagatggacggagacgagtccttgagacggccgtcaaacagcatactgtctctctatctcacaaccatgcttccactacagatggtagtcgtcctacgactgccaatggcagtatcagtgaagatggtggcgcatggatggatggcggcagccaaccgagtagaagcaactcgatatcaaagccgaaaactgatggattccttttagatccagatctcgactttcttgacctggctggggagactgatggctacatgcctggagaccttcttctgcttgtctctagagctcgtaacgaggcattaatacgctcagtgagcgaaacttcttcgaagtcgtctctgaatatagtccaactcagtcgtgcggatttcggtagtgcattaaaaggattcaccccggcctcacttcgcaatgttacgttgcaaacatcgactaccacgtttgactcgattggtggtctccaagaaacaagacaaatcttgctggaaactcttcagtatcccacgaaatacgctcccatctttgctcaatgcccgctgcgacttcgatctggcctcctcttatatggttatcctggttgtggtaaaacactcctggctagcgctgtggccggggaatgtggtcttaacttcatttctgtcaagggtcctgaaattttgaacaagtacattggtgctagtgagaagagcgttcgcgatctttttgagagagcatcagctgctaaaccgtgcgttttgttctttgatgaatttgattctatcgcaccaaaacgtggccacgactccacaggtgtcacagatcgcgttgtcaatcagctccttacacaaatggacggcgccgagggtttatcgggagtctacgtattggctgctacgtcccggcctgatcttattgatccggccttgcttagaccaggacgtctggacaaaagcttgctatgcgacttccctaacctgaatgaccggattgacatcattcaagccctagggaagaaagtcaaagtcagtgaagagatctggtcatctgaagaagggcttgccgaagtgggaaaacgcaccgagggtttctctggagcggatctccaagcgctcatgtctaatgcacagctggaggctattcatgatgtactgaatgacctagagttacagacaccggggagcaaacaaagcaacggaacgtcacgagacaagaaggcaaccatgactcgagctagaaattttgttcaatttcggtacggcaccgaagggtctgcgcaagacgaaactagaaaggggcacaatagatccgctgagctcgctgaaaatgccgccattgccgctaagcttacagagatcaagctagcgaggaagcgcgcaaaattgggcaataggggtccgggagcaatggatgagcagcatggacataaggataagaatagcaaagacacagaagtcttgatcggctggaagcatctgatcaatgcactagagaatacgagggctagtatcagctctcaggaacgaagcaggttggagcgcatttatagagaatttgttgttgggcggagtggtgagatgagggatgggcagggcagtatggagattggtggacggagcagccttatgtgagctcaccactgcggtcctcgtcattagtctttgtaacacttagtagctgtataaattatccttgcccttggctttgataactcttt

SEQ ID NO: 9427 - DNA, 2349 bp, Muscodor strobelii
  misc_feature: SGI cDNA ID NO. 562945
  misc_feature: Encodes the peptide sequence at SEQ ID NO 9428
atggcaagccttcaagtactcggcgcagctgcgtctgcgtcgaagcaaaaagctttcgaagatgcgcgaagtatgcaagtcaaagttcaagaagagtgtcagcgaagtgggaagcccgtcccaggctaccacctcactgaattgatcggaaaggggagcttcggccgtgtctacaaggcaaatgaccttaagacatctaacgtcgtggccgtgaaaataatcgacgttgacgagacggataccctcaaccctaaactacaagatacttacagtgaatttctcaaggaggtcaatgcactgcgtgtattgagcgaaagtggcgcaaagaacgtcaacacagtcattgaagctttaccagttgggcaagctatgtggatggttaccgagtattgcgctggtggaagcgtcgcgacacttatgaagcctactgcaccgggcggtttacaagagaaatggattatccccatattacgagaagttggtgtagccatccattgggtacacaagcaaggaatcatacaccgagacatcaaatgtgcgaatgtcttgattacagaagtgggtggcgttcaattatgcgactttggtgtcgcaggcatggtagagacaaaatttgacaaacgtacgactttcattggaactctacattggatggcacccgaacttttcgaccagaatgcacaatatggaacagaagtcgacatttgggctttcggatccatggtttacgaaattgcatccggactgcctccgaatgtgaggtccaacattcacatccctcagtttggggaatacttacgcgaacatcttccccgtttgaacggagaccagtactccgataatctcaaagatctcgttgcgttctgtctcgaagacgatcctacaaagcgtccttcgatcgaacagattcagcaacatccctacattctcaacaccgactctagatacccaacatcatccctcgcaaatctcgtcaaagcgttcaaattctgggaagaacgcggaggcagccgaaagtcccttttcgcaggcttcggtgcccaagcacctgctgaccttggcgctacatcactggctgctgatgagtggaatttctctacgactctcgctttcgacgaacaattgcagagcgaaagagacgggcgatcggaattcgatgctgtccgagacgtatatggcacatctgtcgactttccaaataacttcagtggcgaaaacacagccaggcctaagacgaaaggccgccgtcgacccccccctcaggtgctcgctgctatgcaagcgccgctcgagaaagtattcgatcccaataccatctcaaactacgacgagaattcaagggcatactatggccgccctatgatgccacctcctgctgaaccactaccgctcgcctctgatcttccgctccgggacgattctctccagtcaatgcctagagagtcccttatcgatcttgatgcatctttaggtggtgctgatctttcaaacttcgcggatatgggcaccatacgccctgctgctgccgggcttggcccccgagcttcaatggacaacagttggtctttctctacggctacaacagctgctacggagtcgcaacctcatacgcgagctcctctcagtgacccggcagacctgaacgatagacgaaatcctccggattggtcatggccaaccagtattcctcctgcatccgctaaccccgaagtgtctcatttcggctttgccgaggagcgtcccaggctgatgcatcacgagactgagcctattggtctgccgtcccaaggttacgaattagacattccacgaacaacaaacgaccgaatgtcaatgagtagtcttatcgacctagatatgagcatgcctgaaccaagcctacccgactttacaagaccatcgacatcacattcagacgttgcatctatggctggctcagagatcgccggtgccggtccgtttgatttagagaggcgcgcatccgtgtatgctccgacctcattcagcaaccgagaaccatccatatatgtatcggatgactcagacttcgctcaacaatttgctagagacacaactgcagaaaccacagactcagaggatgccagcagagggtacgaaagtgatcgtcgtctttccggagactctcagcattttgcaagtaatggcatgatgggccatcagctacctccggtggagccgccggctcctcatgtattagaaggccgtgcctctagtgccgaggtagcagaggaaatgagacgacttgtcggcagtctgggcgaccacctggcaataatcagtgagcaggtcgcagatatggagacgcgacgtgccggcggcaacagatag

SEQ ID NO: 9428 - protein, 782 aa, Muscodor strobelii
  misc_feature: SGI Peptide ID NO. 562945
  misc_feature (43)..(309): Pfam Id: PF00069 Pfam Desc: Protein kinase domain
  misc_feature (121)..(251): Pfam Id: PF07714 Pfam Desc: Protein tyrosine kinase
  misc_feature (43)..(74): Pfam Id: PF07714 Pfam Desc: Protein tyrosine kinase
  misc_feature (1)..(685): NCBI GI: 39958894 Blast Desc: MGG_09296 [Magnaporthe grisea 70-15] gi|145013244|gb|EDJ97885.1| MGG_09296 [Magnaporthe grisea 70-15]
  misc_feature (1)..(685): NCBI GI: 171696342 Blast Desc: protein product [Podospora anserina] gi|170948413|emb|CAP60577.1| protein product [Podospora anserina]
  misc_feature (1)..(688): NCBI GI: 46105468 Blast Desc: FG00362.1 [Gibberella zeae PH-1]
  misc_feature (1)..(695): NCBI GI: 116180920 Blast Desc: CHGG_01088 [Chaetomium globosum CBS 148.51] gi|88185385|gb|EAQ92853.1| CHGG_01088 [Chaetomium globosum CBS 148.51]
  misc_feature (1)..(684): NCBI GI: 256735321 Blast Desc: NECHADRAFT_11302 [Nectria haematococca mpVI 77-13-4]
  misc_feature (1)..(685): NCBI GI: 164427898 Blast Desc: NCU11235 [Neurospora crassa OR74A] gi|84873346|gb|ABC67731.1| polarity-defective 6 [Neurospora crassa] gi|157071927|gb|EDO65326.1| conserved [Neurospora crassa
  misc_feature (1)..(683): NCBI GI: 261356166 Blast Desc: serine/threonine-protein kinase nak1 [Verticillium albo-atrum VaMs.102]
  misc_feature (1)..(699): NCBI GI: 156061617 Blast Desc: SS1G_02954 [Sclerotinia sclerotiorum 1980] gi|154700355|gb|EDO00094.1| SS1G_02954 [Sclerotinia sclerotiorum 1980]
  misc_feature (9)..(499): NCBI GI: 145232489 Blast Desc: An02g05530 [Aspergillus niger] gi|134056606|emb|CAK47681.1| protein product [Aspergillus niger]
  misc_feature (6)..(573): NCBI GI: 71002032 Blast Desc: serine/threonin protein kinase [Aspergillus fumigatus Af293] gi|66853335|gb|EAL93659.1| serine/threonin protein kinase, [Aspergillus fumigatus Af293] gi|159129756|gb|EDP54870.1| protein
MASLQVLGAAASASKQKAFEDARSMQVKVQEECQRSGKPVPGYHLTELIGKGSFGRVYKANDLKTSNVVAVKIIDVDETDTLNPKLQDTYSEFLKEVNALRVLSESGAKNVNTVIEALPVGQAMWMVTEYCAGGSVATLMKPTAPGGLQEKWIIPILREVGVAIHWVHKQGIIHRDIKCANVLITEVGGVQLCDFGVAGMVETKFDKRTTFIGTLHWMAPELFDQNAQYGTEVDIWAFGSMVYEIASGLPPNVRSNIHIPQFGEYLREHLPRLNGDQYSDNLKDLVAFCLEDDPTKRPSIEQIQQHPYILNTDSRYPTSSLANLVKAFKFWEERGGSRKSLFAGFGAQAPADLGATSLAADEWNFSTTLAFDEQLQSERDGRSEFDAVRDVYGTSVDFPNNFSGENTARPKTKGRRRPPPQVLAAMQAPLEKVFDPNTISNYDENSRAYYGRPMMPPPAEPLPLASDLPLRDDSLQSMPRESLIDLDASLGGADLSNFADMGTIRPAAAGLGPRASMDNSWSFSTATTAATESQPHTRAPLSDPADLNDRRNPPDWSWPTSIPPASANPEVSHFGFAEERPRLMHHETEPIGLPSQGYELDIPRTTNDRMSMSSLIDLDMSMPEPSLPDFTRPSTSHSDVASMAGSEIAGAGPFDLERRASVYAPTSFSNREPSIYVSDDSDFAQQFARDTTAETTDSEDASRGYESDRRLSGDSQHFASNGMMGHQLPPVEPPAPHVLEGRASSAEVAEEMRRLVGSLGDHLAIISEQVADMETRRAGGNR

SEQ ID NO: 9429 - DNA, 2685 bp, Muscodor strobelii
  misc_feature: SGI EST ID NO. CUFF.22342.0
  misc_feature: Variant of the nucleotide sequence at SEQ ID NO 9427
cggctctatgccgtcttcacacaaccactctcaggattcacaaccacttcttccaaacctacaatctttccattctaagttccacgtagatagttttgcattctgtgattttgtctggttcaattgtgcaactcccacgtcgtgcagcctaccgacatcctcctgagctcaagtccatgtttggacccatatagggatggacagtgctcatctgtcgaaaaggtagcaagactggtgagagcttcacttttcaacacacacctcgagtacctgggctaagactaagcagctatggcaagccttcaagtactcggcgcagctgcgtctgcgtcgaagcaaaaagctttcgaagatgcgcgaagtatgcaagtcaaagttcaagaagagtgtcagcgaagtgggaagcccgtcccaggctaccacctcactgaattgatcggaaaggggagcttcggccgtgtctacaaggcaaatgaccttaagacatctaacgtcgtggccgtgaaaataatcgacgttgacgagacggataccctcaaccctaaactacaagatacttacagtgaatttctcaaggaggtcaatgcactgcgtgtattgagcgaaagtggcgcaaagaacgtcaacacagtcattgaagctttaccagttgggcaagctatgtggatggttaccgagtattgcgctggtggaagcgtcgcgacacttatgaagcctactgcaccgggcggtttacaagagaaatggattatccccatattacgagaagttggtgtagccatccattgggtacacaagcaaggaatcatacaccgagacatcaaatgtgcgaatgtcttgattacagaagtgggtggcgttcaattatgcgactttggtgtcgcaggcatggtagagacaaaatttgacaaacgtacgactttcattggaactctacattggatggcacccgaacttttcgaccagaatgcacaatatggaacagaagtcgacatttgggctttcggatccatggtttacgaaattgcatccggactgcctccgaatgtgaggtccaacattcacatccctcagtttggggaatacttacgcgaacatcttccccgtttgaacggagaccagtactccgataatctcaaagatctcgttgcgttctgtctcgaagacgatcctacaaagcgtccttcgatcgaacagattcagcaacatccctacattctcaacaccgactctagatacccaacatcatccctcgcaaatctcgtcaaagcgttcaaattctgggaagaacgcggaggcagccgaaagtcccttttcgcaggcttcggtgcccaagcacctgctgaccttggcgctacatcactggctgctgatgagtggaatttctctacgactctcgctttcgacgaacaattgcagagcgaaagagacgggcgatcggaattcgatgctgtccgagacgtatatggcacatctgtcgactttccaaataacttcagtggcgaaaacacagccaggcctaagacgaaaggccgccgtcgacccccccctcaggtgctcgctgctatgcaagcgccgctcgagaaagtattcgatcccaataccatctcaaactacgacgagaattcaagggcatactatggccgccctatgatgccacctcctgctgaaccactaccgctcgcctctgatcttccgctccgggacgattctctccagtcaatgcctagagagtcccttatcgatcttgatgcatctttaggtggtgctgatctttcaaacttcgcggatatgggcaccatacgccctgctgctgccgggcttggcccccgagcttcaatggacaacagttggtctttctctacggctacaacagctgctacggagtcgcaacctcatacgcgagctcctctcagtgacccggcagacctgaacgatagacgaaatcctccggattggtcatggccaaccagtattcctcctgcatccgctaaccccgaagtgtctcatttcggctttgccgaggagcgtcccaggctgatgcatcacgagactgagcctattggtctgccgtcccaaggttacgaattagacattccacgaacaacaaacgaccgaatgtcaatgagtagtcttatcgacctagatatgagcatgcctgaaccaagcctacccgactttacaagaccatcgacatcacattcagacgttgcatctatggctggctcagagatcgccggtgccggtccgtttgatttagagaggcgcgcatccgtgtatgctccgacctcattcagcaaccgagaaccatccatatatgtatcggatgactcagacttcgctcaacaatttgctagagacacaactgcagaaaccacagactcagaggatgccagcagagggtacgaaagtgatcgtcgtctttccggagactctcagcattttgcaagtaatggcatgatgggccatcagctacctccggtggagccgccggctcctcatgtattagaaggccgtgcctctagtgccgaggtagcagaggaaatgagacgacttgtcggcagtctgggcgaccacctggcaataatcagtgagcaggtcgcagatatggagacgcgacgtgccggcggcaacagataggctttggagtggtagataggcatgcagtaatcattgattagatca

SEQ ID NO: 9430 - DNA, 954 bp, Muscodor strobelii
  misc_feature: SGI cDNA ID NO. 562946
  misc_feature: Encodes the peptide sequence at SEQ ID NO 9431
atggatgccaatcaaaaatacgaagcggttcaaaacaaatacactgctgtgagcaaaggagtggacacactttacagccattctgttgccaaatctttcggatacagcgaagatgatctaataagaatcccgagagatgctaatctcggcatcagctgtggaaaccctcttgcaattgctagtcttcgagagggagaaacagtcatagacctcggttgcggcgctggttttgatgccttccttgctgccgatagagttggctccacaggaaaagtctacggcatcgatatgaacgaagatatggttgctcgagcgaacaagaaccaaatcaaatccgcgaaagaaattatctgctttatcaaggctcaaataaccgacatttctcttgactccggcatcgctgactgcatcatctcgaattgtgtaattaatcttgtgccagaagacgagaagcagtcggccttcaatgagatgtttcggttattgaaagccggaggtcgagtcgcgatctcagatatactcctgaagaacactctgcctgagaaacttcgctcctctgtgtcattgtacacttgctgcattgctggcgccagtggagtgttggactacgaaacgtatttgagagatgctggttttaaacatgttttgatcactgatgcaaatgctgatttgaatgtctacgttgacaccggcatcgatggcaaaaaatgtgaaagatccgttgccaaagtcgagggatcgctgtcttgccaaccaccgggatcaatatgttgttcaaacaactcatcaaaagaggccgagcgcatcgagtgtggtgttgttaatcaggagctacgagatgtgcttgagggtgccgacctcaacgaatgggctggtaagatctatttgagctcgcaaaatgcaactgcttatgtatttgtaggttccttcaggatatttgctttgaaagggtga

SEQ ID NO: 9431 - protein, 317 aa, Muscodor strobelii
  misc_feature: SGI Peptide ID NO. 562946
  misc_feature (69)..(170): Pfam Id: PF08241 Pfam Desc: Methyltransferase domain
  misc_feature (69)..(168): Pfam Id: PF08242 Pfam Desc: Methyltransferase domain
  misc_feature (13)..(233): Pfam Id: PF01209 Pfam Desc: ubiE/COQ5 methyltransferase family
  misc_feature (63)..(101): Pfam Id: PF01209 Pfam Desc: ubiE/COQ5 methyltransferase family
  misc_feature (1)..(317): NCBI GI: 226288272 Blast Desc: SAM-dependent methyltransferase UbiE/COQ5 family protein [Paracoccidioides brasiliensis Pb18]
  misc_feature (1)..(294): NCBI GI: 240107579 Blast Desc: methyltransferase, UbiE/COQ5 family protein [Coccidioides posadasii C735 delta SOWgp]
  misc_feature (1)..(316): NCBI GI: 258576853 Blast Desc: UREG_02124 [Uncinocarpus reesii 1704] gi|237902874|gb|EEP77275.1| UREG_02124 [Uncinocarpus reesii 1704]
  misc_feature (1)..(316): NCBI GI: 261203231 Blast Desc: ubiE/COQ5 methyltransferase [Ajellomyces dermatitidis SLH14081] gi|239586614|gb|EEQ69257.1| ubiE/COQ5 methyltransferase [Ajellomyces dermatitidis SLH14081] gi|239608349|gb|EEQ85336.1|
  misc_feature (1)..(316): NCBI GI: 154284816 Blast Desc: conserved [Ajellomyces capsulatus NAm1] gi|150406844|gb|EDN02385.1| conserved [Ajellomyces capsulatus NAm1]
  misc_feature (1)..(316): NCBI GI: 238845764 Blast Desc: SAM-dependent methyltransferase UbiE/COQ5 family protein [Microsporum canis CBS 113480]
  misc_feature (2)..(316): NCBI GI: 85068507 Blast Desc: NCU05616 [Neurospora crassa OR74A] gi|28921617|gb|EAA30906.1| conserved [Neurospora crassa OR74A] gi|40881955|emb|CAF06274.1| related to methyltransferase crassa]
  misc_feature (1)..(316): NCBI GI: 256727240 Blast Desc: NECHADRAFT_57802 [Nectria haematococca mpVI 77-13-4]
  misc_feature (1)..(317): NCBI GI: 225683254 Blast Desc: SAM-dependent methyltransferase UbiE/COQ5 family protein [Paracoccidioides brasiliensis Pb03]
  misc_feature (1)..(317): NCBI GI: 226283676 Blast Desc: SAM-dependent methyltransferase UbiE/COQ5 family protein [Paracoccidioides brasiliensis Pb01]
  misc_feature (2)..(212): SWISSPROT Homolog: EC 2.1.1.137 Arsenite methyltransferase
MDANQKYEAVQNKYTAVSKGVDTLYSHSVAKSFGYSEDDLIRIPRDANLGISCGNPLAIASLREGETVIDLGCGAGFDAFLAADRVGSTGKVYGIDMNEDMVARANKNQIKSAKEIICFIKAQITDISLDSGIADCIISNCVINLVPEDEKQSAFNEMFRLLKAGGRVAISDILLKNTLPEKLRSSVSLYTCCIAGASGVLDYETYLRDAGFKHVLITDANADLNVYVDTGIDGKKCERSVAKVEGSLSCQPPGSICCSNNSSKEAERIECGVVNQELRDVLEGADLNEWAGKIYLSSQNATAYVFVGSFRIFALKG

SEQ ID NO: 9432 - DNA, 765 bp, Muscodor strobelii
  misc_feature: SGI cDNA ID NO. 562947
  misc_feature: Encodes the peptide sequence at SEQ ID NO 9433
atggtaacaaagaatcactcagacggtcttagaactcggttcacttctcggccggcagaccacaatgcgattcgccaacgcaataaccaacggcgccatcgcgagaggatcaaaactcacatctcagagctcgaaggacgattgatggagacccaggggcgcctcaatgaagctctcgctaagatcgaacttttgactacggagctcaatggatatagaagagtggacgatggattgcgaatttctaataccaactctgctacatcgacagatctgtcaagccgcttgcaggctcagtatcatacaggcgttcaaactacgacgagtctacaaggccagttcttagagctgaccattgacccatctctttcagttgttcccgatgtagacaagctattaccctatgcggccgacaaagcagtccctgttaactatgatacactgagcaatagccctctactcaatcatgatatctctcgaagacgacttgatgacacgatgggcatattggaagttccaggcaacgattgcaaccacctgccatcgtctgagtacggggagtcaactctgaactgcgtggatgcctacgccataataggccaacagaatcatgcgggcttgaatgaagattctataagagcttggctacgaccaggatttcggagagcgcagaaaaagggtgacggctgtcgagtggagaccaatttattgtttgtgttacttgactatctcaactcaacacacgctgggtacgagtcgatatga

SEQ ID NO: 9433 - protein, 254 aa, Muscodor strobelii
  misc_feature: SGI Peptide ID NO. 562947
  misc_feature (13)..(245): NCBI GI: 116192749 Blast Desc: CHGG_06092 [Chaetomium globosum CBS 148.51] gi|88182005|gb|EAQ89473.1| CHGG_06092 [Chaetomium globosum CBS 148.51]
  misc_feature (12)..(235): NCBI GI: 171682596 Blast Desc: protein product [Podospora anserina] gi|170941257|emb|CAP66907.1| protein product [Podospora anserina]
  misc_feature (7)..(236): NCBI GI: 169613422 Blast Desc: SNOG_09842 [Phaeosphaeria nodorum SN15] gi|111061987|gb|EAT83107.1| SNOG_09842 [Phaeosphaeria nodorum SN15]
  misc_feature (177)..(245): NCBI GI: 189208241 Blast Desc: [Pyrenophora tritici-repentis Pt-1C-BFP] gi|187976547|gb|EDU43173.1| [Pyrenophora tritici-repentis Pt-1C-BFP]
  misc_feature (183)..(245): NCBI GI: 261203233 Blast Desc: [Ajellomyces dermatitidis SLH14081] gi|239586615|gb|EEQ69258.1| [Ajellomyces dermatitidis SLH14081]
  misc_feature (183)..(245): NCBI GI: 239608348 Blast Desc: [Ajellomyces dermatitidis ER-3]
  misc_feature (187)..(243): NCBI GI: 154284814 Blast Desc: [Ajellomyces capsulatus NAm1] gi|150406843|gb|EDN02384.1| [Ajellomyces capsulatus NAm1]
  misc_feature (187)..(233): NCBI GI: 240273519 Blast Desc: Trappc4 protein [Ajellomyces capsulatus H143]
  misc_feature (13)..(68): NCBI GI: 85068509 Blast Desc: NCU05617 [Neurospora crassa OR74A] gi|28921618|gb|EAA30907.1| [Neurospora crassa OR74A] gi|40881954|emb|CAF06273.1| [Neurospora crassa]
  misc_feature (183)..(233): NCBI GI: 225556410 Blast Desc: [Ajellomyces capsulatus G186AR]
MVTKNHSDGLRTRFTSRPADHNAIRQRNNQRRHRERIKTHISELEGRLMETQGRLNEALAKIELLTTELNGYRRVDDGLRISNTNSATSTDLSSRLQAQYHTGVQTTTSLQGQFLELTIDPSLSVVPDVDKLLPYAADKAVPVNYDTLSNSPLLNHDISRRRLDDTMGILEVPGNDCNHLPSSEYGESTLNCVDAYAIIGQQNHAGLNEDSIRAWLRPGFRRAQKKGDGCRVETNLLFVLLDYLNSTHAGYESI

SEQ ID NO: 9434 - DNA, 3015 bp, Muscodor strobelii
  misc_feature: SGI cDNA ID NO. 562948
  misc_feature: Encodes the peptide sequence at SEQ ID NO 9435
atggattttctcacacctgtgagtagatcatatcggaagactagtcagtctgatgatcttctgagcctttccgcaccttcctcaactgcgcagcgaacaaaagccgagttcaaaggcgcatcgccagaagaagctttggatatcttgcggagtcaaccaggtttcgacacactcattactgtgttgaagtatctaggcaaaggagatagagacaacaagtttgacatacgcgcacccggacctttgaatgccaaaatcacccacgtacttgtgacggagatcgttccgaattactggactattctacagaagtctcctgacaagaaacacatgaaggctcttttcatctgtttacgaagtctcactggcattaatgcaatcctagcttatctacggtctctaatccacaatgcaaagtccgaagcacgagatctcaagaattcccacacagccttcaatttagtctatatttctgagctcttaaatgcccttcttcaagatgatggcgagttaatgcgaatatggactgatgtcacctcgtatgtcagctctagccaagcccgcctcttgcgacaagaattcgttgcccttttcacaaatggaagattgatttctttgtccgccgaagctcaagatataagccggaaggctgggaagaatattgagcaccagtggattgctgatagcaaagaatatatcagttggctcgctcgtggtattgtacgatgggtcaagtccagtgccgacgaagatacccacacgctgtgtgctgaaatcagtgtacgggcttccaggcttggacactccgagatattcgtgcaagagttttatgcgcagttacttctgtcaacgcaatcagaccaaagactattcaacaagttgaccgctaaatacccacctcttgaacagcggaagtttctatttcagctactgaagatactatcgaattcttgcacgactttcgcagacgacggtattgatgccaaggactacccaacgatatgggcatcaatagcgatcatacgaactgcacttgttgataacaatagtcaaagagagaaccttatcgcatggttgacgagtgcttctggagccggcataggagatgcctgtggcatcagacgagcagccgttggcgcactgggcactcataaggagtctatcgtcgaggttttaggcaagagcctcgaccagttcggcgatcagctctacataaagcattctccaacactacagcaggaagctcacacacaagttttgttgctcagtgctggatatgtgcatcgaatagcaccaatgaagttgaatctcttgctacggtcgagctcctatctcaatgcgatttccaaccgcctttctatctcaaatactcgcgctcgattccttggtatggtcgtgggcgaagcactgtcaggacttgtacatggcaaagatactaaacttgatttcaagatcgatgagatgagtactgaggatgcagactggtaccgagcattggttcaagtatcagaccaggccggacctttagatccactgagagccacatttgcatcagcagaagagcgcacgcgcacaccccaaagacaaccaactccagccaaaagccttgctcccatacggccaattaaagtaccaccaaagacggggtttatcattgaagaagtcgagaatggcagcgacaatgaagagcaagaagatgctgatcttattccttacgcgaaacccgactccgacacagaagactcagatgatgacccaacgctaataaatcgggataagcctaagcctccggtctatatcagggatctcataagctattttcgagacacagacagttacgacaagcagaaattggctcttttgacagctcccacacttatacgtcggaaagcagactacggaaccgaggtatcatcgcatgctgaagaacttgcttctcttcttgttggattgcaagacaagttcgagctcgaaaaattcgacgacttgcgccttcaaggcatgatagcagtcgtcatggcgcaaccaaagaggatggcgccctggtttgccaagacattctttgatggcgactactccctttctcaacgagcatcaatcctcattgtgctcggtcttagtggccgcgaaatatcaggctttgaaacttctgagtacacagcaaatgctcaatttgcatctaagacactgcctagtaaagtagaaaaatattacttgccaccttccacgacaaacacgcatcaaccaggaagcaatctccgagccttacccccgaatgcccttgataatctcgtccagactttgtcacgaaccttcctagccccactagctgccgaagcagcagatgctgtgactggaccagacgctctcaaaatatcatcctttacgtctcgcctacagcaaagccaggaacagtcatcgacaagtacaaagatgaaatctaagcctcgaggagtccgttcaattccaaacacgactgcgtcgctgctgtcgacgtcattcttcttcccgctcacgtcacgcttccaagccgcaatgagactctcatcactatcaagctcagctaacaaggtcatattccaaccttatctccttgcgctctacgtcaaaactctcacattactaatccacgctgctgggccctcgacacttgcgctacctcagatgacagccgagatatgggatctgctcctcgcagtacgaggacagtgtttggggtccaacaaagtgactcacgaaagcgagagcgacatggcgctaactcacgcagtactcatggcacacgctgcttttctcgatgtcaacgagaatgatgtgagaggactatgcgaaagacaaggacgcgaagttgttgagagcatggaatgggtcggccttgttttcaataacactcatggtggcgagggcgcaggcgaggagaatgatgttaagatgctggctgctggtatcttgattcgacttcgtgaggtcgtggataaatatcaagctgtattgatgggcaacttgattggttga

SEQ ID NO: 9435 - protein, 1004 aa, Muscodor strobelii
  misc_feature: SGI Peptide ID NO. 562948
  misc_feature (2)..(1004): NCBI GI: 171696328 Blast Desc: protein product [Podospora anserina] gi|170948406|emb|CAP60570.1| protein product [Podospora anserina]
  misc_feature (2)..(1004): NCBI GI: 256734596 Blast Desc: NECHADRAFT_31035 [Nectria haematococca mpVI 77-13-4]
  misc_feature (2)..(1004): NCBI GI: 39958727 Blast Desc: MGG_09282 [Magnaporthe grisea 70-15] gi|145013260|gb|EDJ97901.1| MGG_09282 [Magnaporthe grisea 70-15]
  misc_feature (2)..(1004): NCBI GI: 46105470 Blast Desc: FG00363.1 [Gibberella zeae PH-1]
  misc_feature (3)..(1004): NCBI GI: 85119565 Blast Desc: NCU02531 [Neurospora crassa OR74A] gi|28927474|gb|EAA36426.1| [Neurospora crassa OR74A]
  misc_feature (2)..(1004): NCBI GI: 154319500 Blast Desc: BC1G_02231 [Botryotinia fuckeliana B05.10] gi|150855889|gb|EDN31081.1| BC1G_02231 [Botryotinia fuckeliana B05.10]
  misc_feature (2)..(984): NCBI GI: 189203917 Blast Desc: conserved [Pyrenophora tritici-repentis Pt-1C-BFP] gi|187985393|gb|EDU50881.1| conserved [Pyrenophora tritici-repentis Pt-1C-BFP]
  misc_feature (456)..(1004): NCBI GI: 116180934 Blast Desc: CHGG_01095 [Chaetomium globosum CBS 148.51] gi|88185392|gb|EAQ92860.1| CHGG_01095 [Chaetomium globosum CBS 148.51]
  misc_feature (391)..(1004): NCBI GI: 156061633 Blast Desc: SS1G_02962 [Sclerotinia sclerotiorum 1980] gi|154700363|gb|EDO00102.1| SS1G_02962 [Sclerotinia sclerotiorum 1980]
  misc_feature (25)..(1004): NCBI GI: 226279117 Blast Desc: conserved [Paracoccidioides brasiliensis Pb01]
MDFLTPVSRSYRKTSQSDDLLSLSAPSSTAQRTKAEFKGASPEEALDILRSQPGFDTLITVLKYLGKGDRDNKFDIRAPGPLNAKITHVLVTEIVPNYWTILQKSPDKKHMKALFICLRSLTGINAILAYLRSLIHNAKSEARDLKNSHTAFNLVYISELLNALLQDDGELMRIWTDVTSYVSSSQARLLRQEFVALFTNGRLISLSAEAQDISRKAGKNIEHQWIADSKEYISWLARGIVRWVKSSADEDTHTLCAEISVRASRLGHSEIFVQEFYAQLLLSTQSDQRLFNKLTAKYPPLEQRKFLFQLLKILSNSCTTFADDGIDAKDYPTIWASIAIIRTALVDNNSQRENLIAWLTSASGAGIGDACGIRRAAVGALGTHKESIVEVLGKSLDQFGDQLYIKHSPTLQQEAHTQVLLLSAGYVHRIAPMKLNLLLRSSSYLNAISNRLSISNTRARFLGMVVGEALSGLVHGKDTKLDFKIDEMSTEDADWYRALVQVSDQAGPLDPLRATFASAEERTRTPQRQPTPAKSLAPIRPIKVPPKTGFIIEEVENGSDNEEQEDADLIPYAKPDSDTEDSDDDPTLINRDKPKPPVYIRDLISYFRDTDSYDKQKLALLTAPTLIRRKADYGTEVSSHAEELASLLVGLQDKFELEKFDDLRLQGMIAVVMAQPKRMAPWFAKTFFDGDYSLSQRASILIVLGLSGREISGFETSEYTANAQFASKTLPSKVEKYYLPPSTTNTHQPGSNLRALPPNALDNLVQTLSRTFLAPLAAEAADAVTGPDALKISSFTSRLQQSQEQSSTSTKMKSKPRGVRSIPNTTASLLSTSFFFPLTSRFQAAMRLSSLSSSANKVIFQPYLLALYVKTLTLLIHAAGPSTLALPQMTAEIWDLLLAVRGQCLGSNKVTHESESDMALTHAVLMAHAAFLDVNENDVRGLCERQGREVVESMEWVGLVFNNTHGGEGAGEENDVKMLAAGILIRLREVVDKYQAVLMGNLIG

SEQ ID NO: 9436 - DNA, 2845 bp, Muscodor strobelii
  misc_feature: SGI EST ID NO. CUFF.22349.0
  misc_feature: Variant of the nucleotide sequence at SEQ ID NO 9434
gaggttttaggcaagagcctcgaccagttcggcgatcagctctacataaagcattctccaacactacagcaggaagctcacacacaagttttgttgctcagtgctggatatgtgcatcgaatagcaccaatgaagttgaatctcttgctacggtcgagctcctatctcaatgcgatttccaaccgcctttctatctcaaatactcgcgctcgattccttggtatggtcgtgggcgaagcactgtcaggacttgtacatggcaaagatactaaacttgatttcaagatcgatgagatgagtactgaggatgcagactggtaccgagcattggttcaagtatcagaccaggccggacctttagatccactgagagccacatttgcatcagcagaagagcgcacgcgcacaccccaaagacaaccaactccagccaaaagccttgctcccatacggccaattaaagtaccaccaaagacggggtttatcattgaagaagtcgagaatggcagcgacaatgaagagcaagaagatgctgatcttattccttacgcgaaacccgactccgacacagaagactcagatgatgacccaacgctaataaatcgggataagcctaagcctccggtctatatcagggatctcataagctattttcgagacacagacagttacgacaagcagaaattggctcttttgacagctcccacacttatacgtcggaaagcagactacggaaccgaggtatcatcgcatgctgaagaacttgcttctcttcttgttggattgcaagacaagttcgagctcgaaaaattcgacgacttgcgccttcaaggcatgatagcagtcgtcatggcgcaaccaaagaggatggcgccctggtttgccaagacattctttgatggcgactactccctttctcaacgagcatcaatcctcattgtgctcggtcttagtggccgcgaaatatcaggctttgaaacttctgagtacacagcaaatgctcaatttgcatctaagacactgcctagtaaagtagaaaaatattacttgccaccttccacgacaaacacgcatcaaccaggaagcaatctccgagccttacccccgaatgcccttgataatctcgtccagactttgtcacgaaccttcctagccccactagctgccgaagcagcagatgctgtgactggaccagacgctctcaaaatatcatcctttacgtctcgcctacagcaaagccaggaacagtcatcgacaagtacaaagatgaaatctaagcctcgaggagtccgttcaattccaaacacgactgcgtcgctgctgtcgacgtcattcttcttcccgctcacgtcacgcttccaagccgcaatgagactctcatcactatcaagctcagctaacaaggtcatattccaaccttatctccttgcgctctacgtcaaaactctcacattactaatccacgctgctgggccctcgacacttgcgctacctcagatgacagccgagatatgggatctgctcctcgcagtacgaggacagtgtttggggtccaacaaagtgactcacgaaagcgagagcgacatggcgctaactcacgcagtactcatggcacacgctgcttttctcgatgtcaacgagaatgatgtgagaggactatgcgaaagacaaggacgcgaagttgttgagagcatggaatgggtcggccttgttttcaataacactcatggtggcgagggcgcaggcgaggagaatgatgttaagatgctggctgctggtatcttgattcgacttcgtgaggtcgtggataaatatcaagctgtattgatgggcaacttgattggttgatgaataccatcaacaactcatgaatagtaattcaacggccatttctaaacaagcttttcatatcgactcgtacccagcgtgtgttgagttgagatagtcaagtaacacaaacaataaattggtctccactcgacagccgtcaccctttttctgcgctctccgaaatcctggtcgtagccaagctcttatagaatcttcattcaagcccgcatgattctgttggcctattatggcgtaggcatccacgcagttcagagttgactccccgtactcagacgatggcaggtggttgcaatcgttgcctggaacttccaatatgcccatcgtgtcatcaagtcgtcttcgagagatatcatgattgagtagagggctattgctcagtgtatcatagttaacagggactgctttgtcggccgcatagggtaatagcttgtctacatcgggaacaactgaaagagatgggtcaatggtcagctctaagaactggccttgtagactcgtcgtagtttgaacgcctgtatgatactgagcctgcaagcggcttgacagatctgtcgatgtagcagagttggtattagaaattcgcaatccatcgtccactcttctatatccattgagctccgtagtcaaaagttcgatcttagcgagagcttcattgaggcgcccctgggtctccatcaatcgtccttcgagctctgagatgtgagttttgatcctctcgcgatggcgccgttggttattgcgttggcgaatcgcattgtggtctgccggccgagaagtgaaccgagttctaagaccgtctgagtgattctttgttaccatgttgtaattgctgtatagttactttttcggtgcctatcttgtatactcaggtcgcgtctgcttcgaacatttccgtacataagatagtcagatgtaggcttggtctaggacactcatacagaccgtggtggagaaagtgtcctaaacctgattcgtccacgggacaatgcacgag

SEQ ID NO: 9437 - DNA, 1281 bp, Muscodor strobelii
  misc_feature: SGI cDNA ID NO. 562949
  misc_feature: Encodes the peptide sequence at SEQ ID NO 9438
atggcttccatcaacgagactgcacgatggcagtacctcgatcggatgcggacaaacacaggaccgttcaaccaagatactgacactagcgatgaagcgcttgcgggactcggtcaggcaaagatcttagtgattggagctggcggtctaggttgcgagatacttaagaacttggctttatctgggttcaaggatattcatgtgattgatatggacacaatcgacatatcaaatctcaatcgccagttcttatttcgacatcacgatgtaggaaaacataaagccgaagttgcggctgcatttgtagagcacagagttgacggtatcaaaatcacacctcataactgtcgcatacaagatttcgatgaagatttttatatgcaattccaaatagttgtttgtggtctcgacagtattgaggctaggaggtggattaatgcaaccctggtcaatatggtcgacatggacaatcaagattccctcaagccattgatcgatggtggtactgaaggtttcaagggccagactcgtgtaatatttccgacattaacaccttgtattgagtgtcaattagacctctacacgcctcgggccgcagtgcccctttgcactttagccacgattcccagacagccagagcattgcatagaatgggctcacatcatagcttgggatcaagagaaaccattcccgaaccttgataaagacgatccagagcatatcacatggctttatcagaaagcgtcggcaagagctagtgaatttggcatctccggggttacatactccttgacccaaggtgttgtgaagaacatcatccccgccattgcgtcaaccaatgccatcattgctgccagttgttgcaatgaagccttgaaaattgctacaaccatcgctccagctcttggcttcgaggagagctacatgatgtactccggcgacgacagcatttatacgacgacattcaaatatgagaagaagccagattgcgctgtctgcggcgaggtatctaagccattgcgagtggacccggatatgacacttgaggaacttttggattcctttgcgcacaaggcagacctacagctcaagaagccatcgatccgggcagaggggaagactctttacatgcaattccccccaagcatcgaggagcagacacgggtgaatctgaacaagaagcttaaagcggatttgggcttggagatgggccacgagattgctgtcactgacccagcatttcccacgctgacattcagattcatacttggcttttcatga

SEQ ID NO: 9438 - protein, 426 aa, Muscodor strobelii
  misc_feature: SGI Peptide ID NO. 562949
  misc_feature (340)..(426): Pfam Id: PF08825 Pfam Desc: E2 binding domain
  misc_feature (38)..(179): Pfam Id: PF00899 Pfam Desc: ThiF family
  misc_feature (232)..(298): Pfam Id: PF02134 Pfam Desc: Repeat in ubiquitin-activating (UBA) protein
  misc_feature (5)..(425): NCBI GI: 116180932 Blast Desc: CHGG_01094 [Chaetomium globosum CBS 148.51] gi|88185391|gb|EAQ92859.1| CHGG_01094 [Chaetomium globosum CBS 148.51]
  misc_feature (5)..(426): NCBI GI: 171696330 Blast Desc: protein product [Podospora anserina] gi|170948407|emb|CAP60571.1| protein product [Podospora anserina]
  misc_feature (2)..(425): NCBI GI: 46105472 Blast Desc: FG00364.1 [Gibberella zeae PH-1]
  misc_feature (5)..(426): NCBI GI: 85119569 Blast Desc: NEDD8-activating enzyme E1 catalytic subunit [Neurospora crassa OR74A] gi|28927475|gb|EAA36427.1| NEDD8-activating enzyme E1 catalytic subunit [Neurospora crassa
  misc_feature (7)..(425): NCBI GI: 145605431 Blast Desc: MGG_09283 [Magnaporthe grisea 70-15] gi|145013259|gb|EDJ97900.1| MGG_09283 [Magnaporthe grisea 70-15]
  misc_feature (6)..(425): NCBI GI: 256735320 Blast Desc: [Nectria haematococca mpVI 77-13-4]
  misc_feature (8)..(426): NCBI GI: 154319502 Blast Desc: BC1G_02232 [Botryotinia fuckeliana B05.10] gi|150855890|gb|EDN31082.1| BC1G_02232 [Botryotinia fuckeliana B05.10]
  misc_feature (4)..(426): NCBI GI: 261356164 Blast Desc: NEDD8-activating enzyme E1 catalytic subunit [Verticillium albo-atrum VaMs.102]
  misc_feature (8)..(426): NCBI GI: 156061629 Blast Desc: SS1G_02960 [Sclerotinia sclerotiorum 1980] gi|154700361|gb|EDO00100.1| SS1G_02960 [Sclerotinia sclerotiorum 1980]
  misc_feature (8)..(426): NCBI GI: 189203919 Blast Desc: NEDD8-activating enzyme E1 catalytic subunit [Pyrenophora tritici-repentis Pt-1C-BFP] gi|187985394|gb|EDU50882.1| NEDD8-activating enzyme E1 catalytic
MASINETARWQYLDRMRTNTGPFNQDTDTSDEALAGLGQAKILVIGAGGLGCEILKNLALSGFKDIHVIDMDTIDISNLNRQFLFRHHDVGKHKAEVAAAFVEHRVDGIKITPHNCRIQDFDEDFYMQFQIVVCGLDSIEARRWINATLVNMVDMDNQDSLKPLIDGGTEGFKGQTRVIFPTLTPCIECQLDLYTPRAAVPLCTLATIPRQPEHCIEWAHIIAWDQEKPFPNLDKDDPEHITWLYQKASARASEFGISGVTYSLTQGVVKNIIPAIASTNAIIAASCCNEALKIATTIAPALGFEESYMMYSGDDSIYTTTFKYEKKPDCAVCGEVSKPLRVDPDMTLEELLDSFAHKADLQLKKPSIRAEGKTLYMQFPPSIEEQTRVNLNKKLKADLGLEMGHEIAVTDPAFPTLTFRFILGFS

SEQ ID NO: 9439 - DNA, 1893 bp, Muscodor strobelii
  misc_feature: SGI EST ID NO. CUFF.22363.0
  misc_feature: Variant of the nucleotide sequence at SEQ ID NO 9437
catgcagtcgatgataagacccggataagggaggtccctcactaaacgtgggcccaagtttcagtggtcattcctcccaattggcgacctagagtatgcccctccaatctcaccctacagggcacgacaccgttctactaataggttgcaacggtaaacccgctgtccctattgccatctcatcaactctcaagatcccccccggttttccagctgcgtcttacaccgtgactctctgctagtctctatttgagccttcagaaccatcttgatctctctgtcgctggttgacggcccaataagccaaatggcttccatcaacgagactgcacgatggcagtacctcgatcggatgcggacaaacacaggaccgttcaaccaagatactgacactagcgatgaagcgcttgcgggactcggtcaggcaaagatcttagtgattggagctggcggtctaggttgcgagatacttaagaacttggctttatctgggttcaaggatattcatgtgattgatatggacacaatcgacatatcaaatctcaatcgccagttcttatttcgacatcacgatgtaggaaaacataaagccgaagttgcggctgcatttgtagagcacagagttgacggtatcaaaatcacacctcataactgtcgcatacaagatttcgatgaagatttttatatgcaattccaaatagttgtttgtggtctcgacagtattgaggctaggaggtggattaatgcaaccctggtcaatatggtcgacatggacaatcaagattccctcaagccattgatcgatggtggtactgaaggtttcaagggccagactcgtgtaatatttccgacattaacaccttgtattgagtgtcaattagacctctacacgcctcgggccgcagtgcccctttgcactttagccacgattcccagacagccagagcattgcatagaatgggctcacatcatagcttgggatcaagagaaaccattcccgaaccttgataaagacgatccagagcatatcacatggctttatcagaaagcgtcggcaagagctagtgaatttggcatctccggggttacatactccttgacccaaggtgttgtgaagaacatcatccccgccattgcgtcaaccaatgccatcattgctgccagttgttgcaatgaagccttgaaaattgctacaaccatcgctccagctcttggcttcgaggagagctacatgatgtactccggcgacgacagcatttatacgacgacattcaaatatgagaagaagccagattgcgctgtctgcggcgaggtatctaagccattgcgagtggacccggatatgacacttgaggaacttttggattcctttgcgcacaaggcagacctacagctcaagaagccatcgatccgggcagaggggaagactctttacatgcaattccccccaagcatcgaggagcagacacgggtgaatctgaacaagaagcttaaagcggatttgggcttggagatgggccacgagattgctgtcactgacccagcatttcccacgctgacattcagattcatacttggcttttcatgattcatgaactagaccataagagtaccagaatcggcaccagtgtttccaaagattggaagttacacatgtacccatgttctatgataccatggacagcgacagctgacaatgcacaattgttcggtgcctcgacatgaggcaattggctatggcggcatcagaatgtactcatctaccataccaatgaacattgcggtttttaaccgaatgaaagatatccatgcgatctctatataataggatagtgaaatgtaatgtgatctatatgcttgatggttcaataggaaagaaacacggccgtgccc

SEQ ID NO: 9440 - DNA, 1665 bp, Muscodor strobelii
  misc_feature: SGI cDNA ID NO. 562950
  misc_feature: Encodes the peptide sequence at SEQ ID NO 9441
atgagttcttcgtacggaactcagggcatcgcccaaacccccgatcccgcactctcacaggcccgacaagatgccatccctcttgaatgcgctgtctgccccaagaagaatgcgaaattctcagatctctctcatcttctgacccacatcagctcaaagggacacctccacaacatgttccaattgagcctttctcgcgacatcgatgattcagccgcagaggccctgagaacatttgatgcctggttcgccaagcataagattggtgaattgcttcgcgcgcgcatgagtgccagagagcagagaggcacccagcaaggacgcagccagccggctcagcgcccaggcgagcctgcttctcgacgaggcggtgcaaagagacgccagaccggccgcgttggcagaggtagaggcaacaacagagccaaccgtcgacagaatgcagagttcgatggcatcaagcttgagtcagacgacgaatttgacgattatggagactatgagtccggcggaggctccacacgctttcgtgactatgtgtatgatgaggacgattcctccatgattgacccgttggaccaattcaacagcccctacccctccgatgacagtgctgagaacgttgacgacggcaccggcgtacttgtccttaaaggcgtcgtctatcctggaatggccggatttgactctgcaacgccagttgacagaaggatgagaaaccagaagaaggatcctgctgtgctcaagcgattggaagccggatctcgacttgtgtctacggtcgaggaggttctagatcgccatctccattttcaacgagctcgagacgtatacgatgagccttcgattgccggaagcgaggatgaggatgaccagattgacgaaggaaatcgtatcaagcgacgccgcagtaataccggcaagtcgaccgctacctctacaaagagacgaccgtataccgctcgactgcggccgatgccgatgcccgccaaaagggagcgcacgtccctacctaccaatcgagcatatcgtcgtgattctgttgcgagttttgttgcgagcccaccgcgctcgtcggctacgactcgggccatgacccgtcgagccacaaggtcctcgtccgaccgccgatcgcaactgcctcacacccacggtctgcacccgaagccacacggggctcgtggcgaggatcagatggatgatgaagctttcgaagccgaagctcacgggctatcgaccggtcgggtggaacggatggacttacgccagcatcgcgatcggctccccggactcgccttgcgaccaggcaatcccaattccggatttgtaacaccaacctctcacttgcgaaagtctccctcgcagtttccaggcaaggagaacaatcacttgctcatgaagtcgccgtcttcttcgtctaatccgtacctccatgcctctggggatctaattgaaaccagcaattacaaccctctctacgtacagcctcgtgatggacttgggtaccgtccatacacatcctacgacgacgaggtcaagacagcaacctcttctagcttccaaccaataaatatgaacactggatacgattctggacaggtgaatggtgtgtttgctgcgccataccatcgcaaccattctgctggcgatgactatggtatttga

SEQ ID NO: 9441 - protein, 554 aa, Muscodor strobelii
  misc_feature: SGI Peptide ID NO. 562950
  misc_feature (25)..(317): NCBI GI: 39959010 Blast Desc: MGG_09305 [Magnaporthe grisea 70-15] gi|145013235|gb|EDJ97876.1| MGG_09305 [Magnaporthe grisea 70-15]
  misc_feature (24)..(288): NCBI GI: 116180886 Blast Desc: CHGG_01071 [Chaetomium globosum CBS 148.51] gi|88185368|gb|EAQ92836.1| CHGG_01071 [Chaetomium globosum CBS 148.51]
  misc_feature (25)..(291): NCBI GI: 169601494 Blast Desc: SNOG_03614 [Phaeosphaeria nodorum SN15] gi|160705942|gb|EAT88819.2| SNOG_03614 [Phaeosphaeria nodorum SN15]
  misc_feature (24)..(287): NCBI GI: 171695926 Blast Desc: protein product [Podospora anserina] gi|170948205|emb|CAP60369.1| protein product [Podospora anserina]
  misc_feature (25)..(303): NCBI GI: 85116423 Blast Desc: NCU07508 [Neurospora crassa OR74A] gi|28926856|gb|EAA35819.1| [Neurospora crassa OR74A]
  misc_feature (26)..(277): NCBI GI: 189193807 Blast Desc: conserved [Pyrenophora tritici-repentis Pt-1C-BFP] gi|187978806|gb|EDU45432.1| conserved [Pyrenophora tritici-repentis Pt-1C-BFP]
  misc_feature (15)..(265): NCBI GI: 70987166 Blast Desc: AFUA_7G04470 [Aspergillus fumigatus Af293] gi|66846693|gb|EAL87025.1| AFUA_7G04470 [Aspergillus fumigatus Af293]
  misc_feature (15)..(265): NCBI GI: 159123166 Blast Desc: AFUB_090010 [Aspergillus fumigatus A1163]
  misc_feature (12)..(282): NCBI GI: 261356152 Blast Desc: [Verticillium albo-atrum VaMs.102]
  misc_feature (24)..(265): NCBI GI: 119482680 Blast Desc: NFIA_025440 [Neosartorya fischeri NRRL 181] gi|119409523|gb|EAW19471.1| NFIA_025440 [Neosartorya fischeri NRRL 181]
MSSSYGTQGIAQTPDPALSQARQDAIPLECAVCPKKNAKFSDLSHLLTHISSKGHLHNMFQLSLSRDIDDSAAEALRTFDAWFAKHKIGELLRARMSAREQRGTQQGRSQPAQRPGEPASRRGGAKRRQTGRVGRGRGNNRANRRQNAEFDGIKLESDDEFDDYGDYESGGGSTRFRDYVYDEDDSSMIDPLDQFNSPYPSDDSAENVDDGTGVLVLKGVVYPGMAGFDSATPVDRRMRNQKKDPAVLKRLEAGSRLVSTVEEVLDRHLHFQRARDVYDEPSIAGSEDEDDQIDEGNRIKRRRSNTGKSTATSTKRRPYTARLRPMPMPAKRERTSLPTNRAYRRDSVASFVASPPRSSATTRAMTRRATRSSSDRRSQLPHTHGLHPKPHGARGEDQMDDEAFEAEAHGLSTGRVERMDLRQHRDRLPGLALRPGNPNSGFVTPTSHLRKSPSQFPGKENNHLLMKSPSSSSNPYLHASGDLIETSNYNPLYVQPRDGLGYRPYTSYDDEVKTATSSSFQPINMNTGYDSGQVNGVFAAPYHRNHSAGDDYGI

SEQ ID NO: 9442 - DNA, 198 bp, Muscodor strobelii
  misc_feature: SGI EST ID NO. CUFF.22372.0
  misc_feature: Variant of the nucleotide sequence at SEQ ID NO 9440
gcgaggatcagatggatgatgaaggtgggcagcacttgttgcgaacccccttccatgcattctgtctgactgccgtccagctttcgaagccgaagctcacgggctatcgaccggtcgggtggaacggatggacttacgccagcatcgcgatcggctccccggactcgccttgcgaccaggcaatcccaattccggatt

SEQ ID NO: 9443 - DNA, 3357 bp, Muscodor strobelii
  misc_feature: SGI cDNA ID NO. 562951
  misc_feature: Encodes the peptide sequence at SEQ ID NO 9444
atggctgggccggccaaagccaagaagcagcagtcgctgactagcttcttcacctcgagtgcccgcgtcgacagctcgccggaagtcccacgcaaacgaccgctcgaggaagatgccgacaatggaaatacgactcccttgagtaagaaatccaaagccgacatccccgacactcccgtagatcaagacgccacccacgattcgagcccattgaaggccaccaccaaccctcctcttaccaacccacactccagcaagccgggcgagcgaacggaacgctacctttacgatgggtcgagtccccgccgcagccaacctaccgctgcagcagacccggaccgtgacgatgatgtggatagcatacaagagaggaagagaaaggaagagctgcatcggaagttcgtgcagaagctcggccggcctgacagcatggcccagatcaagcgacgcaactaccagatcgacgaagagactcagggcctgaacaacgaggaaggagaagaagacgaggaagaggaagagacgccgaagccggcaaaagcaaagaaaaagggggcaaagactgggaagttgacccccatggagattcaattcctcgacatcaagagaaaccacatggataccctcttgattgtcgaagtcggctacaagttcaagttctttggcgaggacgcccgcatcgccgcaaaggagctcagcatagtctgtatcccgggcaagttccgatacgacgagcacccatccgaagcacatctcgatcgattcgcctctgccagcatccccgtacatcggctgcctgtacatgcaaagcgcctcgttgctgcaggccacaaagttggtgtcgtgcgacaaattgagactgccgctctgaagaaagtcggcgacaacaggaatgctcctttcacaagaaagctcaccaacgtctatactaaaggcacatacatcgatgaaattggtgaacttgaccagcaacccgatgcttctaccccatctggtggctatctactttgcatcacagagacaaaggctaaaggatggggcaccgatgagcgagtcgatatcggcatcattgctgttcagccggctacgggtgatatcatatacgataacttcgaggatgggtttatgcgaagcgaaattgaaacgagactgttgcatatctcgccttgcgagtttctcatcgttggcgaactatccaaagctagtgacaaactcatcgagcatttgtctggcagctctacaaatgtcttcggcgacaagagtcgtgtggaacgagttgataaatccaagaccattgctgctgaggcgtactcacatgtcgcccaattttactcaaataagctgaaagaaaacgagggaaacgagaaggccagcgctcttctagaaaaagttctgaaattgccggaagctgtcacgatctgtctctcttcgatgatcaaccatctcaaagagtatgggctcgagcacatattcgacctcacaaaatacttccaatcattcagtgcccgccagcacatgcttatcaacggcacgacgttggagagcttggaagtctaccgtaactcgacagatcatgccgagaaaggcagtctcttttgggcactagacaagactctgacacgctttggtcaaaggcttcttcgcaagtgggtcggtcgtcctcttcttgacaaagaacagctcgaagagagagtagctgctgtcgaagagttacttgttaaagcttcaacggttcatgttgaccagttggaacgtctgttgaagaacactaggacggacctggagcgtagtcttatccgcatctactacggcaaatgctcacgacctgagctcttggctgtactccagacacttcagaagattgccactgaatatagtcgcgtcaaggacaattccgacactggcttcaaatctgcagccatcagcaacgctatcgaatcgctcccgcagattctacccaccattctgtcatatcttgagcgcatcaatgccgaggccgcgcggaaggacgataaatatgcgttcttcagggagacagaagagacggaagacatcacagatcataaactgggaatcgcctcggtcgagcaagagctcgatgcccaccgcaaggtagccgcttcaaagctcaataagaaatctcctgtcacctacatgacagtcgccggcatcgaatacctgatagaagtatccaataccgaactgaagcacgttccagcatcatggatgaaaataagcggcacgaagaagctctcccgtttccacacaccagaagtagtacgtctcatctcagagagagaccaacacaaagaggccctctcagcagcctgcgacgttgcattctcctctctcctccagtccatagcatcagagtaccaacccctccgagacgccgtctcatccctcgcaaccctcgactgtcttctctcgctctccaaagtcgccgccctaccaggctacacgaagccaaacttcctccccgtcaacacaccccctaccatctccatagaatccggtcgacacccaatcgccgagcaaaccctcacaacatcctacatccccttcacaacgaccctctcctccccctcccccttagcccacctaataaccggcccaaacatgggcggcaaatcctccttcgtccgcgccgtagccctcctcgtcctgctcgcccaaatcggctccttcgtccccgccgattccttatccctaaccctctctgacgcgatccacacccgcatgggcgcacgcgacaacctcttccgcggcgaaagcacattcatggtcgaagtctccgaaacagcacgcatcctccgctccgccaccccacgctccctcgtcatcctcgacgagctggggagaggcacgagtacctacgacggcgccgccatcgcgcaggcagtcctgcagcacgtcgtcgaggagacgcgctgcctcaccctgttcatcacgcactaccagagcctcggccgcgtcgccgacgggctcgcggggaaatgcacaaatgtccacatgcgcttcacggccacgaagagagattcgcatggcaaacagaaaatggtaaccgaagatgcagatgatcaagcagatgaggatgacacggtgagcggcgacgaagaaatcactttcttatacgaagtgggtgagggcatggcgcataggtcttatggactcaacgtagctcggttggcacgtattccgcgtagagttcttgacgtcgcaggccgcaaatcacgtgaaatggaagaggacatgaaaaggcggaggctaggtggtgctacgcggcttttggcagatgttctgacgggaggacaggatcagttagatcatcttgtatcgagcatcgagcagctgtaa

SEQ ID NO: 9444 - protein, 1118 aa, Muscodor strobelii
  misc_feature: SGI Peptide ID NO. 562951
  misc_feature (192)..(318): Pfam Id: PF01624 Pfam Desc: MutS domain I
  misc_feature (503)..(817): Pfam Id: PF05192 Pfam Desc: MutS domain III
  misc_feature (820)..(1084): Pfam Id: PF00488 Pfam Desc: MutS domain V
  misc_feature (503)..(623): Pfam Id: PF05192 Pfam Desc: MutS domain III
  misc_feature (8)..(1118): NCBI GI: 46125469 Blast Desc: FG07112.1 [Gibberella zeae PH-1]
  misc_feature (1)..(1118): NCBI GI: 116180884 Blast Desc: CHGG_01070 [Chaetomium globosum CBS 148.51] gi|121791328|sp|Q2HFD4.1|MSH3_CHAGB RecName: Full=DNA mismatch repair protein MSH3; AltName: Full=MutS protein homolog 3 CBS
  misc_feature (1)..(1118): NCBI GI: 171687199 Blast Desc: protein product [Podospora anserina] gi|170943561|emb|CAP69213.1| protein product [Podospora anserina]
  misc_feature (1)..(1118): NCBI GI: 85111307 Blast Desc: NCU08115 [Neurospora crassa OR74A] gi|74662732|sp|Q7SD11.1|MSH3_NEUCR RecName: Full=DNA mismatch repair protein msh-3; AltName: Full=MutS protein homolog 3 crassa
  misc_feature (1)..(1118): NCBI GI: 39959070 Blast Desc: MGG_09306 [Magnaporthe grisea 70-15] gi|190359846|sp|A4R0R0.1|MSH3_MAGGR RecName: Full=DNA mismatch repair protein MSH3; AltName: Full=MutS protein homolog 3 grisea
  misc_feature (32)..(1118): NCBI GI: 190359866 Blast Desc: MGG_09306 [Magnaporthe grisea 70-15] gi|190359846|sp|A4R0R0.1|MSH3_MAGGR RecName: Full=DNA mismatch repair protein MSH3; AltName: Full=MutS protein homolog 3 grisea
  misc_feature (32)..(1118): NCBI GI: 156061525 Blast Desc: SS1G_02907 [Sclerotinia sclerotiorum 1980] gi|190359849|sp|A7EC69.1|MSH3_SCLS1 RecName: Full=DNA mismatch repair protein msh3; AltName: Full=MutS protein homolog 3 1980]
  misc_feature (32)..(1062): NCBI GI: 154319616 Blast Desc: BC1G_02289 [Botryotinia fuckeliana B05.10] gi|150855947|gb|EDN31139.1| BC1G_02289 [Botryotinia fuckeliana B05.10]
  misc_feature (2)..(1118): NCBI GI: 190359868 Blast Desc: BC1G_02289 [Botryotinia fuckeliana B05.10] gi|150855947|gb|EDN31139.1| BC1G_02289 [Botryotinia fuckeliana B05.10]
  misc_feature (9)..(1118): NCBI GI: 190359894 Blast Desc: BC1G_02289 [Botryotinia fuckeliana B05.10] gi|150855947|gb|EDN31139.1| BC1G_02289 [Botryotinia fuckeliana B05.10]
MAGPAKAKKQQSLTSFFTSSARVDSSPEVPRKRPLEEDADNGNTTPLSKKSKADIPDTPVDQDATHDSSPLKATTNPPLTNPHSSKPGERTERYLYDGSSPRRSQPTAAADPDRDDDVDSIQERKRKEELHRKFVQKLGRPDSMAQIKRRNYQIDEETQGLNNEEGEEDEEEEETPKPAKAKKKGAKTGKLTPMEIQFLDIKRNHMDTLLIVEVGYKFKFFGEDARIAAKELSIVCIPGKFRYDEHPSEAHLDRFASASIPVHRLPVHAKRLVAAGHKVGVVRQIETAALKKVGDNRNAPFTRKLTNVYTKGTYIDEIGELDQQPDASTPSGGYLLCITETKAKGWGTDERVDIGIIAVQPATGDIIYDNFEDGFMRSEIETRLLHISPCEFLIVGELSKASDKLIEHLSGSSTNVFGDKSRVERVDKSKTIAAEAYSHVAQFYSNKLKENEGNEKASALLEKVLKLPEAVTICLSSMINHLKEYGLEHIFDLTKYFQSFSARQHMLINGTTLESLEVYRNSTDHAEKGSLFWALDKTLTRFGQRLLRKWVGRPLLDKEQLEERVAAVEELLVKASTVHVDQLERLLKNTRTDLERSLIRIYYGKCSRPELLAVLQTLQKIATEYSRVKDNSDTGFKSAAISNAIESLPQILPTILSYLERINAEAARKDDKYAFFRETEETEDITDHKLGIASVEQELDAHRKVAASKLNKKSPVTYMTVAGIEYLIEVSNTELKHVPASWMKISGTKKLSRFHTPEVVRLISERDQHKEALSAACDVAFSSLLQSIASEYQPLRDAVSSLATLDCLLSLSKVAALPGYTKPNFLPVNTPPTISIESGRHPIAEQTLTTSYIPFTTTLSSPSPLAHLITGPNMGGKSSFVRAVALLVLLAQIGSFVPADSLSLTLSDAIHTRMGARDNLFRGESTFMVEVSETARILRSATPRSLVILDELGRGTSTYDGAAIAQAVLQHVVEETRCLTLFITHYQSLGRVADGLAGKCTNVHMRFTATKRDSHGKQKMVTEDADDQADEDDTVSGDEEITFLYEVGEGMAHRSYGLNVARLARIPRRVLDVAGRKSREMEEDMKRRRLGGATRLLADVLTGGQDQLDHLVSSIEQL

SEQ ID NO: 9445 - DNA, 3985 bp, Muscodor strobelii
  misc_feature: SGI EST ID NO. CUFF.22378.0
  misc_feature: Variant of the nucleotide sequence at SEQ ID NO 9443
gtgaaatgacccatccatcgcatggcagcatacacgatatgagggagtggtagaaagtgacaagacaacgattgtgactttgcaggatggctgggccggccaaagccaagaagcagcagtcgctgactagcttcttcacctcgagtgcccgcgtcgacagctcgccggaagtcccacgcaaacgaccgctcgaggaagatgccgacaatggaaatacgactcccttgagtaagaaatccaaagccgacatccccgacactcccgtagatcaagacgccacccacgattcgagcccattgaaggccaccaccaaccctcctcttaccaacccacactccagcaagccgggcgagcgaacggaacgctacctttacgatgggtcgagtccccgccgcagccaacctaccgctgcagcagacccggaccgtgacgatgatgtggatagcatacaagagaggaagagaaaggaagagctgcatcggaagttcgtgcagaagctcggccggcctgacagcatggcccagatcaagcgacgcaactaccagatcgacgaagagactcagggcctgaacaacgaggaaggagaagaagacgaggaagaggaagagacgccgaagccggcaaaagcaaagaaaaagggggcaaagactgggaagttgacccccatggagattcaattcctcgacatcaagagaaaccacatggataccctcttgattgtcgaagtcggctacaagttcaagttctttggcgaggacgcccgcatcgccgcaaaggagctcagcatagtctgtatcccgggcaagttccgatacgacgagcacccatccgaagcacatctcgatcgattcgcctctgccagcatccccgtacatcggctgcctgtacatgcaaagcgcctcgttgctgcaggccacaaagttggtgtcgtgcgacaaattgagactgccgctctgaagaaagtcggcgacaacaggaatgctcctttcacaagaaagctcaccaacgtctatactaaaggcacatacatcgatgaaattggtgaacttgaccagcaacccgatgcttctaccccatctggtggctatctactttgcatcacagagacaaaggctaaaggatggggcaccgatgagcgagtcgatatcggcatcattgctgttcagccggctacgggtgatatcatatacgataacttcgaggatgggtttatgcgaagcgaaattgaaacgagactgttgcatatctcgccttgcgagtttctcatcgttggcgaactatccaaagctagtgacaaactcatcgagcatttgtctggcagctctacaaatgtcttcggcgacaagagtcgtgtggaacgagttgataaatccaagaccattgctgctgaggcgtactcacatgtcgcccaattttactcaaataagctgaaagaaaacgagggaaacgagaaggccagcgctcttctagaaaaagttctgaaattgccggaagctgtcacgatctgtctctcttcgatgatcaaccatctcaaagagtatgggctcgagcacatattcgacctcacaaaatacttccaatcattcagtgcccgccagcacatgcttatcaacggcacgacgttggagagcttggaagtctaccgtaactcgacagatcatgccgagaaaggcagtctcttttgggcactagacaagactctgacacgctttggtcaaaggcttcttcgcaagtgggtcggtcgtcctcttcttgacaaagaacagctcgaagagagagtagctgctgtcgaagagttacttgttaaagcttcaacggttcatgttgaccagttggaacgtctgttgaagaacactaggacggacctggagcgtagtcttatccgcatctactacggcaaatgctcacgacctgagctcttggctgtactccagacacttcagaagattgccactgaatatagtcgcgtcaaggacaattccgacactggcttcaaatctgcagccatcagcaacgctatcgaatcgctcccgcagattctacccaccattctgtcatatcttgagcgcatcaatgccgaggccgcgcggaaggacgataaatatgcgttcttcagggagacagaagagacggaagacatcacagatcataaactgggaatcgcctcggtcgagcaagagctcgatgcccaccgcaaggtagccgcttcaaagctcaataagaaatctcctgtcacctacatgacagtcgccggcatcgaatacctgatagaagtatccaataccgaactgaagcacgttccagcatcatggatgaaaataagcggcacgaagaagctctcccgtttccacacaccagaagtagtacgtctcatctcagagagagaccaacacaaagaggccctctcagcagcctgcgacgttgcattctcctctctcctccagtccatagcatcagagtaccaacccctccgagacgccgtctcatccctcgcaaccctcgactgtcttctctcgctctccaaagtcgccgccctaccaggctacacgaagccaaacttcctccccgtcaacacaccccctaccatctccatagaatccggtcgacacccaatcgccgagcaaaccctcacaacatcctacatccccttcacaacgaccctctcctccccctcccccttagcccacctaataaccggcccaaacatgggcggcaaatcctccttcgtccgcgccgtagccctcctcgtcctgctcgcccaaatcggctccttcgtccccgccgattccttatccctaaccctctctgacgcgatccacacccgcatgggcgcacgcgacaacctcttccgcggcgaaagcacattcatggtcgaagtctccgaaacagcacgcatcctccgctccgccaccccacgctccctcgtcatcctcgacgagctggggagaggcacgagtacctacgacggcgccgccatcgcgcaggcagtcctgcagcacgtcgtcgaggagacgcgctgcctcaccctgttcatcacgcactaccagagcctcggccgcgtcgccgacgggctcgcggggaaatgcacaaatgtccacatgcgcttcacggccacgaagagagattcgcatggcaaacagaaaatggtaaccgaagatgcagatgatcaagcagatgaggatgacacggtgagcggcgacgaagaaatcactttcttatacgaagtgggtgagggcatggcgcataggtcttatggactcaacgtagctcggttggcacgtattccgcgtagagttcttgacgtcgcaggccgcaaatcacgtgaaatggaagaggacatgaaaaggcggaggctaggtggtgctacgcggcttttggcagatgttctgacgggaggacaggatcagttagatcatcttgtatcgagcatcgagcagctgtaatacattagcctctaatagatgggcacactaatttacaacatcagaccaaatcacacaagtcacattgatgagatgaagggagcatggtaaacttccgtgttgctgtttgctatctgatctatacatattcgcagactgcatggagttttggagatgactgtgtctcaaacccccttgtgcagatgcgtaaatgatggattgcagttgacgatatcaaatcgagcaagatattaggaaagtaggagaacaatgtccagcctcactcattctggttataccatgatcaaatcggaatttccctgttgaatgtagcccaatcactgaaccggccacctaatcggccactcatcgaccactcatcggacgtctcttatcgcgatccgaaatcgacttgaacacgtgacgattatgagatattgagcgtagggtcgatgcggaaacgttcagtgttgcctcagcttcgggtgcactgagaggtggtcaggaaccatcaggaaccaaaagcatgaagtaaatttactcatgctctggaccaggttgtg

SEQ ID NO: 9446 - DNA, 1311 bp, Muscodor strobelii
  misc_feature: SGI cDNA ID NO. 562952
  misc_feature: Encodes the peptide sequence at SEQ ID NO 9447
atgagcacgaagcttgatggccgccctcgcttcgaggctgctacgaaagtagacgcggctcctctgggggcgccccttgatttcccattctccaagagatctgcgcctaatcgattcctcaacgctgctatgtctgagagattggccagctacgacaaagatgatgtgaccaagagtgggatcccgtcaaaagagctcatcagagtttatgagcgctggggtcaaggcggctggggtcaggttcttaccggcaacgtccagattcacccacatcacctagaggcagagggcaacgccattattccatccgatgcccctttcagtggaccccgattcgaggccttcagcgagttagcaacaaaagcgaaggcaaatggtagtttgattgtcgctcaagtctcgcatccgggaagacaggtgccggatacgatccagaagcatcccatcagcgccagtgctgttcccatgtcgaagagcaccatggtgccaatgaacttcgcgacccctcgcgcagctacccgcgaggatatcgattcagtcattgaaggtttcgcacacgctgccgaatacttggagaagactggtttcgacggaatagaattgcatggtgcacacggctatcttattgcccagttcctcagtcccacgacgaatcacagaacggatgaatacggtggcagcttggaaaaccgaatgagactcgtcttggaggtcgctgccgcagtcaagaagcgagtcagcagcagtttcatactgggtatcaaagtcaacagtgttgagttccaagacaagggtttcacatcggaagaggccgtcctcttatgtcaagcacttgagaaagcagagtttgactatgttgagacgagcggcggcacctatgaatcgagtggtttcaaacatgctaaagagagcacaataaagcgcgagaactttttcatcgagtgggctgcccagattgcaagcgcgctcaccaagactaaggtctataccaccggtggattccgaaccgtcgccgccatgttagacacactcaaagaggtggatggagttggtatcggacgggctgctacccaggaacccgatctggttaatgcgatattgaaagagggcgcgcagggcatcttgaagttctcgctgcctgaagaacaattcctaccgagactcatgttatctgcctatcagatcggtcagattgggagaggtgaagaaatcaccgatgggtcgagccacgaggcaacacaggaggctcttgcgaagatcatgggagcacatgctgctgccgctgcacctcagggtacagttgctgcttaa

SEQ ID NO: 9447 - protein, 436 aa, Muscodor strobelii
  misc_feature: SGI Peptide ID NO. 562952
  misc_feature (21)..(373): Pfam Id: PF00724 Pfam Desc: NADH:flavin oxidoreductase / NADH oxidase family
  misc_feature (113)..(282): Pfam Id: PF00724 Pfam Desc: NADH:flavin oxidoreductase / NADH oxidase family
  misc_feature (9)..(409): NCBI GI: 39943624 Blast Desc: MGG_03823 [Magnaporthe grisea 70-15] gi|145014510|gb|EDJ99078.1| MGG_03823 [Magnaporthe grisea 70-15]
  misc_feature (10)..(425): NCBI GI: 189195914 Blast Desc: NADH oxidase [Pyrenophora tritici-repentis Pt-1C-BFP] gi|187980174|gb|EDU46800.1| NADH oxidase [Pyrenophora tritici-repentis Pt-1C-BFP]
  misc_feature (10)..(427): NCBI GI: 156066097 Blast Desc: SS1G_01060 [Sclerotinia sclerotiorum 1980] gi|154691918|gb|EDN91656.1| SS1G_01060 [Sclerotinia sclerotiorum 1980]
  misc_feature (9)..(411): NCBI GI: 169626359 Blast Desc: SNOG_16466 [Phaeosphaeria nodorum SN15] gi|111055044|gb|EAT76164.1| SNOG_16466 [Phaeosphaeria nodorum SN15]
  misc_feature (10)..(429): NCBI GI: 154294266 Blast Desc: BC1G_13819 [Botryotinia fuckeliana B05.10] gi|150844829|gb|EDN20022.1| BC1G_13819 [Botryotinia fuckeliana B05.10]
  misc_feature (9)..(419): NCBI GI: 256723064 Blast Desc: NECHADRAFT_69841 [Nectria haematococca mpVI 77-13-4]
  misc_feature (9)..(411): NCBI GI: 46115736 Blast Desc: FG03710.1 [Gibberella zeae PH-1]
  misc_feature (9)..(408): NCBI GI: 121701545 Blast Desc: NADH oxidase [Aspergillus clavatus NRRL 1] gi|119397180|gb|EAW07611.1| NADH oxidase [Aspergillus clavatus NRRL 1]
  misc_feature (10)..(422): NCBI GI: 119495510 Blast Desc: NADH oxidase [Neosartorya fischeri NRRL 181] gi|119412700|gb|EAW22641.1| NADH oxidase [Neosartorya fischeri NRRL 181]
  misc_feature (10)..(422): NCBI GI: 70995668 Blast Desc: NADH oxidase [Aspergillus fumigatus Af293] gi|19309402|emb|CAD27301.1| NADH oxidase [Aspergillus fumigatus] gi|41581299|emb|CAE47948.1| NADH oxidase, [Aspergillus fumigatus]
  misc_feature (22)..(295): SWISSPROT Homolog: EC 1.3.1.34 2,4-dienoyl-CoA reductase (NADPH)
MSTKLDGRPRFEAATKVDAAPLGAPLDFPFSKRSAPNRFLNAAMSERLASYDKDDVTKSGIPSKELIRVYERWGQGGWGQVLTGNVQIHPHHLEAEGNAIIPSDAPFSGPRFEAFSELATKAKANGSLIVAQVSHPGRQVPDTIQKHPISASAVPMSKSTMVPMNFATPRAATREDIDSVIEGFAHAAEYLEKTGFDGIELHGAHGYLIAQFLSPTTNHRTDEYGGSLENRMRLVLEVAAAVKKRVSSSFILGIKVNSVEFQDKGFTSEEAVLLCQALEKAEFDYVETSGGTYESSGFKHAKESTIKRENFFIEWAAQIASALTKTKVYTTGGFRTVAAMLDTLKEVDGVGIGRAATQEPDLVNAILKEGAQGILKFSLPEEQFLPRLMLSAYQIGQIGRGEEITDGSSHEATQEALAKIMGAHAAAAAPQGTVAA

SEQ ID NO: 9448 - DNA, 4027 bp, Muscodor strobelii
  misc_feature: SGI EST ID NO. CUFF.22387.0
  misc_feature: Variant of the nucleotide sequence at SEQ ID NO 9446
ttccaattggagatcaacatgaatgtctcttacgttatgtgtttccgcatgccactcatccttcactgcacatatgtgccgttggacttgtgaacgcctgcggactgattgcggggtgcaacatattaggccatttcatttcagttcagttcagttccaagaggacacgataggctcgagacttgcgtactgaaacgaaatagttgagacgggttcagttctttgtttggaatttgccgctgcccggaatgccttatgataattcaatctctagattttgtcgtcaatatttacaattagaaaatcatttagactacccgccagacgccctgctcaaacttgacgagattcagtcccttctctaccgtgacctcttcgccgaccactcacatcctccaccggagagataccagctcaaggttttgaaggaacttgtcggcaagatcgagcagagcatcgatgattgggatcagtatgtacgacacgaccggtgcactcactaatagttatccaagcgactagggttcatcccggaatgcgattgctttcctggccctgttgctctgagcatctctgcattcacccgtggagttctgacctcattctcagggggtgtccgacgacatgatgacatcgctatcagatctctttctcgtgaaactaccacccgagaccatcacgaaccagcaaaaatcatacgtgacctacacgccgtcgctcctcgttgatactactctgagctcgtgtcatagcgaacctcacgtcactttgcttgagcatcgtaacattctctcagcttctggcactacgggcctgcgcacctgggatgctgctcttcatcttggtaattatctgtgtacgcattcgcatctcatccgagggaagagggtaatggaactcggagccggcccgggctacgtatccatactctgcgctaagctacttggtgctgctcatgttatcgcctccgacggttcaaaggatgtcgtggctggccttctagaaaatctctatcttaacggattgcaagactctgatcaagtgaggccactagattaccaatggggtcatgcgcttgttggaactgaagagaatgaatggaacggtggcaatctagtcgacgtgattctcggcgctgacgtgacttatgacccatctattattccgccgctcatcagcaccctgcaggagctcaaggatctcttcccaggcgccatgacactcattgcagctactgaaagaaaccgagatacttttgaaaagttcattcgagaatgccaacgcttcaattttaacgttggcgagcttcactttcccttgcttccgcgagaaggtcaaaatggcccgtttttcgacgacaatctccctattaggatatgtaaaataactcgaagttagtcacgatacaataccatacgcagttatgctgctttatagcctgagcctcgaactaggttatctgttacctgccgagaattcgaaggtcatgtcaacacatcgagcggatagatgcaaaggggcttgtgtcaaagttttcactgaagccgggtttgaatattgagctacaatagtcaagggaggggaaatcgagttggctgaagtaatatcggacttatgattgcaactaaatgccttctcattcgaccccattggatttctaatgatgtcgagtcaagagcatttgaatgctatttgatgacgcgggcatagtgggttcttttatgttttcttccgcgcagccgcggcattgactctggaaatcggctggagatgtttcagtttttgtagcttagtaatgctaactccttgtcctagaattccctgatgatccttgtgctggtgtgcctacactaccgttctgtagcggaacctgggcggtgcaaggacgtttgacaaggcgggatccgacctgcagcggcattcaatgttgggaattttcctagtccctgttgcatatcccatctatttgatattctacttgtgctgtctcccgcacaaattgggctatccttgtcgtttccgccgaggtctcagtgttcgatcttgataatccaagcgcggatcggccgattactcggggtgacattgggccacgccttgtccacggaactccaaatgtggatacctcaccaatgccagcccacctggtgagcttagtcggcagaatagtccacttacatatctaatcattctcccggatttgggcctggccctgatgatagcatataggctacctgctcggatttcgcgtgtgtttccgtgaatagggtagtatcaaacttgaaacagcaactgactagaatgatcttgatgatttaggaaactgttccgagtcagccaatgacatagcaacgcaaaaacgtctgcaaagtggactgacgcgatatgaggtggaatcagttatataaagatgggctcgccgtagctctttggtgatattgtcgtgcccatcacaagctagccaactgcctactttgtatccacagtgatatcctacaatcgcgatcccgattatacatctcttcatcatactattcgacaatcatgagcacgaagcttgatggccgccctcgcttcgaggctgctacgaaagtagacgcggctcctctgggggcgccccttgatttcccattctccaagagatctgcgcctaatcgattcctcaacgctgctatgtctgagagattggccagctacgacaaagatgatgtgaccaagagtgggatcccgtcaaaagagctcatcagagtttatgagcgctggggtcaaggcggctggggtcaggttcttaccggcaacgtccagattcacccacatcacctagaggcagagggcaacgccattattccatccgatgcccctttcagtggaccccgattcgaggccttcagcgagttagcaacaaaagcgaaggcaaatggtagtttgattgtcgctcaagtctcgcatccgggaagacaggtgccggatacgatccagaagcatcccatcagcgccagtgctgttcccatgtcgaagagcaccatggtgccaatgaacttcgcgacccctcgcgcagctacccgcgaggatatcgattcagtcattgaaggtttcgcacacgctgccgaatacttggagaagactggtttcgacggaatagaattgcatggtgcacacggctatcttattgcccagttcctcagtcccacgacgaatcacagaacggatgaatacggtggcagcttggaaaaccgaatgagactcgtcttggaggtcgctgccgcagtcaagaagcgagtcagcagcagtttcatactgggtatcaaagtcaacagtgttgagttccaagacaagggtttcacatcggaagaggccgtcctcttatgtcaagcacttgagaaagcagagtttgactatgttgagacgagcggcggcacctatgaatcgagtggtttcaaacatgctaaagagagcacaataaagcgcgagaactttttcatcgagtgggctgcccagattgcaagcgcgctcaccaagactaaggtctataccaccggtggattccgaaccgtcgccgccatgttagacacactcaaagaggtggatggagttggtatcggacgggctgctacccaggaacccgatctggttaatgcgatattgaaagagggcgcgcagggcatcttgaagttctcgctgcctgaagaacaattcctaccgagactcatgttatctgcctatcagatcggtcagattgggagaggtgaagaaatcaccgatgggtcgagccacgaggcaacacaggaggctcttgcgaagatcatgggagcacatgctgctgccgctgcacctcagggtacagttgctgcttaagctacctgccgggctgggaaaagactattgctttagtcaaatccgttagtggatcagaggattcgcaatattcaccgcggcatagaacgcagtgtcttgtcacgatggataccatagactaggtagatagcggaactgtgattactgaccatatctctatgattgtccctcg

SEQ ID NO: 9449 - DNA, 1017 bp, Muscodor strobelii
  misc_feature: SGI cDNA ID NO. 562953
  misc_feature: Encodes the peptide sequence at SEQ ID NO 9450
atgccttatgataattcaatctctagattttgtcgtcaatatttacaattagaaaatcatttagactacccgccagacgccctgctcaaacttgacgagattcagtcccttctctaccgtgacctcttcgccgaccactcacatcctccaccggagagataccagctcaaggttttgaaggaacttgtcggcaagatcgagcagagcatcgatgattgggatcagtatggggtgtccgacgacatgatgacatcgctatcagatctctttctcgtgaaactaccacccgagaccatcacgaaccagcaaaaatcatacgtgacctacacgccgtcgctcctcgttgatactactctgagctcgtgtcatagcgaacctcacgtcactttgcttgagcatcgtaacattctctcagcttctggcactacgggcctgcgcacctgggatgctgctcttcatcttggtaattatctgtgtacgcattcgcatctcatccgagggaagagggtaatggaactcggagccggcccgggctacgtatccatactctgcgctaagctacttggtgctgctcatgttatcgcctccgacggttcaaaggatgtcgtggctggccttctagaaaatctctatcttaacggattgcaagactctgatcaagtgaggccactagattaccaatggggtcatgcgcttgttggaactgaagagaatgaatggaacggtggcaatctagtcgacgtgattctcggcgctgacgtgacttatgacccatctattattccgccgctcatcagcaccctgcaggagctcaaggatctcttcccaggcgccatgacactcattgcagctactgaaagaaaccgagatacttttgaaaagttcattcgagaatgccaacgcttcaattttaacgttggcgagcttcactttcccttgcttccgcgagaaggtcaaaatggcccgtttttcgacgacaatctccctattaggatatgtaaaataactcgaagttag

SEQ ID NO: 9450 - protein, 338 aa, Muscodor strobelii
  misc_feature: SGI Peptide ID NO. 562953
  misc_feature (7)..(337): NCBI GI: 256729330 Blast Desc: NECHADRAFT_95830 [Nectria haematococca mpVI 77-13-4]
  misc_feature (7)..(338): NCBI GI: 261353599 Blast Desc: FAM86A [Verticillium albo-atrum VaMs.102]
  misc_feature (7)..(337): NCBI GI: 28950234 Blast Desc: conserved [Neurospora crassa]
  misc_feature (7)..(336): NCBI GI: 171676525 Blast Desc: protein product [Podospora anserina] gi|170936329|emb|CAP60987.1| protein product [Podospora anserina]
  misc_feature (2)..(338): NCBI GI: 46117270 Blast Desc: FG04477.1 [Gibberella zeae PH-1]
  misc_feature (5)..(337): NCBI GI: 39971327 Blast Desc: MGG_10684 [Magnaporthe grisea 70-15] gi|145012223|gb|EDJ96879.1| MGG_10684 [Magnaporthe grisea 70-15]
  misc_feature (7)..(334): NCBI GI: 164424344 Blast Desc: NCU07181 [Neurospora crassa OR74A] gi|157070474|gb|EAA28170.2| conserved [Neurospora crassa OR74A]
  misc_feature (12)..(337): NCBI GI: 189209580 Blast Desc: conserved [Pyrenophora tritici-repentis Pt-1C-BFP] gi|187977215|gb|EDU43841.1| conserved [Pyrenophora tritici-repentis Pt-1C-BFP]
  misc_feature (4)..(324): NCBI GI: 156065879 Blast Desc: SS1G_00950 [Sclerotinia sclerotiorum 1980] gi|154691809|gb|EDN91547.1| SS1G_00950 [Sclerotinia sclerotiorum 1980]
  misc_feature (4)..(289): NCBI GI: 154301721 Blast Desc: BC1G_10012 [Botryotinia fuckeliana B05.10] gi|150855674|gb|EDN30866.1| BC1G_10012 [Botryotinia fuckeliana B05.10]
  misc_feature (136)..(327): SWISSPROT Homolog: EC 2.1.1.1 Nicotinamide N-methyltransferase
MPYDNSISRFCRQYLQLENHLDYPPDALLKLDEIQSLLYRDLFADHSHPPPERYQLKVLKELVGKIEQSIDDWDQYGVSDDMMTSLSDLFLVKLPPETITNQQKSYVTYTPSLLVDTTLSSCHSEPHVTLLEHRNILSASGTTGLRTWDAALHLGNYLCTHSHLIRGKRVMELGAGPGYVSILCAKLLGAAHVIASDGSKDVVAGLLENLYLNGLQDSDQVRPLDYQWGHALVGTEENEWNGGNLVDVILGADVTYDPSIIPPLISTLQELKDLFPGAMTLIAATERNRDTFEKFIRECQRFNFNVGELHFPLLPREGQNGPFFDDNLPIRICKITRS

SEQ ID NO: 9451 - DNA, 3894 bp, Muscodor strobelii
  misc_feature: SGI EST ID NO. CUFF.22388.1
  misc_feature: Variant of the nucleotide sequence at SEQ ID NO 9449
ttccaattggagatcaacatgaatgtctcttacgttatgtgtttccgcatgccactcatccttcactgcacatatgtgccgttggacttgtgaacgcctgcggactgattgcggggtgcaacatattaggccatttcatttcagttcagttcagttccaagaggacacgataggctcgagacttgcgtactgaaacgaaatagttgagacgggttcagttctttgtttggaatttgccgctgcccggaatgccttatgataattcaatctctagattttgtcgtcaatatttacaattagaaaatcatttagactacccgccagacgccctgctcaaacttgacgagattcagtcccttctctaccgtgacctcttcgccgaccactcacatcctccaccggagagataccagctcaaggttttgaaggaacttgtcggcaagatcgagcagagcatcgatgattgggatcagtatggggtgtccgacgacatgatgacatcgctatcagatctctttctcgtgaaactaccacccgagaccatcacgaaccagcaaaaatcatacgtgacctacacgccgtcgctcctcgttgatactactctgagctcgtgtcatagcgaacctcacgtcactttgcttgagcatcgtaacattctctcagcttctggcactacgggcctgcgcacctgggatgctgctcttcatcttggtaattatctgtgtacgcattcgcatctcatccgagggaagagggtaatggaactcggagccggcccgggctacgtatccatactctgcgctaagctacttggtgctgctcatgttatcgcctccgacggttcaaaggatgtcgtggctggccttctagaaaatctctatcttaacggattgcaagactctgatcaagtgaggccactagattaccaatggggtcatgcgcttgttggaactgaagagaatgaatggaacggtggcaatctagtcgacgtgattctcggcgctgacgtgacttatgacccatctattattccgccgctcatcagcaccctgcaggagctcaaggatctcttcccaggcgccatgacactcattgcagctactgaaagaaaccgagatacttttgaaaagttcattcgagaatgccaacgcttcaattttaacgttggcgagcttcactttcccttgcttccgcgagaaggtcaaaatggcccgtttttcgacgacaatctccctattaggatatgtaaaataactcgaagttagtcacgatacaataccatacgcagttatgctgctttatagcctgagcctcgaactaggttatctgttacctgccgagaattcgaaggtcatgtcaacacatcgagcggatagatgcaaaggggcttgtgtcaaagttttcactgaagccgggtttgaatattgagctacaatagtcaagggaggggaaatcgagttggctgaagtaatatcggacttatgattgcaactaaatgccttctcattcgaccccattggatttctaatgatgtcgagtcaagagcatttgaatgctatttgatgacgcgggcatagtgggttcttttatgttttcttccgcgcagccgcggcattgactctggaaatcggctggagatgtttcagtttttgtagcttagtaatgctaactccttgtcctagaattccctgatgatccttgtgctggtgtgcctacactaccgttctgtagcggaacctgggcggtgcaaggacgtttgacaaggcgggatccgacctgcagcggcattcaatgttgggaattttcctagtccctgttgcatatcccatctatttgatattctacttgtgctgtctcccgcacaaattgggctatccttgtcgtttccgccgaggtctcagtgttcgatcttgataatccaagcgcggatcggccgattactcggggtgacattgggccacgccttgtccacggaactccaaatgtggatacctcaccaatgccagcccacctggtgagcttagtcggcagaatagtccacttacatatctaatcattctcccggatttgggcctggccctgatgatagcatataggctacctgctcggatttcgcgtgtgtttccgtgaatagggtagtatcaaacttgaaacagcaactgactagaatgatcttgatgatttaggaaactgttccgagtcagccaatgacatagcaacgcaaaaacgtctgcaaagtggactgacgcgatatgaggtggaatcagttatataaagatgggctcgccgtagctctttggtgatattgtcgtgcccatcacaagctagccaactgcctactttgtatccacagtgatatcctacaatcgcgatcccgattatacatctcttcatcatactattcgacaatcatgagcacgaagcttgatggccgccctcgcttcgaggctgctacgaaagtagacgcggctcctctgggggcgccccttgatttcccattctccaagagatctgcgcctaatcgattcctcaacgctgctatgtctgagagattggccagctacgacaaagatgatgtgaccaagagtgggatcccgtcaaaagagctcatcagagtttatgagcgctggggtcaaggcggctggggtcaggttcttaccggcaacgtccagattcacccacatcacctagaggcagagggcaacgccattattccatccgatgcccctttcagtggaccccgattcgaggccttcagcgagttagcaacaaaagcgaaggcaaatggtagtttgattgtcgctcaagtctcgcatccgggaagacaggtgccggatacgatccagaagcatcccatcagcgccagtgctgttcccatgtcgaagagcaccatggtgccaatgaacttcgcgacccctcgcgcagctacccgcgaggatatcgattcagtcattgaaggtttcgcacacgctgccgaatacttggagaagactggtttcgacggaatagaattgcatggtgcacacggctatcttattgcccagttcctcagtcccacgacgaatcacagaacggatgaatacggtggcagcttggaaaaccgaatgagactcgtcttggaggtcgctgccgcagtcaagaagcgagtcagcagcagtttcatactgggtatcaaagtcaacagtgttgagttccaagacaagggtttcacatcggaagaggccgtcctcttatgtcaagcacttgagaaagcagagtttgactatgttgagacgagcggcggcacctatgaatcgagtggtttcaaacatgctaaagagagcacaataaagcgcgagaactttttcatcgagtgggctgcccagattgcaagcgcgctcaccaagactaaggtctataccaccggtggattccgaaccgtcgccgccatgttagacacactcaaagaggtggatggagttggtatcggacgggctgctacccaggaacccgatctggttaatgcgatattgaaagagggcgcgcagggcatcttgaagttctcgctgcctgaagaacaattcctaccgagactcatgttatctgcctatcagatcggtcagattgggagaggtgaagaaatcaccgatgggtcgagccacgaggcaacacaggaggctcttgcgaagatcatgggagcacatgctgctgccgctgcacctcagggtacagttgctgcttaagctacctgccgggctgggaaaagactattgctttagtcaaatccgttagtggatcagaggattcgcaatattcaccgcggcatagaacgcagtgtcttgtcacgatggataccatagactaggtagatagcggaactgtgattactgaccatatctctatgattgtccctcg

SEQ ID NO: 9452 - DNA, 408 bp, Muscodor strobelii
  misc_feature: SGI cDNA ID NO. 562954
  misc_feature: Reduced expression when VOC is produced
  misc_feature: Encodes the peptide sequence at SEQ ID NO 9453
atggctgactccgcccccgtcacgttgcgcacgcgcaagttccttagaaaccctctgcttggccgaaagcagtgtgttgtagatatcctccacccgcagagccccaacatcagcaaggacgagctgcgtgacaagctcgctggcatgtacaaggccaccaaggaccaggtctcagtcttcggcctacgcacccacttcggtggtggcaagaccaccggctttgctctcatctacgactcccccgaggctctcaagcgcttcgagccccagtaccgacaggtccgctacggctacaccaccaagcccgagagagcatcccgacagcagcgcaagcagcgcaagaaccgacagaagaccctccgcggtaccgccaagaccaagggtgccaaggccaagaaggacaaatag

SEQ ID NO: 9453 - protein, 135 aa, Muscodor strobelii
  misc_feature: SGI Peptide ID NO. 562954
  misc_feature (25)..(108): Pfam Id: PF01282 Pfam Desc: Ribosomal protein S24e
  misc_feature (1)..(135): NCBI GI: 85084940 Blast Desc: 40S ribosomal protein S24 [Neurospora crassa OR74A] gi|28918498|gb|EAA28171.1| 40S ribosomal protein S24 [Neurospora crassa OR74A] gi|28950233|emb|CAD71100.1| 40S RIBOSOMAL PROTEIN
  misc_feature (1)..(135): NCBI GI: 116197363 Blast Desc: 40S ribosomal protein S24 [Chaetomium globosum CBS 148.51] gi|88178116|gb|EAQ85584.1| 40S ribosomal protein S24 [Chaetomium globosum CBS 148.51]
  misc_feature (1)..(135): NCBI GI: 171676527 Blast Desc: protein product [Podospora anserina] gi|170936330|emb|CAP60988.1| protein product [Podospora anserina]
  misc_feature (1)..(123): NCBI GI: 39971319 Blast Desc: MGG_10680 [Magnaporthe grisea 70-15] gi|145012226|gb|EDJ96882.1| MGG_10680 [Magnaporthe grisea 70-15]
  misc_feature (1)..(123): NCBI GI: 256729515 Blast Desc: [Nectria haematococca mpVI 77-13-4]
  misc_feature (1)..(123): NCBI GI: 46117268 Blast Desc: FG04476.1 [Gibberella zeae PH-1]
  misc_feature (1)..(123): NCBI GI: 261353598 Blast Desc: 40S ribosomal protein S24 [Verticillium albo-atrum VaMs.102]
  misc_feature (1)..(123): NCBI GI: 154301719 Blast Desc: 40S ribosomal protein S24 [Botryotinia fuckeliana B05.10] gi|150855673|gb|EDN30865.1| 40S ribosomal protein S24 [Botryotinia fuckeliana B05.10]
  misc_feature (1)..(135): NCBI GI: 189209582 Blast Desc: 40S ribosomal protein S24 [Pyrenophora tritici-repentis Pt-1C-BFP] gi|187977216|gb|EDU43842.1| 40S ribosomal protein S24 [Pyrenophora tritici-repentis Pt-1C-BFP]
  misc_feature (1)..(123): NCBI GI: 156065881 Blast Desc: 40S ribosomal protein S24 [Sclerotinia sclerotiorum 1980] gi|154691810|gb|EDN91548.1| 40S ribosomal protein S24 [Sclerotinia sclerotiorum 1980]
  misc_feature: Useful for introducing or modulating the production of volatile compounds
MADSAPVTLRTRKFLRNPLLGRKQCVVDILHPQSPNISKDELRDKLAGMYKATKDQVSVFGLRTHFGGGKTTGFALIYDSPEALKRFEPQYRQVRYGYTTKPERASRQQRKQRKNRQKTLRGTAKTKGAKAKKDK

SEQ ID NO: 9454 - DNA, 1927 bp, Muscodor strobelii
  misc_feature: SGI EST ID NO. CUFF.22381.0
  misc_feature: Variant of the nucleotide sequence at SEQ ID NO 9452
cctgcccactccaccactgcgattttggtgtgctgtgaaatttcaaagaacccgatctctcactcgaaggagacgacgcccagcgaccatcgacaaccccccgcccacgatcagcccgtctctcgcaacaccgacgacaactgatcctgaccatggctgactccgcccccgtcacgttgcgcacgcgcaagttccttagaaaccctctgcttggccgaaagcagtgtgttgtagatatcctccacccgcagagccccaacatcagcaaggacgagctgcgtgacaagctcgctggcatgtacaaggccaccaaggaccaggtctcagtcttcggcctacgcacccacttcggtggtggcaagaccaccggctttgctctcatctacgactcccccgaggctctcaagcgcttcgagccccagtaccgacaggtccgctacggctacaccaccaagcccgagagagcatcccgacagcagcgcaagcagcgcaagaaccgacagaagaccctccgcggtaccgccaagaccaagggtgccaaggccaagaaggacaaatagacggaacaaccactcacctgggatctcgtggcgatgcgtgtctctttgctggactgggtttaggcttcgtctacggctctcgtgtatcacgcgacgcaaatcatgacaatggcatcggcagcagcattccgctactaccacaactccgcaacctcctccatcggtcgtactgctgttgttctcggataggaacggcggccagcacctccctcatttttttcctatctctctcgggcggcgatgggaaacaaacgaactactattatttgtgatgatttccccacgatagcataaatcaaggagttgtcaatggtcaagacgcaggcaggctagtctcaagtcttgcgggttctacttcttctgccgaaaaagctgagagatgtgtgcacaaacaaatgcaaaaaaattctgtgaagttcactattttcttatttcatgtgtctatctgaatgtgtatgacggtgaaatgattctattgcggatatcccaaagagcccgccgtcaccaaacgcccatgctaatattcatcgctatggttccaccaaactccatctccaagccattatttgtacaatgaatcaagtggacatcacagatgtatggaaagaaaactttcgagatgactcgacggcccgggaagtgcctcagaggaagttcagaattacaataatgcgacccccaatgcagcaacaactgcaacgactccagccatgaggacatcctccgagcttctcggcccagcattcgtgctcgctccgttcgccccagaatctgcaggcccatcgaaaacaacaggttcatgccacccacattgcgtctcatgaggaaacgtatgacagctccagaacgtcgtgatatggaagctcttctccttctgaccatcaacaccgggttcatggaactggccgcccatcggcgcgggtgtgatgacaggtttgggtttcctagagtgcgtcttactgccctttagttgcgtatgtgtgtagtttgagtgatgtgttgtatgtgacaggttcccacagggaggtagcgtcatggttgtgggcgtggggaagacgctcgatatgatggggtgcgaggttggcgaggatgctggagaagaggacatggcggttcgtggcgtcttgtggccaacagccgccgcgtgtgtgcctacacttagactgaggagggagaggaaagcgatgagctgcattttggaggttgacaagtgtgtccttagtatattgcaatgaccgtccgaatgcttcgagtaaaggcgaaatgaaatgaagctctacaaagcagtatataattgagtaccagctcaacgaagtcagaagtcgcaggaaactcgacgtcggtctattaaaatgcagcgaaaatga

SEQ ID NO: 9455 - DNA, 534 bp, Muscodor strobelii
  misc_feature: SGI cDNA ID NO. 562955
  misc_feature: Encodes the peptide sequence at SEQ ID NO 9456
atgcagctcatcgctttcctctccctcctcagtctaagtgtaggcacacacgcggcggctgttggccacaagacgccacgaaccgccatgtcctcttctccagcatcctcgccaacctcgcaccccatcatatcgagcgtcttccccacgcccacaaccatgacgctacctccctgtgggaacctgtcacatacaacacatcactcaaactacacacatacgcaactaaagggcagtaagacgcactctaggaaacccaaacctgtcatcacacccgcgccgatgggcggccagttccatgaacccggtgttgatggtcagaaggagaagagcttccatatcacgacgttctggagctgtcatacgtttcctcatgagacgcaatgtgggtggcatgaacctgttgttttcgatgggcctgcagattctggggcgaacggagcgagcacgaatgctgggccgagaagctcggaggatgtcctcatggctggagtcgttgcagttgttgctgcattgggggtcgcattattgtaa

SEQ ID NO: 9456 - protein, 177 aa, Muscodor strobelii
  misc_feature: SGI Peptide ID NO. 562955
MQLIAFLSLLSLSVGTHAAAVGHKTPRTAMSSSPASSPTSHPIISSVFPTPTTMTLPPCGNLSHTTHHSNYTHTQLKGSKTHSRKPKPVITPAPMGGQFHEPGVDGQKEKSFHITTFWSCHTFPHETQCGWHEPVVFDGPADSGANGASTNAGPRSSEDVLMAGVVAVVAALGVALL

SEQ ID NO: 9457 - DNA, 1353 bp, Muscodor strobelii
  misc_feature: SGI cDNA ID NO. 562956
  misc_feature: Elevated expression when VOC is produced
  misc_feature: Encodes the peptide sequence at SEQ ID NO 9458
atggtgctgcccactcctctgatccgcctccagtgcggcgtcaactcttatgactggggcaaggtcggcagtgactcggcggctgccaagtttgccaatgccactcccgccgatggcttcagcatccagtccgacaagccgtacgccgagctatggatgggcacccaccccagcaacccctccaaggacgtgcagtccggacgctctctgctcgacctcatcgagtccaatgccatgctcctcggcccccagatcaccagccgcttcgatggccgtctccccttcctcttcaaggtcctgtccatcggcaaggccctctccatccaggcccaccccaacaagcagctcgccgcccagctccacgcccgcgacccccgcaactaccccgatgacaaccacaagcccgagatggccattgccatcaccgacttcgagggcctgtgcggcttccgtcccctcgccgagattgcccacttcctcggctccgtctctgctctccgccagctggtcggtgaggacgccgccgccaacttcgccaccgctgtccgcgactcagacaccagcgatgccgacggcaagaaggcactgcgagatgcctttgccgctctcatggagtcttcgtccgagcatgtcgccgctgcagccaaggctctcgtctctgaagccgagactaaaggcgacgcctttgccgacggtggtatcgacgcgaccagcggagccaccatggccgagctcgtcactcgtctcaacaagcaatttcccgaggacattggtctctttgtcctcttcttcctcaactacgtccagctctcgcctggcgaagctctcttcctcaaggccgatgacatccacgcctacgtctccggcgacatcatcgagtgcatggctgccagcgacaacgtggtgcgcgccggtttcacacccaaattcaaggacgtcaagaccctggtgactatgttgacctacaactacgcccccatcaaggaccagaagatggtgcccgaatactatcccttctgcaccatggacgccaaggcctacagctcagaatcccaggtcgagctgtacaacccacccattgacgagtttagcgtcatccgcaccgagctgagagtcgctggggctaaggctacctttgatcccatcgatggccccagcatcatcatctgcactggtggccatggcaccatctctgtgggcgagaagacggaggagatcaaggagggatatgttttctttgttggcgctacggcgcagcttgtgctcaagtcggaaggcgacaaggagtttactactttcaaagcgtttgttgaggacaacacccaggctagcaatggagttggtgctatgtag

SEQ ID NO: 9458 - protein, 450 aa, Muscodor strobelii
  misc_feature: SGI Peptide ID NO. 562956
  misc_feature (7)..(402): Pfam Id: PF01238 Pfam Desc: Phosphomannose isomerase type I
  misc_feature (3)..(438): NCBI GI: 171676543 Blast Desc: protein product [Podospora anserina] gi|170936338|emb|CAP60996.1| protein product [Podospora anserina]
  misc_feature (2)..(438): NCBI GI: 261353603 Blast Desc: mannose-6-phosphate isomerase [Verticillium albo-atrum VaMs.102]
  misc_feature (3)..(438): NCBI GI: 256729334 Blast Desc: [Nectria haematococca mpVI 77-13-4]
  misc_feature (3)..(438): NCBI GI: 154294274 Blast Desc: BC1G_13823 [Botryotinia fuckeliana B05.10] gi|150844833|gb|EDN20026.1| BC1G_13823 [Botryotinia fuckeliana B05.10]
  misc_feature (3)..(438): NCBI GI: 46117278 Blast Desc: FG04481.1 [Gibberella zeae PH-1]
  misc_feature (3)..(446): NCBI GI: 39971313 Blast Desc: MGG_10677 [Magnaporthe grisea 70-15] gi|145012229|gb|EDJ96885.1| MGG_10677 [Magnaporthe grisea 70-15]
  misc_feature (5)..(438): NCBI GI: 189207993 Blast Desc: mannose-6-phosphate isomerase [Pyrenophora tritici-repentis Pt-1C-BFP] gi|187976423|gb|EDU43049.1| mannose-6-phosphate isomerase [Pyrenophora tritici-repentis
  misc_feature (3)..(438): NCBI GI: 116197385 Blast Desc: CHGG_06848 [Chaetomium globosum CBS 148.51] gi|88178127|gb|EAQ85595.1| CHGG_06848 [Chaetomium globosum CBS 148.51]
  misc_feature (4)..(438): NCBI GI: 119495286 Blast Desc: mannose-6-phosphate isomerase, class I [Neosartorya fischeri NRRL 181] gi|119412593|gb|EAW22534.1| mannose-6-phosphate isomerase, class I [Neosartorya fischeri NRRL
  misc_feature (6)..(438): NCBI GI: 121701325 Blast Desc: mannose-6-phosphate isomerase, class I [Aspergillus clavatus NRRL 1] gi|119397070|gb|EAW07501.1| mannose-6-phosphate isomerase, class I [Aspergillus clavatus NRRL 1]
  misc_feature (4)..(438): SWISSPROT Homolog: EC 5.3.1.8 Mannose-6-phosphate isomerase
  misc_feature: Useful for introducing or modulating the production of volatile compounds
MVLPTPLIRLQCGVNSYDWGKVGSDSAAAKFANATPADGFSIQSDKPYAELWMGTHPSNPSKDVQSGRSLLDLIESNAMLLGPQITSRFDGRLPFLFKVLSIGKALSIQAHPNKQLAAQLHARDPRNYPDDNHKPEMAIAITDFEGLCGFRPLAEIAHFLGSVSALRQLVGEDAAANFATAVRDSDTSDADGKKALRDAFAALMESSSEHVAAAAKALVSEAETKGDAFADGGIDATSGATMAELVTRLNKQFPEDIGLFVLFFLNYVQLSPGEALFLKADDIHAYVSGDIIECMAASDNVVRAGFTPKFKDVKTLVTMLTYNYAPIKDQKMVPEYYPFCTMDAKAYSSESQVELYNPPIDEFSVIRTELRVAGAKATFDPIDGPSIIICTGGHGTISVGEKTEEIKEGYVFFVGATAQLVLKSEGDKEFTTFKAFVEDNTQASNGVGAM

SEQ ID NO: 9459 - DNA, 2069 bp, Muscodor strobelii
  misc_feature: SGI EST ID NO. CUFF.22385.0
  misc_feature: Variant of the nucleotide sequence at SEQ ID NO 9457
tgcagctttggagctcctccacccattcaaatgttccatgtgtcaagagatccagacgccagagtcaacaacagatcgatacgttttgtttgctaatgcattcccaattggacagcatggaacacgttgacgggttgacaacagacgggaatagtcacgctgaaagatgtgataccgcaagctccttgttgtattttcctctaatctacattgcattacaatgcaacgcagtgtcagttatggaaagcaagccattgcccgagttgatgtccttccgcccaagaagcagaagtgaaaacgcagaatatatactgggcagtgatcttgtcacgtaaatggatactcaattcacatctctgcgatctccaccatctgcccctttgtcctatgctatcgtccctccctcctctatttcatatacctagtgttgacgtattgaacccatgttgtattctgactattatccgtctgatcgctataactattcgaaactcgagctgtagtggcacaacaaaacaaattgtagtggctgcttcctttttcttttgcacgccgttcaccttcacatcacctggtgcattgttgtcgccgtgatctcaccacgcacagcatccattccaagcccaggcaggcaaactcctcatcatggtgctgcccactcctctgatccgcctccagtgcggcgtcaactcttatgactggggcaaggtcggcagtgactcggcggctgccaagtttgccaatgccactcccgccgatggcttcagcatccagtccgacaagccgtacgccgagctatggatgggcacccaccccagcaacccctccaaggacgtgcagtccggacgctctctgctcgacctcatcgagtccaatgccatgctcctcggcccccagatcaccagccgcttcgatggccgtctccccttcctcttcaaggtcctgtccatcggcaaggccctctccatccaggcccaccccaacaagcagctcgccgcccagctccacgcccgcgacccccgcaactaccccgatgacaaccacaagcccgagatggccattgccatcaccgacttcgagggcctgtgcggcttccgtcccctcgccgagattgcccacttcctcggctccgtctctgctctccgccagctggtcggtgaggacgccgccgccaacttcgccaccgctgtccgcgactcagacaccagcgatgccgacggcaagaaggcactgcgagatgcctttgccgctctcatggagtcttcgtccgagcatgtcgccgctgcagccaaggctctcgtctctgaagccgagactaaaggcgacgcctttgccgacggtggtatcgacgcgaccagcggagccaccatggccgagctcgtcactcgtctcaacaagcaatttcccgaggacattggtctctttgtcctcttcttcctcaactacgtccagctctcgcctggcgaagctctcttcctcaaggccgatgacatccacgcctacgtctccggcgacatcatcgagtgcatggctgccagcgacaacgtggtgcgcgccggtttcacacccaaattcaaggacgtcaagaccctggtgactatgttgacctacaactacgcccccatcaaggaccagaagatggtgcccgaatactatcccttctgcaccatggacgccaaggcctacagctcagaatcccaggtcgagctgtacaacccacccattgacgagtttagcgtcatccgcaccgagctgagagtcgctggggctaaggctacctttgatcccatcgatggccccagcatcatcatctgcactggtggccatggcaccatctctgtgggcgagaagacggaggagatcaaggagggatatgttttctttgttggcgctacggcgcagcttgtgctcaagtcggaaggcgacaaggagtttactactttcaaagcgtttgttgaggacaacacccaggctagcaatggagttggtgctatgtagatacgtagctagagagaattaaggcgatcgcgaaataaacagcatcgcaaaactgattacataccttggga

SEQ ID NO: 9460 - DNA, 1488 bp, Muscodor strobelii
  misc_feature: SGI cDNA ID NO. 562957
  misc_feature: Encodes the peptide sequence at SEQ ID NO 9461
atggacaataaaactgacaagcgtaataagaaacgttatgacagagaactcaagaatctccagagcactcttggtcccgcccacgatcagcccatcactctacgtcgaagcaacacccagggttctcagagtgctgagcctggctctgccgccaccagtccgccgaatcggccgagttctgctgtgaagtctagtacaagcccacagtcccgctctcaagctggaactcccgtgcaaggtgagacagcaggaaccgcttcaagtcctacgagagggcactcgcagtttgctaggccacgtcactcgagaacgtcaagttctacttcccagtctagagacaaggacaaaggcaattcagcggtcaggaaggaggctacaccagctcagccgagcgcatccatctctacccctcaggttccttcgcctaaaggccaggagacagtggtatctagaccacagaccactaaaagagagacgattaagcaagaaacagtcatccccgccatgtcgtcacgtgggaatacccgtcggggtggcaatcgcaatagcgagttgagcgagcatggtgaggaagtcgacttgtggaaagaaattaaggagtcggtgccatctgtgatcaacttattcaatgccagtagcgccaatcagattgaccaggcgcagcaagacaagaattgtttcgacaagaaaaacaacgacaatcttacgctcaaagacctgctcgaccttgacgcatctgttcgtgcaggtgtcaaggtgaacgaggacgccaacaaggttctaaaggagataatagagaaagtgcgcacgcttagagcggtggtcctggccaaggagaagcaacagcaagagtccactgggtcacggtcgacggcgcaacggccggcgcgggatgtgtatgactttgccgagggagactcgccgatgccttcaccacaggcaggtaattcgcggcgtggcaagggtgagagaggggactcagtaccgcccaagtcacaagaccggtccacgccagtggccaaggcgggtagtgccgagccgcagcccgggacagcagcagccgcagcagcgaacgcgatgcgatcgaagcaaacattcgccaaggacgacgaagtggcgttcaagccgaagccggtaggcaacgagccgacggagtggatcctgggcatcgtgcaggatgtgcgcggagacggcaaatcgcggcgctacagagtgctggatgcggacgtggatgagcatcacaatcagaaagatttcaagacgagtgccagtagtatgatcctgatcccgaaggagggtacgacgctgccgccgctggatgagggcaaggtggtgctagcgctgtaccctgccacgaccacgttctacaaagcggaggtcatcgggatggacggcaacgagaaggtcaacctcaagttcgagggcgaggacagcagcaatacggttcaagctgtcatgcgccggcatgtggttgaatatcgagcgtga

SEQ ID NO: 9461 - protein, 495 aa, Muscodor strobelii
  misc_feature: SGI Peptide ID NO. 562957
  misc_feature (16)..(495): NCBI GI: 46117280 Blast Desc: FG04482.1 [Gibberella zeae PH-1]
  misc_feature (16)..(495): NCBI GI: 256729335 Blast Desc: [Nectria haematococca mpVI 77-13-4]
  misc_feature (169)..(494): NCBI GI: 116197383 Blast Desc: CHGG_06847 [Chaetomium globosum CBS 148.51] gi|88178126|gb|EAQ85594.1| CHGG_06847 [Chaetomium globosum CBS 148.51]
  misc_feature (169)..(494): NCBI GI: 171676545 Blast Desc: protein product [Podospora anserina] gi|170936339|emb|CAP60997.1| protein product [Podospora anserina]
  misc_feature (169)..(494): NCBI GI: 39971315 Blast Desc: MGG_10678 [Magnaporthe grisea 70-15] gi|145012228|gb|EDJ96884.1| MGG_10678 [Magnaporthe grisea 70-15]
  misc_feature (299)..(495): NCBI GI: 85084908 Blast Desc: NCU07174 [Neurospora crassa OR74A] gi|28918490|gb|EAA28163.1| [Neurospora crassa OR74A] gi|28950270|emb|CAD71136.1| conserved [Neurospora crassa]
  misc_feature (177)..(493): NCBI GI: 156066105 Blast Desc: SS1G_01064 [Sclerotinia sclerotiorum 1980] gi|154691922|gb|EDN91660.1| SS1G_01064 [Sclerotinia sclerotiorum 1980]
  misc_feature (242)..(493): NCBI GI: 154294276 Blast Desc: BC1G_13824 [Botryotinia fuckeliana B05.10] gi|150844834|gb|EDN20027.1| BC1G_13824 [Botryotinia fuckeliana B05.10]
  misc_feature (169)..(409): NCBI GI: 261353604 Blast Desc: conserved [Verticillium albo-atrum VaMs.102]
  misc_feature (174)..(492): NCBI GI: 258572352 Blast Desc: UREG_04455 [Uncinocarpus reesii 1704] gi|237905208|gb|EEP79609.1| UREG_04455 [Uncinocarpus reesii 1704]
MDNKTDKRNKKRYDRELKNLQSTLGPAHDQPITLRRSNTQGSQSAEPGSAATSPPNRPSSAVKSSTSPQSRSQAGTPVQGETAGTASSPTRGHSQFARPRHSRTSSSTSQSRDKDKGNSAVRKEATPAQPSASISTPQVPSPKGQETVVSRPQTTKRETIKQETVIPAMSSRGNTRRGGNRNSELSEHGEEVDLWKEIKESVPSVINLFNASSANQIDQAQQDKNCFDKKNNDNLTLKDLLDLDASVRAGVKVNEDANKVLKEIIEKVRTLRAVVLAKEKQQQESTGSRSTAQRPARDVYDFAEGDSPMPSPQAGNSRRGKGERGDSVPPKSQDRSTPVAKAGSAEPQPGTAAAAAANAMRSKQTFAKDDEVAFKPKPVGNEPTEWILGIVQDVRGDGKSRRYRVLDADVDEHHNQKDFKTSASSMILIPKEGTTLPPLDEGKVVLALYPATTTFYKAEVIGMDGNEKVNLKFEGEDSSNTVQAVMRRHVVEYRA

SEQ ID NO: 9462 - DNA, 2536 bp, Muscodor strobelii
  misc_feature: SGI EST ID NO. CUFF.22452.1
  misc_feature: Variant of the nucleotide sequence at SEQ ID NO 9460
tggagctactgtgtacatgagtgtcttaagtgacatcaaacgcgcttcctatccagcactaaatcgcttagatggccttcaaatgacacgacgccatgtgtattctactcaattacgaaaagccatactcatgtaattgcaacattgtatgttttcatcaagccatcctcttctcgtctcacgccatatccaagaaccaagcttctagtcactctttttgagtatttcaaagacttgacatatggttccagcttactgagttcgagctgcgccgtcgccgtagcgtatggaacgattatatcgctctggagctactatataatcattttacctcgctccagtagccatcgtcgccactcctctctcttctctgaatagtcctcatttcaatcgccgcttccgtcgtcagccttgtaaacgttatgacagagaactcaagaatctccagagcactcttggtcccgcccacgatcagcccatcactctacgtcgaagcaacacccagggttctcagagtgctgagcctggctctgccgccaccagtccgccgaatcggccgagttctgctgtgaagtctagtacaagcccacagtcccgctctcaagctggaactcccgtgcaaggtgagacagcaggaaccgcttcaagtcctacgagagggcactcgcagtttgctaggccacgtcactcgagaacgtcaagttctacttcccagtctagagacaaggacaaaggcaattcagcggtcaggaaggaggctacaccagctcagccgagcgcatccatctctacccctcaggttccttcgcctaaaggccaggagacagtggtatctagaccacagaccactaaaagagagacgattaagcaagaaacagtcatccccgccatgtcgtcacgtgggaatacccgtcggggtggcaatcgcaatagcgagttgagcgagcatggtgaggaagtcgacttgtggaaagaaattaaggagtcggtgccatctgtgatcaacttattcaatgccagtagcgccaatcagattgaccaggcgcagcaagacaagaattgtttcgacaagaaaaacaacgacaatcttacgctcaaagacctgctcgaccttgacgcatctgttcgtgcaggtgtcaaggtgaacgaggacgccaacaaggttctaaaggagataatagagaaagtgcgcacgcttagagcggtggtcctggccaaggagaagcaacagcaagagtccactgggtcacggtcgacggcgcaacggccggcgcgggatgtgtatgactttgccgagggagactcgccgatgccttcaccacaggcaggtaattcgcggcgtggcaagggtgagagaggggactcagtaccgcccaagtcacaagaccggtccacgccagtggccaaggcgggtagtgccgagccgcagcccgggacagcagcagccgcagcagcgaacgcgatgcgatcgaagcaaacattcgccaaggacgacgaagtggcgttcaagccgaagccggtaggcaacgagccgacggagtggatcctgggcatcgtgcaggatgtgcgcggagacggcaaatcgcggcgctacagagtgctggatgcggacgtggatgagcatcacaatcagaaagatttcaagacgagtgccagtagtatgatcctgatcccgaaggagggtacgacgctgccgccgctggatgagggcaaggtggtgctagcgctgtaccctgccacgaccacgttctacaaagcggaggtcatcgggatggacggcaacgagaaggtcaacctcaagttcgagggcgaggacagcagcaatacggttcaagctgtcatgcgccggcatgtggttgaatatcgagcgtgatgagtagagctcggcaaggagacagtgcttttatgcggaaccagtacatcttctccaccttggtttcggagatatgcttctgtccattctctcttattgggtttctgaggcacatttgggcattcccacagggacggtcactgcgttgattcgggcgcctggcgttagtggcatgagccagcgacggattggttttctgcactgctctgttaaagagcgagatggatggtgcgctttgactataaacaccttaggtagagtgtcgatcttggtgtagaaccgcccaagtcatcaaaataccatcagcaatcggccacaatgtctacccagccaacgtgtgcggtgaccatgtctcgtgcacttcaagctatctcgtccattcacaatcgttgccagcagcaactatttacagtgcgaggttctagcagggaggacatcactacgagccagagttggcagtgcgaaggcagatagggcgcagagacaaaattcaattgatggatgatgagacaatgacacaaacagatgcggcgctgaaaaaaatcaaatctcatcgaagtctccttttcgccattcaaataaatgacctacccggtatcgaagccccttttctctctcccagatgtctgggttctgcatagatttgatgatgcagatacccga

SEQ ID NO: 9463 - DNA, 561 bp, Muscodor strobelii
  misc_feature: SGI cDNA ID NO. 562958
  misc_feature: Reduced expression when VOC is produced
  misc_feature: Encodes the peptide sequence at SEQ ID NO 9464
atggggggccagctgtccaagatgatgggcaagatcttcgggtccaaggagatgcggctgctcatgctgggcctcgacgccgccggcaagacgacgatcctctacaagctcaagctcggccaggacgtcaccaccatccccaccgtcggcttcaacgtcgagaccgtcacctacaagaacgtcaagttcaacgtctgggacgtcggcggccaggacaagatccgccccctctggcgccactacttctccggcactcagggtctcatcttcgtcatcgactcctccgacacggtgcgcatggaagaagcccgccaggagctgcaccgcatcatcaacgatcgcgagatgaaggacagcttactgctcgtctttgccaacaagcaggatatcaagggcgccatgtcgcccaaagacgtcacaagtgccctcgagctcaacaagctcggtgagaggctctggtatgtcgtgcccagttgcgccaccaccggcgagggcctgctcgagggtcttgcttggctgtccaaccacatcaaggcccagcccgctcccgccaagaaatag

SEQ ID NO: 9464 - protein, 186 aa, Muscodor strobelii
  misc_feature: SGI Peptide ID NO. 562958
  misc_feature (5)..(177): Pfam Id: PF00025 Pfam Desc: ADP-ribosylation factor family
  misc_feature (19)..(165): Pfam Id: PF00071 Pfam Desc: Ras family
  misc_feature (15)..(180): Pfam Id: PF09439 Pfam Desc: Signal recognition particle receptor beta subunit
  misc_feature (1)..(186): NCBI GI: 39971311 Blast Desc: conserved [Magnaporthe grisea 70-15] gi|145012230|gb|EDJ96886.1| conserved [Magnaporthe grisea 70-15]
  misc_feature (1)..(186): NCBI GI: 46117282 Blast Desc: FG04483.1 [Gibberella zeae PH-1]
  misc_feature (1)..(186): NCBI GI: 256729336 Blast Desc: [Nectria haematococca mpVI 77-13-4]
  misc_feature (1)..(186): NCBI GI: 261353605 Blast Desc: ADP-ribosylation factor 6 [Verticillium albo-atrum VaMs.102]
  misc_feature (1)..(186): NCBI GI: 154294278 Blast Desc: conserved [Botryotinia fuckeliana B05.10] gi|150844835|gb|EDN20028.1| conserved [Botryotinia fuckeliana B05.10]
  misc_feature (1)..(186): NCBI GI: 156066107 Blast Desc: conserved [Sclerotinia sclerotiorum 1980] gi|154691923|gb|EDN91661.1| conserved [Sclerotinia sclerotiorum 1980]
  misc_feature (1)..(180): NCBI GI: 258572951 Blast Desc: ADP-ribosylation factor 6 [Uncinocarpus reesii 1704] gi|237900923|gb|EEP75324.1| ADP-ribosylation factor 6 [Uncinocarpus reesii 1704]
  misc_feature (1)..(180): NCBI GI: 119191334 Blast Desc: ADP-ribosylation factor 6 [Coccidioides immitis RS] gi|240106507|gb|EER24700.1| ADP-ribosylation factor family protein [Coccidioides posadasii C735 delta SOWgp]
  misc_feature (1)..(186): NCBI GI: 226286501 Blast Desc: ADP-ribosylation factor [Paracoccidioides brasiliensis Pb01]
  misc_feature (1)..(186): NCBI GI: 225680155 Blast Desc: ADP-ribosylation factor 6 [Paracoccidioides brasiliensis Pb03] gi|226291949|gb|EEH47377.1| ADP-ribosylation factor 6 [Paracoccidioides brasiliensis Pb18]
  misc_feature: Useful for introducing or modulating the production of volatile compounds
MGGQLSKMMGKIFGSKEMRLLMLGLDAAGKTTILYKLKLGQDVTTIPTVGFNVETVTYKNVKFNVWDVGGQDKIRPLWRHYFSGTQGLIFVIDSSDTVRMEEARQELHRIINDREMKDSLLLVFANKQDIKGAMSPKDVTSALELNKLGERLWYVVPSCATTGEGLLEGLAWLSNHIKAQPAPAKK

SEQ ID NO: 9465 - DNA, 2100 bp, Muscodor strobelii
  misc_feature: SGI EST ID NO. CUFF.22458.0
  misc_feature: Variant of the nucleotide sequence at SEQ ID NO 9463
ccccagtgcccgagggcctaattaatggttaattgagtgtcgtatgaacccggccccccacttccatttgcccaatttccttggaatttcagaactccatcacatctccttttttaatgcactcgtgtttggtctgcgaagtcgacgtctttttttccttccgttcgctactactctagacccagctacactcggctcaagacttctgacgacgcgtctcgacacgatcaatccgacgacacatcacgcgcgcgctgacattcgcctcgcggacgcatatctcacagacagacgcatacattcacgcgcgacagaccctgtctcgcccgtctgcgctacggctgttgacctcgcatcgctcagaacatccctcatccttgttgtcccgcaccaatcgatctgtccactacctcgccagacactcgatctcacaatctgccgcgacgctcgatcgatccgtttcttagccaccaacgcgttccccgttctccgttgcccgttcctcgacactagacaccccgacaactgcactcgacgcccaaccgccacaatggggggccagctgtccaagatgatgggcaagatcttcgggtccaaggagatgcggctgctcatgctgggcctcgacgccgccggcaagacgacgatcctctacaagctcaagctcggccaggacgtcaccaccatccccaccgtcggcttcaacgtcgagaccgtcacctacaagaacgtcaagttcaacgtctgggacgtcggcggccaggacaagatccgccccctctggcgccactacttctccggcactcagggtctcatcttcgtcatcgactcctccgacacggtgcgcatggaagaagcccgccaggagctgcaccgcatcatcaacgatcgcgagatgaaggacagcttactgctcgtctttgccaacaagcaggatatcaagggcgccatgtcgcccaaagacgtcacaagtgccctcgagctcaacaagctcggtgagaggctctggtatgtcgtgcccagttgcgccaccaccggcgagggcctgctcgagggtcttgcttggctgtccaaccacatcaaggcccagcccgctcccgccaagaaataggaactctgaaatccccatgttatgataccacgatacccagcgtctacctcatcggtcttcactgtattctatctcagcacttgtcttcgggcctgtccgcagccaccaactcgcttgctctgcaatggttgtgcaaccgttttgtctaggtccgtcgtagcgaaataggcatgcgacgggagggccgcgtaggagctcatgtttgtccgagtttatgtgcttttcacgccccctgatgaatctgtgcaagatcgggcacagaacacaatgattcggtacctaagaagcgtcactgcgagccttactgccttttttaatcctagctgctgcaatgataccctcctctatcttccaattgcgctagatctgtcaacttctcgcctatacaacgacttgaccatctcattttgcgatgcggacggacgaatggcaaggaaacgagcctcagagtatgactccaaccacgcaacccgaaaccaacccatgaccgaatttccagcacctgattagcctccttacgccctattatatcattactatattaaccacctaattctacgaaatgattccacgccacgccttctgtttccatccaatttgactcgacactcacgacacgacatgcacggacaaaccaacaacacacggatgtttctggttgtatactagatttatatttgtaataataagctcctattgagcgccgacctttttttcttcttccaggcgatatgagctacttctgctataggggatagtggtgaaagatgttaaagagtgatatacgtcgaaagccaaagcatggggagggaaacggaatgagaatagggagatacctcacacgcctatagccaactattgctacttaatgatcacggatgtcaacttcaattcgcttgttcgctggctcgtttctaagtgtggacaatgcaggtctgagagatcatcatgcgctatgtgggcaatactatatacatggcgtattgctt

SEQ ID NO: 9466 - DNA, 1575 bp, Muscodor strobelii
  misc_feature: SGI cDNA ID NO. 562959
  misc_feature: Encodes the peptide sequence at SEQ ID NO 9467
atgtcgtcgacatcgctccgacagtgcatccgggatgtgtcccccttcttgatcctgctcatcgtcattagcacgctggggccgctgcaattcggctttcatctcgccgagctcaactcaccccaagatgtcatcacctgtcacgccaagaaggaaactgtctcgtccaggatctcggctgccttccattcttggacctccaagagctccagcagcaccgtgacgacgacaacctcaggcttgccagactgtatcccgatggacaacgcccagttcgccgtggtctcgagcatgttcaccctcggcggtctaattggtgctcttgcgagcggcccaatttcttccgcacgaggacgtctcttcgccatgcgcctgactggcctgttcttcctcatcgggtccatcctccttaccctcggtgcctctatcaccatgatgtccatcggtcgaatcttcgagggtgtcggcgccggtgctgctaccgtgatcgtgcccatatacatcagcgagatagcgcctccgcgagaacggggccttttcggtgctatgacgcaggttagcatcaatgtgggcatccttagcacacagactctggggcatttcttgagttacggctcggcatggagatgggtcctaggcacgggcgtcatcattgctggtctccagttgctcgggctctttctggtgcctgagagtcccgcttggttagccacgcataagaacgtggccctagctagacgtacactgcaacggatccgtggcaaaagcttcaacatcgaagaggagacagccgtctgggccgctggcagctcgtcccccgaagaagaggcgctgctcgacgactcgtcaacgacattggtaggctccacctccaggcgagactcgagctcgagcaaggcgagcactaaatccaatcaccatctgggcttcttcgacgtcgttaaggatccgcaataccgtcctgcccttattgcggctgtcggagtcatgtgtacgcagcagctgtgcggcatcaattcgatcatcatgtactcggtctcgctgctgagagacttcctgccggtgagctcgtcgttgctgaccatcgtgatctctgccatcaacctcatcacgaccattgcctgctcgccactgccagacaaactgggacgcaagacgtgtctcctgctttccatatttggccagggcaccagcgctctggcacttgccctgtcgatcctgttcggagccaagattctttctgccattgccgtgctcttcttcgtagccttcttcgcagttggtctggggcccgtgcccttcatcctcgcatcggagatggtgggacccgaagctgttggtgcggttcaatcctgctgcttaggagcgaactacgtcgctacattcttagttgctcaattcttccctatcatcaacgccgcgctgaatgcgagatttgggggcgcgggatgggtctacttcatcttcaccgtcctggcgggcctctgtggcttatttgtgttctggcgggtgcctgagacgaagggcaagaaggatgctgatgaggtatggggccgtacacgacgccttgactga

SEQ ID NO: 9467 - protein, 524 aa, Muscodor strobelii
  misc_feature: SGI Peptide ID NO. 562959
  misc_feature (60)..(465): Pfam Id: PF07690 Pfam Desc: Major Facilitator Superfamily
  misc_feature (20)..(517): Pfam Id: PF00083 Pfam Desc: Sugar (and other) transporter
  misc_feature (87)..(465): Pfam Id: PF07690 Pfam Desc: Major Facilitator Superfamily
  misc_feature (20)..(261): Pfam Id: PF00083 Pfam Desc: Sugar (and other) transporter
  misc_feature (310)..(517): Pfam Id: PF00083 Pfam Desc: Sugar (and other) transporter
  misc_feature (10)..(524): NCBI GI: 46117290 Blast Desc: FG04487.1 [Gibberella zeae PH-1]
  misc_feature (10)..(524): NCBI GI: 256729519 Blast Desc: [Nectria haematococca mpVI 77-13-4]
  misc_feature (6)..(524): NCBI GI: 171676535 Blast Desc: protein product [Podospora anserina] gi|170936334|emb|CAP60992.1| protein product [Podospora anserina]
  misc_feature (8)..(524): NCBI GI: 145604166 Blast Desc: MGG_13930 [Magnaporthe grisea 70-15] gi|145012219|gb|EDJ96875.1| MGG_13930 [Magnaporthe grisea 70-15]
  misc_feature (1)..(524): NCBI GI: 156066117 Blast Desc: SS1G_01070 [Sclerotinia sclerotiorum 1980] gi|154691928|gb|EDN91666.1| SS1G_01070 [Sclerotinia sclerotiorum 1980]
  misc_feature (10)..(524): NCBI GI: 85084887 Blast Desc: NCU07169 [Neurospora crassa OR74A] gi|28918485|gb|EAA28158.1| NCU07169 [Neurospora crassa OR74A] gi|28950265|emb|CAD71131.1| related to glucose transporter-3
  misc_feature (1)..(524): NCBI GI: 154294284 Blast Desc: BC1G_13828 [Botryotinia fuckeliana B05.10] gi|150844838|gb|EDN20031.1| BC1G_13828 [Botryotinia fuckeliana B05.10]
  misc_feature (36)..(518): NCBI GI: 116197375 Blast Desc: CHGG_06843 [Chaetomium globosum CBS 148.51] gi|88178122|gb|EAQ85590.1| CHGG_06843 [Chaetomium globosum CBS 148.51]
  misc_feature (36)..(524): NCBI GI: 261353594 Blast Desc: sugar transport protein [Verticillium albo-atrum VaMs.102]
  misc_feature (1)..(520): NCBI GI: 21309912 Blast Desc: AF376000_1 glucose transporter [Blumeria graminis]
MSSTSLRQCIRDVSPFLILLIVISTLGPLQFGFHLAELNSPQDVITCHAKKETVSSRISAAFHSWTSKSSSSTVTTTTSGLPDCIPMDNAQFAVVSSMFTLGGLIGALASGPISSARGRLFAMRLTGLFFLIGSILLTLGASITMMSIGRIFEGVGAGAATVIVPIYISEIAPPRERGLFGAMTQVSINVGILSTQTLGHFLSYGSAWRWVLGTGVIIAGLQLLGLFLVPESPAWLATHKNVALARRTLQRIRGKSFNIEEETAVWAAGSSSPEEEALLDDSSTTLVGSTSRRDSSSSKASTKSNHHLGFFDVVKDPQYRPALIAAVGVMCTQQLCGINSIIMYSVSLLRDFLPVSSSLLTIVISAINLITTIACSPLPDKLGRKTCLLLSIFGQGTSALALALSILFGAKILSAIAVLFFVAFFAVGLGPVPFILASEMVGPEAVGAVQSCCLGANYVATFLVAQFFPIINAALNARFGGAGWVYFIFTVLAGLCGLFVFWRVPETKGKKDADEVWGRTRRLD

SEQ ID NO: 9468 - DNA, 6272 bp, Muscodor strobelii
  misc_feature: SGI EST ID NO. CUFF.22552.0
  misc_feature: Variant of the nucleotide sequence at SEQ ID NO 9466
cttccccagatctatcctgccaagcagcgttagggcaggcggaacttcagcacccggacctgtctggccccgccgcgttgccgtcatcttcacctccagctcaacctcgtagctcagcttcttggtgacaggtcatatagctcaaattcatcggtatatacaaactcaccgcttcacaggctgcctaacttgtcgtgtctcgtcagcaatagtttgaactgctatggacaatcattgacttccgctttctccgcctctgtcgcgtatcgctgtgaattgaaccaacgaacaaccgtgtcatctgagtagatctgcaccgtactgtagcactatctccacgatgtcgtcgacatcgctccgacagtgcatccgggatgtgtcccccttcttgatcctgctcatcgtcattagcacgctggggccgctgcaattcggctttcatctcgccgagctcaactcaccccaagatgtcatcacctgtcacgccaagaaggaaactgtctcgtccaggatctcggctgccttccattcttggacctccaagagctccagcagcaccgtgacgacgacaacctcaggcttgccagactgtatcccgatggacaacgcccagttcgccgtggtctcgagcatgttcaccctcggcggtctaattggtgctcttgcgagcggcccaatttcttccgcacgaggacgtctcttcgccatgcgcctgactggcctgttcttcctcatcgggtccatcctccttaccctcggtgcctctatcaccatgatgtccatcggtcgaatcttcgagggtgtcggcgccggtgctgctaccgtgatcgtgcccatatacatcagcgagatagcgcctccgcgagaacggggccttttcggtgctatgacgcaggttagcatcaatgtgggcatccttagcacacagactctggggcatttcttgagttacggctcggcatggagatgggtcctaggcacgggcgtcatcattgctggtctccagttgctcgggctctttctggtgcctgagagtcccgcttggttagccacgcataagaacgtggccctagctagacgtacactgcaacggatccgtggcaaaagcttcaacatcgaagaggagacagccgtctgggccgctggcagctcgtcccccgaagaagaggcgctgctcgacgactcgtcaacgacattggtaggctccacctccaggcgagactcgagctcgagcaaggcgagcactaaatccaatcaccatctgggcttcttcgacgtcgttaaggatccgcaataccgtcctgcccttattgcggctgtcggagtcatgtgtacgcagcagctgtgcggcatcaattcgatcatcatgtactcggtctcgctgctgagagacttcctgccggtgagctcgtcgttgctgaccatcgtgatctctgccatcaacctcatcacgaccattgcctgctcgccactgccagacaaactgggacgcaagacgtgtctcctgctttccatatttggccagggcaccagcgctctggcacttgccctgtcgatcctgttcggagccaagattctttctgccattgccgtgctcttcttcgtagccttcttcgcagttggtctggggcccgtgcccttcatcctcgcatcggagatggtgggacccgaagctgttggtgcggttcaatcctgctgcttaggagcgaactacgtcgctacattcttagttgctcaattcttccctatcatcaacgccgcgctgaatgcgagatttgggggcgcgggatgggtctacttcatcttcaccgtcctggcgggcctctgtggcttatttgtgttctggcgggtgcctgagacgaagggcaagaaggatgctgatgaggtatggggccgtacacgacgccttgactgatgaaggaggggtgaatcttgacgagttcactttttgggatcagcgggcgttcgtactctttttctcattgttagattgactacatataggaattgattcattctagaccaggtcgcaatcgcatgttcttgattctgtggtctaattgtagaataccggccctgacgccgtccaccacatgtagctggccataagcatatatgtgtccatacatggcgtccgcagcctcgcgaatgatgtcctccaaaccggccatccccgcgcatcccatgaccacgacgtaaacatgggggataccattatcgctggctagcaagcgctgagtggcctcgacgagcttctgcctcacgatggctgggtcgacgccgtggtggaagtcggaggcgttgaggcctgttgactgtacacctgcaaacttgcggttcctgtcctcgtggccggcgccgaggaatgctttggttccatgcgtgaggtggtcttcccagaacttgcccgtggtcactatcccccactgttgatcctcagtctggagtagtgacagtgcggtgaggatggacgcctcgaagatgccggtcacggcaaagttgttggcgagtttctgcactttggagactagtgggtgcacactgaagcaggcgatgagcacggcgtcgaatgaggcggcccatcccttttcgtcgtcgaggctggccaggacggcctcggtgctcttgtctatatcgccttggtcattgatacttggaggcgaggaggcggggccagtgtatgtgtagatttctgttgactggatgcatattgtctcataagttttcttttcctttgaatctgaagatctggaaggtaattaactatcaaattgtaaacatatttacacgcaccctgggcaggtctaatgcgtcgatggcaggctggagcccatctgtcatggactgtgaggagttggggtttatgatgaggatgcgggtgctctggccgcggacacgtttgccgaggggcttaaggagggactgcttcaagttttgctcggtcatgttgaaagagacgagatagtattgagaatctagcgatgatgtgaaatatacgtgactgtggatacagtggataacctttccttcgtggtcttgatgaccgtctatgccgacttggatactatgtttaatctacttcgaggatgtaattaggacagtgacgaaaatcgagaatagatatgttcacaggcttgactacctgagtcatcgaataacgtgttccggtcccatgatccaattctccatcaagctgaatggtgtaagtgaagatggcgaggggcatccaatacgtctctgcggggtggcagttaccggcatgggggcagtttgggttagagttacagtggactcacgtacctacctaggctaggtagtcgggcacagccacagtcgcaacgtcaggcaatcccaattgacactttgaaggtattagcttaggtaggtactgcaagtaacagatacagccaaaccccgccatcccatcgcatcccgtcacctccaacctgaagctccatactctatatgtggtagcctatcagcacttcataccgaattacaacaagctctctcgaccacctcaaccgaccactcctcgcctcgtccatcgtccattcacttcgaactcggtgttctctaccgctgagctgtgccatctaagctccgtgctgtccgtctgacgcaagagagcaagcatggcggctcctcccatcgtgctcgacgggggcacgggcttcctcaaggtcggctacgcggcgcagaacttccccgagcaccagttcccgtccatcgtcgggcggccgatcctgcggtccgaggagaagggcgccgactcggacatggtcatcaaggacatcatgtgcggcgatgaggcggccgcggcgcgcacgatgctgcagatctcgtacccgatggagaacggcatcgtcaagcgctgggacgacatgcagcacctgtgggacttcaccttcttcgagaagatgcagatcgacccccgcggccgcaagatcctgctgaccgagcccccgatgaaccccctcaagaaccgcgagcagatgtgcgaggtcatgttcgagcgctatgactttggcggcgtctacgtcgccatccaggccgtgctggccctctacgcccaaggtctctcctcgggcgtcgtcgtcgactccggagacggcgtcacccacatcgtccccgtctacgaatccgtcgtcctcaaccacctgacccgccgcctcgacgtcgccggccgcgacgtcacccgcaacctcatcgccctgctgctgcggagaggctacgccctcaaccgcaccgccgacttcgagaccgtccgccagatcaaggagaagctctgctacgtctcctacgacctcgagctcgacaagcgcctcagcgaagataccaccgtcctcgtcgagagctacaccctccccgacggccgtgtcatccgcgtcggcagcgagcgcttcgaggcccccgagtgtctcttccagccacacctcgtcgactgcgagcagcccggcatcggcgagttcctcttcaacaccatccagtccgcagacgtagacgtccgctcctccctcttcaaggccattgtgctgtcgggcggcagcagcatgtatcccggtctgccgagcagattggagaaggagctgaagcagctgtggttgacgcgggtgctgcgtggcaaccccgagagactagacaagttcaaggtgaggatagaagacccgccgcgcaggagacacatggtcttcctgggcggcgccgtgctagccaacatcatggccgacaaggagagcatgtggattacgaaggaagaatgggcggaacagggtccgagagtcttggagaagttggggccacgttagaaggcacatgcagtagaagatcttctagcttttggttttggtctcacggtgagagacctgtcacgagtagccttgtagccagcccatggagtttgcaaaatatcaacattcccgccatctttcggacccaagctagccagataaatttggttgtattgagaccatacataacatactcgatttgcaaccaccagagtacaattcctaagcattgtcttagagaggatttcgacatcttgaatgatggcggttgaagtaaaggagatcctatgtatgggagtgactgcgccacatccgcactctagacccacccgccaagtcccagccggtatctcagcctggacgatgagcaagatgcgacgacgttgacaaacattacaacaacggtgacatataacataatcagtgcttctcatgagggcaaaagctttattcgtaataatatcacatattatcttctatctttgactctcccagcttgaatcaatctatttttctgctttgtctttgcttcgttggctttccatttgtcatcttggccctgcgtatccgaacacaagcacagtacttcctcttcccatcatatcgcctggggagtaccgcgttccgtactgctctgcaattaacaatttcttcgctctgaaaatcgcggcgcacccactggggaccattttgttgaaagactagtagttcgatcaactcagcggagaaagctccgggcagactttcgccctttattggcggcgggcttcgggcttgaagtccgtggatgcggaagcacggcgcagatcgtcatgagtctcactaatcctccctcgggcccggcctcggggtctaatgtgagaggcggtattaagaggagtgtccaggctgcttttgaaggttggtctgttcttgataatatttccgagattttgtttgccgtttcaccttgattgtgcatcgcctataattgccccttgcggttgggcgcgcgagaagcaaggaactttgggctttaggacctacgaatcctcgccccaggattagtactatacaatctcgagatcttggtcatatcacatcatttgacgggacacgacgaagaatcgaaactgattgccgttcctgtctcacgcctcatagccgtagccgggggcatgagcaccgcactgggcggcgtcagacgtcaggtagtccctcacgtcatcacggaaacagccagccaagacgacatctgatagggctgagccaagttttttcgccaatggattttcagcctcgagatgctgtgacatgccgcgaggagactgccggccagaatcctgtccacagtcgtggcttctcgcgtgcagatgcagatcttcgccgcgcttggcatgtgccaccttcacttgccatactgtctggacaggaacctgccgatggggaatcgacgacggttcctcgcgccaaagtctctgaagtgctggcacgcattttgtc

SEQ ID NO: 9469 - DNA, 840 bp, Muscodor strobelii
  misc_feature: SGI cDNA ID NO. 562960
  misc_feature: Elevated expression when VOC is produced
  misc_feature: Encodes the peptide sequence at SEQ ID NO 9470
atgaccgagcaaaacttgaagcagtccctccttaagcccctcggcaaacgtgtccgcggccagagcacccgcatcctcatcataaaccccaactcctcacagtccatgacagatgggctccagcctgccatcgacgcattagacctgcccaggtcaacagaaatctacacatacactggccccgcctcctcgcctccaagtatcaatgaccaaggcgatatagacaagagcaccgaggccgtcctggccagcctcgacgacgaaaagggatgggccgcctcattcgacgccgtgctcatcgcctgcttcagtgtgcacccactagtctccaaagtgcagaaactcgccaacaactttgccgtgaccggcatcttcgaggcgtccatcctcaccgcactgtcactactccagactgaggatcaacagtgggggatagtgaccacgggcaagttctgggaagaccacctcacgcatggaaccaaagcattcctcggcgccggccacgaggacaggaaccgcaagtttgcaggtgtacagtcaacaggcctcaacgcctccgacttccaccacggcgtcgacccagccatcgtgaggcagaagctcgtcgaggccactcagcgcttgctagccagcgataatggtatcccccatgtttacgtcgtggtcatgggatgcgcggggatggccggtttggaggacatcattcgcgaggctgcggacgccatgtatggacacatatatgcttatggccagctacatgtggtggacggcgtcagggccggtattctacaattagaccacagaatcaagaacatgcgattgcgacctggtctagaatga

SEQ ID NO: 9470 - protein, 279 aa, Muscodor strobelii
  misc_feature: SGI Peptide ID NO. 562960
  misc_feature (21)..(274): NCBI GI: 171676537 Blast Desc: protein product [Podospora anserina] gi|170936335|emb|CAP60993.1| protein product [Podospora anserina]
  misc_feature (17)..(273): NCBI GI: 256729337 Blast Desc: [Nectria haematococca mpVI 77-13-4]
  misc_feature (24)..(273): NCBI GI: 46117288 Blast Desc: FG04486.1 [Gibberella zeae PH-1]
  misc_feature (24)..(274): NCBI GI: 85084891 Blast Desc: NCU07170 [Neurospora crassa OR74A] gi|28918486|gb|EAA28159.1| conserved [Neurospora crassa OR74A]
  misc_feature (25)..(274): NCBI GI: 261353595 Blast Desc: conserved [Verticillium albo-atrum VaMs.102]
  misc_feature (24)..(274): NCBI GI: 28950266 Blast Desc: related to DCG1 protein [Neurospora crassa]
  misc_feature (25)..(261): NCBI GI: 145604168 Blast Desc: MGG_10687 [Magnaporthe grisea 70-15] gi|145012220|gb|EDJ96876.1| MGG_10687 [Magnaporthe grisea 70-15]
  misc_feature (25)..(270): NCBI GI: 189199490 Blast Desc: conserved [Pyrenophora tritici-repentis Pt-1C-BFP] gi|187983181|gb|EDU48669.1| conserved [Pyrenophora tritici-repentis Pt-1C-BFP]
  misc_feature (24)..(272): NCBI GI: 154294288 Blast Desc: BC1G_13830 [Botryotinia fuckeliana B05.10] gi|150844840|gb|EDN20033.1| BC1G_13830 [Botryotinia fuckeliana B05.10]
  misc_feature (36)..(270): NCBI GI: 169625463 Blast Desc: SNOG_16004 [Phaeosphaeria nodorum SN15] gi|160705658|gb|EAT76583.2| SNOG_16004 [Phaeosphaeria nodorum SN15]
  misc_feature: Useful for introducing or modulating the production of volatile compounds
MTEQNLKQSLLKPLGKRVRGQSTRILIINPNSSQSMTDGLQPAIDALDLPRSTEIYTYTGPASSPPSINDQGDIDKSTEAVLASLDDEKGWAASFDAVLIACFSVHPLVSKVQKLANNFAVTGIFEASILTALSLLQTEDQQWGIVTTGKFWEDHLTHGTKAFLGAGHEDRNRKFAGVQSTGLNASDFHHGVDPAIVRQKLVEATQRLLASDNGIPHVYVVVMGCAGMAGLEDIIREAADAMYGHIYAYGQLHVVDGVRAGILQLDHRIKNMRLRPGLE

SEQ ID NO: 9471 - DNA, 5811 bp, Muscodor strobelii
  misc_feature: SGI EST ID NO. CUFF.22553.1
  misc_feature: Variant of the nucleotide sequence at SEQ ID NO 9469
acatgccaagcgcggcgaagatctgcatctgcacgcgagaagccacgactgtggacaggattctggccggcagtctcctcgcggcatgtcacagcatctcgaggctgaaaatccattggcgaaaaaacttggctcagccctatcagatgtcgtcttggctggctgtttccgtgatgacgtgagggactacctgacgtctgacgccgcccagtgcggtgctcatgcccccggctacggctatgaggcgtgagacaggaacggcaatcagtttcgattcttcgtcgtgtcccgtcaaatgatgtgatatgaccaagatctcgagattgtatagtactaatcctggggcgaggattcgtaggtcctaaagcccaaagttccttgcttctcgcgcgcccaaccgcaaggggcaattataggcgatgcacaatcaaggtgaaacggcaaacaaaatctcggaaatattatcaagaacagaccaaccttcaaaagcagcctggacactcctcttaataccgcctctcacattagaccccgaggccgggcccgagggaggattagtgagactcatgacgatctgcgccgtgcttccgcatccacggacttcaagcccgaagcccgccgccaataaagggcgaaagtctgcccggagctttctccgctgagttgatcgaactactagtctttcaacaaaatggtccccagtgggtgcgccgcgattttcagagcgaagaaattgttaattgcagagcagtacggaacgcggtactccccaggcgatatgatgggaagaggaagtactgtgcttgtgttcggatacgcagggccaagatgacaaatggaaagccaacgaagcaaagacaaagcagaaaaatagattgattcaagctgggagagtcaaagatagaagataatatgtgatattattacgaataaagcttttgccctcatgagaagcactgattatgttatatgtcaccgttgttgtaatgtttgtcaacgtcgtcgcatcttgctcatcgtccaggctgagataccggctgggacttggcgggtgggtctagagtgcggatgtggcgcagtcactcccatacataggatctcctttacttcaaccgccatcattcaagatgtcgaaatcctctctaagacaatgcttaggaattgtactctggtggttgcaaatcgagtatgttatgtatggtctcaatacaaccaaatttatctggctagcttgggtccgaaagatggcgggaatgttgatattttgcaaactccatgggctggctacaaggctactcgtgacaggtctctcaccgtgagaccaaaaccaaaagctagaagatcttctactgcatgtgccttctaacgtggccccaacttctccaagactctcggaccctgttccgcccattcttccttcgtaatccacatgctctccttgtcggccatgatgttggctagcacggcgccgcccaggaagaccatgtgtctcctgcgcggcgggtcttctatcctcaccttgaacttgtctagtctctcggggttgccacgcagcacccgcgtcaaccacagctgcttcagctccttctccaatctgctcggcagaccgggatacatgctgctgccgcccgacagcacaatggccttgaagagggaggagcggacgtctacgtctgcggactggatggtgttgaagaggaactcgccgatgccgggctgctcgcagtcgacgaggtgtggctggaagagacactcgggggcctcgaagcgctcgctgccgacgcggatgacacggccgtcggggagggtgtagctctcgacgaggacggtggtatcttcgctgaggcgcttgtcgagctcgaggtcgtaggagacgtagcagagcttctccttgatctggcggacggtctcgaagtcggcggtgcggttgagggcgtagcctctccgcagcagcagggcgatgaggttgcgggtgacgtcgcggccggcgacgtcgaggcggcgggtcaggtggttgaggacgacggattcgtagacggggacgatgtgggtgacgccgtctccggagtcgacgacgacgcccgaggagagacctgtggtttgttaccatccattcatatatggagtgacgtagtgaggctattctcaccttgggcgtagagggccagcacggcctggatggcgacgtagacgccgccaaagtcatagcgctcgaacatgacctcgcacatctgctcgcggttcttgagggggttcatcgggggctcggtcagcaggatcttgcggccgcgggggtcgatctgcatcttctcgaagaaggtgaagtcccacaggtgctgcatgtcgtcccagcgcttgacgatgccgttctccatcgggtacgagatctgcagcatcgtgcgcgccgcggccgcctcatcgccgcacatgatgtccttgatgaccatgtccgagtcggcgcccttctcctcggaccgcaggatcggccgcccgacgatggacgggaactggtgctcggggaagttctgcgccgcgtagccgaccttgaggaagcccgtgcccccgtcgagcactgcgggcgtcacgtctcgtcagtattgcattgcgtcgggacaatgcgttcagacacgatgcgctcaggcgaggcgaggcgaggcgggctaggcaacgtcgaaacgaacgagactcaccgatgggaggagccgccatgcttgctctcttgcgtcagacggacagcacggagcttagatggcacagctcagcggtagagaacaccgagttcgaagtgaatggacgatggacgaggcgaggagtggtcggttgaggtggtcgagagagcttgttgtaattcggtatgaagtgctgataggctaccacatatagagtatggagcttcaggttggaggtgacgggatgcgatgggatggcggggtttggctgtatctgttacttgcagtacctacctaagctaataccttcaaagtgtcaattgggattgcctgacgttgcgactgtggctgtgcccgactacctagcctaggtaggtacgtgagtccactgtaactctaacccaaactgcccccatgccggtaactgccaccccgcagagacgtattggatgcccctcgccatcttcacttacaccattcagcttgatggagaattggatcatgggaccggaacacgttattcgatgactcaggtagtcaagcctgtgaacatatctattctcgattttcgtcactgtcctaattacatcctcgaagtagattaaacatagtatccaagtcggcatagacggtcatcaagaccacgaaggaaaggttatccactgtatccacagtcacgtatatttcacatcatcgctagattctcaatactatctcgtctctttcaacatgaccgagcaaaacttgaagcagtccctccttaagcccctcggcaaacgtgtccgcggccagagcacccgcatcctcatcataaaccccaactcctcacagtccatgacagatgggctccagcctgccatcgacgcattagacctgcccaggtcaacagaaatctacacatacactggccccgcctcctcgcctccaagtatcaatgaccaaggcgatatagacaagagcaccgaggccgtcctggccagcctcgacgacgaaaagggatgggccgcctcattcgacgccgtgctcatcgcctgcttcagtgtgcacccactagtctccaaagtgcagaaactcgccaacaactttgccgtgaccggcatcttcgaggcgtccatcctcaccgcactgtcactactccagactgaggatcaacagtgggggatagtgaccacgggcaagttctgggaagaccacctcacgcatggaaccaaagcattcctcggcgccggccacgaggacaggaaccgcaagtttgcaggtgtacagtcaacaggcctcaacgcctccgacttccaccacggcgtcgacccagccatcgtgaggcagaagctcgtcgaggccactcagcgcttgctagccagcgataatggtatcccccatgtttacgtcgtggtcatgggatgcgcggggatggccggtttggaggacatcattcgcgaggctgcggacgccatgtatggacacatatatgcttatggccagctacatgtggtggacggcgtcagggccggtattctacaattagaccacagaatcaagaacatgcgattgcgacctggtctagaatgaatcaattcctatatgtagtcaatctaacaatgagaaaaagagtacgaacgcccgctgatcccaaaaagtgaactcgtcaagattcacccctccttcatcagtcaaggcgtcgtgtacggccccatacctcatcagcatccttcttgcccttcgtctcaggcacccgccagaacacaaataagccacagaggcccgccaggacggtgaagatgaagtagacccatcccgcgcccccaaatctcgcattcagcgcggcgttgatgatagggaagaattgagcaactaagaatgtagcgacgtagttcgctcctaagcagcaggattgaaccgcaccaacagcttcgggtcccaccatctccgatgcgaggatgaagggcacgggccccagaccaactgcgaagaaggctacgaagaagagcacggcaatggcagaaagaatcttggctccgaacaggatcgacagggcaagtgccagagcgctggtgccctggccaaatatggaaagcaggagacacgtcttgcgtcccagtttgtctggcagtggcgagcaggcaatggtcgtgatgaggttgatggcagagatcacgatggtcagcaacgacgagctcaccggcaggaagtctctcagcagcgagaccgagtacatgatgatcgaattgatgccgcacagctgctgcgtacacatgactccgacagccgcaataagggcaggacggtattgcggatccttaacgacgtcgaagaagcccagatggtgattggatttagtgctcgccttgctcgagctcgagtctcgcctggaggtggagcctaccaatgtcgttgacgagtcgtcgagcagcgcctcttcttcgggggacgagctgccagcggcccagacggctgtctcctcttcgatgttgaagcttttgccacggatccgttgcagtgtacgtctagctagggccacgttcttatgcgtggctaaccaagcgggactctcaggcaccagaaagagcccgagcaactggagaccagcaatgatgacgcccgtgcctaggacccatctccatgccgagccgtaactcaagaaatgccccagagtctgtgtgctaaggatgcccacattgatgctaacctgcgtcatagcaccgaaaaggccccgttctcgcggaggcgctatctcgctgatgtatatgggcacgatcacggtagcagcaccggcgccgacaccctcgaagattcgaccgatggacatcatggtgatagaggcaccgagggtaaggaggatggacccgatgaggaagaacaggccagtcaggcgcatggcgaagagacgtcctcgtgcggaagaaattgggccgctcgcaagagcaccaattagaccgccgagggtgaacatgctcgagaccacggcgaactgggcgttgtccatcgggatacagtctggcaagcctgaggttgtcgtcgtcacggtgctgctggagctcttggaggtccaagaatggaaggcagccgagatcctggacgagacagtttccttcttggcgtgacaggtgatgacatcttggggtgagttgagctcggcctgtta

SEQ ID NO: 9472 - DNA, 1173 bp, Muscodor strobelii
  misc_feature: SGI cDNA ID NO. 562961
  misc_feature: Encodes the peptide sequence at SEQ ID NO 9473
atggcggctcctcccatcgtgctcgacgggggcacgggcttcctcaaggtcggctacgcggcgcagaacttccccgagcaccagttcccgtccatcgtcgggcggccgatcctgcggtccgaggagaagggcgccgactcggacatggtcatcaaggacatcatgtgcggcgatgaggcggccgcggcgcgcacgatgctgcagatctcgtacccgatggagaacggcatcgtcaagcgctgggacgacatgcagcacctgtgggacttcaccttcttcgagaagatgcagatcgacccccgcggccgcaagatcctgctgaccgagcccccgatgaaccccctcaagaaccgcgagcagatgtgcgaggtcatgttcgagcgctatgactttggcggcgtctacgtcgccatccaggccgtgctggccctctacgcccaaggtctctcctcgggcgtcgtcgtcgactccggagacggcgtcacccacatcgtccccgtctacgaatccgtcgtcctcaaccacctgacccgccgcctcgacgtcgccggccgcgacgtcacccgcaacctcatcgccctgctgctgcggagaggctacgccctcaaccgcaccgccgacttcgagaccgtccgccagatcaaggagaagctctgctacgtctcctacgacctcgagctcgacaagcgcctcagcgaagataccaccgtcctcgtcgagagctacaccctccccgacggccgtgtcatccgcgtcggcagcgagcgcttcgaggcccccgagtgtctcttccagccacacctcgtcgactgcgagcagcccggcatcggcgagttcctcttcaacaccatccagtccgcagacgtagacgtccgctcctccctcttcaaggccattgtgctgtcgggcggcagcagcatgtatcccggtctgccgagcagattggagaaggagctgaagcagctgtggttgacgcgggtgctgcgtggcaaccccgagagactagacaagttcaaggtgaggatagaagacccgccgcgcaggagacacatggtcttcctgggcggcgccgtgctagccaacatcatggccgacaaggagagcatgtggattacgaaggaagaatgggcggaacagggtccgagagtcttggagaagttggggccacgttag

SEQ ID NO: 9473 - protein, 390 aa, Muscodor strobelii
  misc_feature: SGI Peptide ID NO. 562961
  misc_feature (2)..(389): Pfam Id: PF00022 Pfam Desc: Actin
  misc_feature (4)..(390): NCBI GI: 116197377 Blast Desc: conserved [Chaetomium globosum CBS 148.51] gi|88178123|gb|EAQ85591.1| conserved [Chaetomium globosum CBS 148.51]
  misc_feature (1)..(390): NCBI GI: 261353596 Blast Desc: actin [Verticillium albo-atrum VaMs.102]
  misc_feature (1)..(390): NCBI GI: 156066125 Blast Desc: actin-like protein 2 [Sclerotinia sclerotiorum 1980] gi|154691932|gb|EDN91670.1| actin-like protein 2 [Sclerotinia sclerotiorum 1980]
  misc_feature (1)..(390): NCBI GI: 154294286 Blast Desc: actin-related protein 2 [Botryotinia fuckeliana B05.10] gi|150844839|gb|EDN20032.1| actin-related protein 2 [Botryotinia fuckeliana B05.10]
  misc_feature (4)..(390): NCBI GI: 256729518 Blast Desc: Actin-related protein, ARP2 class [Nectria haematococca mpVI 77-13-4]
  misc_feature (5)..(390): NCBI GI: 171676539 Blast Desc: protein product [Podospora anserina] gi|170936336|emb|CAP60994.1| protein product [Podospora anserina]
  misc_feature (5)..(390): NCBI GI: 85084895 Blast Desc: NCU07171 [Neurospora crassa OR74A] gi|28918487|gb|EAA28160.1| NCU07171 [Neurospora crassa OR74A] gi|28950267|emb|CAD71133.1| actin-like protein ACT2 [Neurospora
  misc_feature (2)..(390): NCBI GI: 39971339 Blast Desc: conserved [Magnaporthe grisea 70-15] gi|145012216|gb|EDJ96872.1| conserved [Magnaporthe grisea 70-15]
  misc_feature (4)..(390): NCBI GI: 46117286 Blast Desc: FG04485.1 [Gibberella zeae PH-1]
  misc_feature (1)..(390): NCBI GI: 240273000 Blast Desc: endocytosis and membrane growth and polarity [Ajellomyces capsulatus H143]
MAAPPIVLDGGTGFLKVGYAAQNFPEHQFPSIVGRPILRSEEKGADSDMVIKDIMCGDEAAAARTMLQISYPMENGIVKRWDDMQHLWDFTFFEKMQIDPRGRKILLTEPPMNPLKNREQMCEVMFERYDFGGVYVAIQAVLALYAQGLSSGVVVDSGDGVTHIVPVYESVVLNHLTRRLDVAGRDVTRNLIALLLRRGYALNRTADFETVRQIKEKLCYVSYDLELDKRLSEDTTVLVESYTLPDGRVIRVGSERFEAPECLFQPHLVDCEQPGIGEFLFNTIQSADVDVRSSLFKAIVLSGGSSMYPGLPSRLEKELKQLWLTRVLRGNPERLDKFKVRIEDPPRRRHMVFLGGAVLANIMADKESMWITKEEWAEQGPRVLEKLGPR

SEQ ID NO: 9474 - DNA, 6272 bp, Muscodor strobelii; identical to SEQ ID NO: 9468
  misc_feature: SGI EST ID NO. CUFF.22552.0
  misc_feature: Variant of the nucleotide sequence at SEQ ID NO 9472

SEQ ID NO: 9475 - DNA, 1326 bp, Muscodor strobelii
  misc_feature: SGI cDNA ID NO. 562962
  misc_feature: Encodes the peptide sequence at SEQ ID NO 9476
atgccacccacagatcctctcgaccgcggagacagaggcggctatcgggccaaggtcaaggtccaggacaaataccgcgttgttggcttcattagctccggaacctacggtcgtgtgtacaaagcccacagcaaggttggtcaggttggtgatttcgccatcaagaagttcaagcccgacaaggagggagagcagatccaatacacgggtatttctcagagtgccattcgggagatggcattatgctccgagctccagcatgacaacgttatcaaacttatcgagataatactagaagacaaatgcatcttcatggtgtttgagtatgccgagcatgatctcttgcagatcatccaccaccatactcaggcccctagacacaacatcccgccctcgaccataaagagtatcatgttccagcttctcaatgggtgccagtacctacacaagaattgggtgttacaccgcgatttgaaaccagccaacatcatggtcacgtcttcgggtcgagttaaaatcggcgacttgggattggccagattgttccagaaaccgctgcattccctttttagcggtgacaaggttgtcgtgaccatatggtatcgcgcacctgaactcctgctcggcagccgccattacactccggctgtggatatgtgggctgtagggtgcattttcgctgaactcctatcgctgcggccgatcttcaaaggagaagaagccaagatggacaagaagacggtcccgttccagcgcaatcagatgcaaaagattgtcgagatcatggggataccgagtaaagagcggtggcccgacctagtaagcatgcccgagtttggcagcctgtcgcaggtccagcctccgatgctgtatccgagccatcataacgggagacatccggttccgcagcccaacgggcagctggagaagtggtataataatatcgtcaatcaacttggacctgtcaacgcgccgacgtacaacgggagtttgaccagccttgggcaagacgggtataacttgctctccaagcttctggaatgggaccctaataacagactcacggcgattgacgcgttgaagcacccgttctttgggaactcggcgccgggtacggtctcgagcatgtctcaggccaatgctctgagttcttcggtcccgcagattagtgggaactgtttcgagggcctgaaagctagtgcctatccgaccagacgagttagtcaggaagacaatgatatcaggacgagttccctgcccggcacgaagagatcgggattgccggatgatagtctacgaccgagcaagaggatcaaggaaaattag

SEQ ID NO: 9476 - protein, 441 aa, Muscodor strobelii
  misc_feature: SGI Peptide ID NO. 562962
  misc_feature (25)..(365): Pfam Id: PF00069 Pfam Desc: Protein kinase domain
  misc_feature (33)..(181): Pfam Id: PF07714 Pfam Desc: Protein tyrosine kinase
  misc_feature (9)..(441): NCBI GI: 171676541 Blast Desc: protein product [Podospora anserina] gi|170936337|emb|CAP60995.1| protein product [Podospora anserina]
  misc_feature (6)..(440): NCBI GI: 116197379 Blast Desc: CHGG_06845 [Chaetomium globosum CBS 148.51] gi|121782238|sp|Q2GYV9.1|SSN3_CHAGB RecName: Full=Serine/threonine-protein kinase SSN3; AltName: kinase 8 CBS
  misc_feature (6)..(440): NCBI GI: 261353597 Blast Desc: meiotic mRNA stability protein kinase SSN3 [Verticillium albo-atrum VaMs.102]
  misc_feature (4)..(440): NCBI GI: 121809223 Blast Desc: SSN3_GIBMO RecName: Full=Serine/threonine-protein kinase SSN3; AltName: Full=Cyclin-dependent kinase 8 gi|68989465|gb|AAY99646.1| Fck1 [Gibberella moniliformis]
  misc_feature (14)..(440): NCBI GI: 154294282 Blast Desc: BC1G_13827 [Botryotinia fuckeliana B05.10] gi|150844837|gb|EDN20030.1| BC1G_13827 [Botryotinia fuckeliana B05.10]
  misc_feature (4)..(440): NCBI GI: 256729517 Blast Desc: [Nectria haematococca mpVI 77-13-4]
  misc_feature (4)..(440): NCBI GI: 46117284 Blast Desc: FG04484.1 [Gibberella zeae PH-1]
  misc_feature (5)..(440): NCBI GI: 166222392 Blast Desc: FG04484.1 [Gibberella zeae PH-1]
  misc_feature (13)..(440): NCBI GI: 255938341 Blast Desc: Pc13g15460 [Penicillium chrysogenum Wisconsin 54-1255] gi|211584561|emb|CAP92615.1| Pc13g15460 [Penicillium chrysogenum Wisconsin 54-1255]
  misc_feature (14)..(440): NCBI GI: 166222397 Blast Desc: Pc13g15460 [Penicillium chrysogenum Wisconsin 54-1255] gi|211584561|emb|CAP92615.1| Pc13g15460 [Penicillium chrysogenum Wisconsin 54-1255]
  misc_feature (6)..(440): SWISSPROT Homolog: EC 2.7.11.22 Cyclin-dependent kinase
  misc_feature (6)..(440): SWISSPROT Homolog: EC 2.7.11.23 [RNA-polymerase]-subunit kinase
MPPTDPLDRGDRGGYRAKVKVQDKYRVVGFISSGTYGRVYKAHSKVGQVGDFAIKKFKPDKEGEQIQYTGISQSAIREMALCSELQHDNVIKLIEIILEDKCIFMVFEYAEHDLLQIIHHHTQAPRHNIPPSTIKSIMFQLLNGCQYLHKNWVLHRDLKPANIMVTSSGRVKIGDLGLARLFQKPLHSLFSGDKVVVTIWYRAPELLLGSRHYTPAVDMWAVGCIFAELLSLRPIFKGEEAKMDKKTVPFQRNQMQKIVEIMGIPSKERWPDLVSMPEFGSLSQVQPPMLYPSHHNGRHPVPQPNGQLEKWYNNIVNQLGPVNAPTYNGSLTSLGQDGYNLLSKLLEWDPNNRLTAIDALKHPFFGNSAPGTVSSMSQANALSSSVPQISGNCFEGLKASAYPTRRVSQEDNDIRTSSLPGTKRSGLPDDSLRPSKRIKEN

SEQ ID NO: 9477 - DNA, 1137 bp, Muscodor strobelii
  misc_feature: SGI cDNA ID NO. 562963
  misc_feature: Reduced expression when VOC is produced
  misc_feature: Encodes the peptide sequence at SEQ ID NO 9478
atgccggatctaggagaagagagaggcagccccaaggccggcgcatcgtggcatcgcgacaccaacaccgacacggccgacctgccgtccttctactcgccccgagccagccccagcacacgcccgcctacacgctctctctcccatcagacacccggccaggacgaacggcatctggatgacttctctctgtcctcatacacacccgcccccaatgcctcggcggcgggagcctcgatcctagactcgacccaactgccgccaccctcgctcctctcccccgccttcacccctcccgcgacgcccggcaccgccactccgtccaccgagcaccctcgcagcgtgcccgtcgactcctccatcccctcgggcggctgcggcaccaagagaccccggctgctcgagaccctgcccgaggtgcagtgcgtcgtccgcgcccgcatcccgacgacagagggcagcgagatgttcctccacctctacaccaacgacgtcgacaacaaggagcatctggccatcaccgagatggaccgcatgatcaggggtgcctacgtcggccgcctgtatcccggcaggaccgacagcggcatggccggcagagaagggtccgccatcgacgctgccggcccgccgctcgtccggatccattccgaatgctacacgggcgagacggcgtggtccgcccgctgcgactgcggcgagcagctcgacgaagcagcccggctcatgtctctcccctccgcggcgaacggcggcatcataatctacctccggcaggagggacgaggcatagggctgggcgagaagctgaaagcctacaatctgcaggatctcgggtccgacacggtcgaggccaacttgctgctgagacacccggcagatgcgaggagttacgggctggcgacggcgatgctgagggatctgggccagaccgaggtcaggcttctgaccaacaatccggagaagattcgtgctgtagagggtccgaatcgcgaggtcaaagtcacagagcgcgtggctatggtccctttgagctggaagggaaagggtgggttccggtcgaaagaggtggagggctacttgaagactaagatcgagaagatgggccatatgctggaaatgggcggcggcctctaa

SEQ ID NO: 9478 - protein, 378 aa, Muscodor strobelii
  misc_feature: SGI Peptide ID NO. 562963
  misc_feature (140)..(341): Pfam Id: PF00925 Pfam Desc: GTP cyclohydrolase II
  misc_feature (209)..(341): Pfam Id: PF00925 Pfam Desc: GTP cyclohydrolase II
  misc_feature (17)..(375): NCBI GI: 171676515 Blast Desc: protein product [Podospora anserina] gi|170936324|emb|CAP60982.1| protein product [Podospora anserina]
  misc_feature (10)..(375): NCBI GI: 85084965 Blast Desc: GTP cyclohydrolase-2 [Neurospora crassa OR74A] gi|28918504|gb|EAA28177.1| GTP cyclohydrolase-2 [Neurospora crassa OR74A] gi|28950227|emb|CAD71094.1| GTP cyclohydrolase II
  misc_feature (28)..(375): NCBI GI: 39971337 Blast Desc: MGG_10689 [Magnaporthe grisea 70-15] gi|145012217|gb|EDJ96873.1| MGG_10689 [Magnaporthe grisea 70-15]
  misc_feature (28)..(376): NCBI GI: 256729327 Blast Desc: NECHADRAFT_105166 [Nectria haematococca mpVI 77-13-4]
  misc_feature (28)..(374): NCBI GI: 46117262 Blast Desc: FG04473.1 [Gibberella zeae PH-1]
  misc_feature (17)..(375): NCBI GI: 261353608 Blast Desc: GTP cyclohydrolase-2 [Verticillium albo-atrum VaMs.102]
  misc_feature (1)..(375): NCBI GI: 156066099 Blast Desc: SS1G_01061 [Sclerotinia sclerotiorum 1980] gi|154691919|gb|EDN91657.1| SS1G_01061 [Sclerotinia sclerotiorum 1980]
  misc_feature (1)..(375): NCBI GI: 154294270 Blast Desc: BC1G_13821 [Botryotinia fuckeliana B05.10] gi|150844831|gb|EDN20024.1| BC1G_13821 [Botryotinia fuckeliana B05.10]
  misc_feature (82)..(373): NCBI GI: 119495281 Blast Desc: GTP cyclohydrolase II, [Neosartorya fischeri NRRL 181] gi|119412591|gb|EAW22532.1| GTP cyclohydrolase II, [Neosartorya fischeri NRRL 181]
  misc_feature (26)..(373): NCBI GI: 121701321 Blast Desc: GTP cyclohydrolase II, [Aspergillus clavatus NRRL 1] gi|119397068|gb|EAW07499.1| GTP cyclohydrolase II, [Aspergillus clavatus NRRL 1]
  misc_feature (135)..(374): SWISSPROT Homolog: EC 3.5.4.25 GTP cyclohydrolase II
  misc_feature: Useful for introducing or modulating the production of volatile compounds
MPDLGEERGSPKAGASWHRDTNTDTADLPSFYSPRASPSTRPPTRSLSHQTPGQDERHLDDFSLSSYTPAPNASAAGASILDSTQLPPPSLLSPAFTPPATPGTATPSTEHPRSVPVDSSIPSGGCGTKRPRLLETLPEVQCVVRARIPTTEGSEMFLHLYTNDVDNKEHLAITEMDRMIRGAYVGRLYPGRTDSGMAGREGSAIDAAGPPLVRIHSECYTGETAWSARCDCGEQLDEAARLMSLPSAANGGIIIYLRQEGRGIGLGEKLKAYNLQDLGSDTVEANLLLRHPADARSYGLATAMLRDLGQTEVRLLTNNPEKIRAVEGPNREVKVTERVAMVPLSWKGKGGFRSKEVEGYLKTKIEKMGHMLEMGGGL

SEQ ID NO: 9479 - DNA, 7656 bp, Muscodor strobelii
  misc_feature: SGI EST ID NO. CUFF.22510.1
  misc_feature: Variant of the nucleotide sequence at SEQ ID NO 9477
atccaaagagccgcccctagtgcacagacacacctgcaccacttccgcatccagatgctagtgttttaagacaagcgctgactcccagcctctggcccagtccagcatcgagatcggatggattgcctgccaccactgagtaatctctcgtgtcacacctgtcccagaatgtaataacacgggcaagactggcagatgtcaccggtcttcaagtccagtagcaacaagatgccaagaaagcttcttcaagcaaacgagccgtggaacgaagaggcctacccgtgaagcgatatggatgacttggacaatcccaacgcgacaggagtcatcctacgtaatgcaggataaggttgagtacaaattagacacactgcgcgaatattcgaagcagaagttcgaagccagaaggtatggcggcgtcaattgtatatacctacctatctgttcggcttcatcacagacctcgttgcgtcgcggaatacacagcaaccaatgaggaccaccccgccaaagccggccttcaccatccctgaaaggttctggatcgtcatgagatcccatcttcatgcctctgtagctcgaccaccaaccaacaatcacgtctcagcttgttggtatggactcgtctgcggtccccgtcactcagctcgccaacctctggtgccttcaactcgatacgaccaaacgatacgaatattttttgactacgcccgggagcagaggcggtcagagattcatgaatgctcggcaatccaaaatttcgacctttccctctccgctcttcatatatgcttacatcatccacccatatctctgatagtcacagctaggtttgtctgcgagtcacaagcttcagctcgatgttgctcttgttaagagcagttgcaactgtgaaaattggatttgaaagcaatcagcatggattgtttacccgtcgaactctggctgcagatttttgggcatctggacgagagggcaccgtctcaaagacaccgccatgagccgccaagtttgctatcgttcttggccaatccaacatctcaaaaacctctcaagaccctttcgctcgtatgcaaggctatgcgtattttggtactgccaatccttttccgtaatttgcaatgggctccttacatatgctcactaagacacttcaccctgaatcccatcccgctcattagttttctcgataagaatgatctcgttcgacatgcagtcagcttcacgctgcttattggatatgacgagccgtgggacctttcggctgatccgtacgaaggtatgatacggccggctgacctcgaatggttctggtcacagctgttctccgtcatcgacccgctacgtttcaccttggtggcaccacccaccacactggccgctttaatatcgcgtgtggtgtcactcaacgacagttgggcgtttggtgagcattatcacatgtttacactatctcgcgagactcgtgaagaagcgaaagaagatccagtctctcaagacgttccagcgagcgagaagacagtccgtgccaaccaagtcgccccaagttcgctgggcaacccgcctcccagcccagtgtcactgaattcgtctatttacggtcgaaggacgtcgacttcggtgcggccaaggtcatcaccgccatgtgtactgtttacatcgcgtcgatggacctcgctgctgctcaacgaagggtcgtataccaatacatatcgataccaaaactttgaggagctcgagccgccgtctctcctgggcgcgtttcttggcacagagggctatccaaataacaaaccactgatcacatcgtcgattgtgaattttggatacgtcgccgtatttccgccagcatcacatgtctacaccttgctcgagaacgttccggtgctggataagctgtttctacaaatcacaccagacccagataactacctgaaagaggatgccgactgggataacatcgacgaggcagagctgtggctccagcggaatcagatctactcgttgctggtgcgcgaattgatggcggaccttggccagcggaaaatccgcgtgtttgagagcggggatccatcggatcggaaagtctgggatttgacgtcggcctggttcctcagcagtggtctgaagacatggaagattgtgaaagaaggcctgtttgtcaggacccgaacgctccaaggcgaaccgggtagggatgcgagcggccaggcccaccaggacgacgagaccggcgtcttcgctgtcaatggcaacatgctccaccaaggtctaatgtcacctgacggtcgtctcgagcaaatcatcttcaacggggtgcgggaactaccattttcccacctgcggatatacatcaacaatatcggcttcggcgacgtggaagaagaagaagaagaagattgaaggcatgctgcatgggggaggctggttgctcatccctacggaagatgaagagtgacgtcgagaacttgcatacgggcgttgggccatgttgtttgttctccaatcagggcatagtcaggttacattgtgaccccactggcacataaatgtgtagatgcaacatgagcgttgaaaacgtcttggagtcaaactgcagagagcgacattccggtttatttatgtacctgcttgccggtttcctttcattctgcatgccatttgttgcgttgtagcccagcgtcacatgtctcgcatacccgatctttggaaacagcccacgtggtgcagagacagatgagtgtcgactttagccacaacgcacatgcgcaaaagccaaaacgccgctgattagtcatcttgagaagaaaggtctaaaagtttagcgaccaggggcaggacccaatgcgcccaacaaacgaccaaaaaattatacaaaagacttaattgccaacctcgaaagacacacgtcagtcataatgaaggggtcaatagtgatgttcatagtggatgatccccagaggtgatcaccaaggtgctcaccaagatgctcacaaagatgatgacgaaagcacggtaatccggacagtcgggaatgggtaggcgggatggctgcggatcagccggggcaggcgctggaagcccatcggcattgctgaatttccgtggacccctatggacatgctcaacaatggccaacatgtgctcagtacatgtaatacctgctgccagctcaaaatatacatactactgaatcaatctcacgaatcgcgaccgaagctaatcaatcttctacttttacctgtcctgtttgcattcggcggccattccatatctgtcccaattgatcgattacctactatttgcgactgaagactgtgctgttatatatcctctatcggacatatttctcatctgccgccgtgtccgattcccgccgccactgcccctccatcgtcccgtcatttattcatctattcacctattcctaccttacttcggtatatcacactgcaaacgccgaccaagctataagctcgtgcgctgacgacgtccttcaccttccattgagtggccgagccgtctgccgcgatgccggatctaggagaagagagaggcagccccaaggccggcgcatcgtggcatcgcgacaccaacaccgacacggccgacctgccgtccttctactcgccccgagccagccccagcacacgcccgcctacacgctctctctcccatcagacacccggccaggacgaacggcatctggatgacttctctctgtcctcatacacacccgcccccaatgcctcggcggcgggagcctcgatcctagactcgacccaactgccgccaccctcgctcctctcccccgccttcacccctcccgcgacgcccggcaccgccactccgtccaccgagcaccctcgcagcgtgcccgtcgactcctccatcccctcgggcggctgcggcaccaagagaccccggctgctcgagaccctgcccgaggtgcagtgcgtcgtccgcgcccgcatcccgacgacagagggcagcgagatgttcctccacctctacaccaacgacgtcgacaacaaggagcatctggccatcgtcttcggggccccacatccggagcaccagcctcgatgcgccccgcgacggcgagaccgagatggaccgcatgatcaggggtgcctacgtcggccgcctgtatcccggcaggaccgacagcggcatggccggcagagaagggtccgccatcgacgctgccggcccgccgctcgtccggatccattccgaatgctacacgggcgagacggcgtggtccgcccgctgcgactgcggcgagcagctcgacgaagcagcccggctcatgtctctcccctccgcggcgaacggcggcatcataatctacctccggcaggagggacgaggcatagggctgggcgagaagctgaaagcctacaatctgcaggatctcgggtccgacacggtcgaggccaacttgctgctgagacacccggcagatgcgaggagttacgggctggcgacggcgatgctgagggatctgggccagaccgaggtcaggcttctgaccaacaatccggagaagattcgtgctgtagagggtccgaatcgcgaggtcaaagtcacagagcgcgtggctatggtccctttgagctggaagggaaagggtgggttccggtcgaaagaggtggagggctacttgaagactaagatcgagaagatgggccatatgctggaaatgggcggcggcctctaagcgaacgacgtatagataatcaatgtttgggttcgtgcaatctgcgaggcatatacgaaaattccgagtaaagctctggcaggtgcattcgaaggacttctcgatagagattgaggcgttcaatgccatttagaccatccctatgggtggtttctagaaactccatgtcgtatgttgatatatagatgcacaagatcaccacatctactaggagcaggagccttggctgatcatgtagaattactttagcttcctgggtagagaatatcgaaatgcaagacgcgccttgccatgttggctgtcactaccagagagtatgactctagatacccaaacagtcaaatgatatctatcttatttgtagatcgggaatgttatgtccccgaggctgcaattcgaacagcgattgacaagacatgcaaactactactcgaactgccaaccacacaaaaactcaaaatgaaatttgaagtgatcgacaatgagctcgtgctcgaaactcttacttatacggccactatgcaagtttgactacacgcaataaatggccaggctcagacctatacgacaaacttgatacaatgggaaacatcattagaaagcaatagaggaacacgatagtagtatacgactcttctaacccttgtcaaaagagtcttcttcacagtcattctttccatgctgaacatgcgtgtaaaaatcatctgcaacgtgtaaatcttacatcggccccaaacaatgccatctgtcatgtacaggataacctttgcattcgactgtttattccaagagtattcggcttttagccctaatccaacccactctactggtctatcagccaatataatgataattcccaggtctgaaataagggtttatccccttacctaaacaagctactactctgaccctcttgaatcttcctgcccagaactattatctctctcatcgtcgccttcgtaccccctttcgagccactcgacttcattcccttcaatattatccaaccacctcctgactggctcaaacgggtcatacgggcgcgggtactcccaatccggggcctggagcacaggagtgggaagacgtggcataatggggggaggcggaggcaccataactggaggaggcctcaaagcaggaagacgagcagaagctggtggaggaggcccttgaatctgccatgcagtgagctcttcacctcctccacagggagcctgaggcagcacagtcatggtgggatgatcaccaacagaaccggaccattgactcgtatcttgggatatcgagtcgctctgattgtggtgaggtgttgaccaagtcgtatactcaggcagctgagcactcgttccaagccctacatcctcgccattgtcaccgtcatcgtgtcgtgggcctgggatcgggatcggaccataaaatggccatcccagcggcatatgcgaccgtgcggccgccgcagtattcctctcagcagcctcttgcaaatgttgctgatagagcctgagttttgcccaatgctcgtcgggtatctcgccccaaaacacagagatatctttttggcctccatcaggactctttctagagctcacacccggaacctttcgggaagggtcaacaggaggaaccttttcggaatgcccctaattttccttgatcctcttgctcggtcgtagactatcatccggcaatcccgatctcttcgtgccgggcagggaactcgtcctgatatcattgtcttcctgactaactcgtctggtcggataggcactagctttcaggccctcgaaacagttcccactaatctgcgggaccgaagaactcagagcattggcctgagacatgctcgagaccgtacccggcgccgagttcccaaagaacgggtgcttcaacgcgtcaatcgccgtgagtctgttattagggtcccattccagaagcttggagagcaagttatacccgtcttgcccaaggctggtcaaactcccgttgtacgtcggcgcgttgacaggtccaagttgattgacgatattattataccacttctccagctgcccgttgggctgcggaaccggatgtctcccgttatgatggctcggatacagcatcggaggctggacctgcgacaggctgccaaactcgggcatgcttactaggtcgggccaccgctctttactcggtatccccatgatctcgacaatcttttgcatctgattgcgctggaacgggaccgtcttcttgtccatcttggcttcttctcctttgaagatcggccgcagcgataggagttcagcgaaaatgcaccctacagcccacatatccacagccggagtgtaatggcggctgccgagcaggagttcaggtgcgcgataccatatggtcacgacaaccttgtcaccgctaaaaagggaatgcagcggtttctggaacaatctggccaatcccaagtcgccgattttaactcgacccgaagacgtgaccatgatgttggctggtttcaaatcgcggtgtaacacccaattcttgtgtaggtactggcacccattgagaagctggaacatgatactctttatggtcgagggcgggatgttgtgtctaggggcctgagtatggtggtggatgatctgcaagagatcatgctcggcatactcaaacaccatgaagatgcatttgtcttctagtattatctcgataagtttgataacgttgtcatgctggagctcggagcataatgccatctcccgaatggcactctgagaaatacccgtgtattggatctgctctccctccttgtcgggcttgaacttcttgatggcgaaatcaccaacctgaccaaccttgctgtgggctttgtacacacgaccgtaggttccggagctaatgaagccaacaacgcggtatttgtcctggaccttgaccttggcccgatagccgcc

SEQ ID NO: 9480 - DNA, 1368 bp, Muscodor strobelii
  misc_feature: SGI cDNA ID NO. 562964
  misc_feature: Encodes the peptide sequence at SEQ ID NO 9481
atggattgtttacccgtcgaactctggctgcagatttttgggcatctggacgagagggcaccgtctcaaagacaccgccatgagccgccaagtttgctatcgttcttggccaatccaacatctcaaaaacctctcaagaccctttcgctcgtatgcaaggctatgcgtattttggtactgccaatccttttccgtaatttgcaatgggctccttacatatgctcactaagacacttcaccctgaatcccatcccgctcattagttttctcgataagaatgatctcgttcgacatgcagtcagcttcacgctgcttattggatatgacgagccgtgggacctttcggctgatccgtacgaaggtatgatacggccggctgacctcgaatggttctggtcacagctgttctccgtcatcgacccgctacgtttcaccttggtggcaccacccaccacactggccgctttaatatcgcgtgtggtgtcactcaacgacagttgggcgtttggtgagcattatcacatgtttacactatctcgcgagactcgtgaagaagcgaaagaagatccagtctctcaagacgttccagcgagcgagaagacagtccgtgccaaccaagtcgccccaagttcgctgggcaacccgcctcccagcccagtgtcactgaattcgtctatttacggtcgaaggacgtcgacttcggtgcggccaaggtcatcaccgccatgtgtactgtttacatcgcgtcgatggacctcgctgctgctcaacgaagggtcgtataccaatacatatcgataccaaaactttgaggagctcgagccgccgtctctcctgggcgcgtttcttggcacagagggctatccaaataacaaaccactgatcacatcgtcgattgtgaattttggatacgtcgccgtatttccgccagcatcacatgtctacaccttgctcgagaacgttccggtgctggataagctgtttctacaaatcacaccagacccagataactacctgaaagaggatgccgactgggataacatcgacgaggcagagctgtggctccagcggaatcagatctactcgttgctggtgcgcgaattgatggcggaccttggccagcggaaaatccgcgtgtttgagagcggggatccatcggatcggaaagtctgggatttgacgtcggcctggttcctcagcagtggtctgaagacatggaagattgtgaaagaaggcctgtttgtcaggacccgaacgctccaaggcgaaccgggtagggatgcgagcggccaggcccaccaggacgacgagaccggcgtcttcgctgtcaatggcaacatgctccaccaaggtctaatgtcaccgtaa

SEQ ID NO: 9481 - protein, 455 aa, Muscodor strobelii
  misc_feature: SGI Peptide ID NO. 562964
  misc_feature (43)..(416): NCBI GI: 145604246 Blast Desc: MGG_13947 [Magnaporthe grisea 70-15] gi|145012281|gb|EDJ96937.1| MGG_13947 [Magnaporthe grisea 70-15]
  misc_feature (4)..(421): NCBI GI: 154294236 Blast Desc: BC1G_13804 [Botryotinia fuckeliana B05.10] gi|150844814|gb|EDN20007.1| BC1G_13804 [Botryotinia fuckeliana B05.10]
  misc_feature (1)..(416): NCBI GI: 46137397 Blast Desc: FG10214.1 [Gibberella zeae PH-1]
  misc_feature (1)..(416): NCBI GI: 256732216 Blast Desc: NECHADRAFT_93741 [Nectria haematococca mpVI 77-13-4]
  misc_feature (161)..(416): NCBI GI: 156066075 Blast Desc: SS1G_01049 [Sclerotinia sclerotiorum 1980] gi|154691907|gb|EDN91645.1| SS1G_01049 [Sclerotinia sclerotiorum 1980]
  misc_feature (1)..(370): NCBI GI: 145233085 Blast Desc: An02g07820 [Aspergillus niger] gi|134056840|emb|CAK37745.1| [Aspergillus niger]
  misc_feature (1)..(375): NCBI GI: 67524783 Blast Desc: AN2849.2 [Aspergillus nidulans FGSC A4] gi|40744244|gb|EAA63420.1| [Aspergillus nidulans FGSC A4]
  misc_feature (1)..(375): NCBI GI: 259486216 Blast Desc: TPA: F-box domain protein (AFU_orthologue; AFUA_3G12050) [Aspergillus nidulans FGSC A4]
  misc_feature (3)..(384): NCBI GI: 119191338 Blast Desc: CIMG_00046 [Coccidioides immitis RS]
  misc_feature (3)..(384): NCBI GI: 240106504 Blast Desc: CPC735_060670 [Coccidioides posadasii C735 delta SOWgp]
MDCLPVELWLQIFGHLDERAPSQRHRHEPPSLLSFLANPTSQKPLKTLSLVCKAMRILVLPILFRNLQWAPYICSLRHFTLNPIPLISFLDKNDLVRHAVSFTLLIGYDEPWDLSADPYEGMIRPADLEWFWSQLFSVIDPLRFTLVAPPTTLAALISRVVSLNDSWAFGEHYHMFTLSRETREEAKEDPVSQDVPASEKTVRANQVAPSSLGNPPPSPVSLNSSIYGRRTSTSVRPRSSPPCVLFTSRRWTSLLLNEGSYTNTYRYQNFEELEPPSLLGAFLGTEGYPNNKPLITSSIVNFGYVAVFPPASHVYTLLENVPVLDKLFLQITPDPDNYLKEDADWDNIDEAELWLQRNQIYSLLVRELMADLGQRKIRVFESGDPSDRKVWDLTSAWFLSSGLKTWKIVKEGLFVRTRTLQGEPGRDASGQAHQDDETGVFAVNGNMLHQGLMSP

SEQ ID NO: 9482 - DNA, 7656 bp, Muscodor strobelii; identical to SEQ ID NO: 9479
  misc_feature: SGI EST ID NO. CUFF.22510.1
  misc_feature: Variant of the nucleotide sequence at SEQ ID NO 9480

SEQ ID NO: 9483 - DNA, 1209 bp, Muscodor strobelii
  misc_feature: SGI cDNA ID NO. 562965
  misc_feature: Elevated expression when VOC is produced
  misc_feature: Encodes the peptide sequence at SEQ ID NO 9484
atggtggtgaacaagcaacggccaccgtttcgcgcggagcatctcggttcgctgctccgccctcaagagctgactgagagacgtgttgagcttgatgaagccaaagctcttgatatcggtcacgacgaaaagctccacgccattaccgacaaagccatcaatgagatagtcaagctacaattagatctcggctttcatgctatcaatgatggagagtatcgccgtcatcaattttggggcaccttctttcctaatcttgaaggattcgaggaaatcactcttaaggactgggatatattccgcatgtacgtgcctgacatcgcggcgtttaccgagtcaggtcacaagccgggcgagtctatcgtctgtactgggaagatcaaacatgtcggaagtagttatctttctgactggaactacctcaagaacctcgtccctgcagaccatgtgaagaagctcaagataacacttgccgctcccgagtggtaccatttgcgttataagaaagggatggcatacccgaaagaagtctacgcaaatgacgccgaatattttgccgacattgcaaaagcgtacagaacagagctccagattctatacgataatggctgccggaatgttaccatcgatgatccaaacctcgcatacttttgctcggagaagatgatcgcaggcttcaaagaagttggagaagacccagacgcgctcctggattcgtacgtcgggctgtacaatgactgtatctcgtcgcggccggacgacatgcatctcggtatccatctatgtcgtggtaatttcgcgtacagcaaacatttttcagagggcggctacgaccgcattgcaaccaagcttttcaaagaaattaatgcagacacctacttcctagagtatgatacggatcgagcaggctctttcgagccattgaaggagctcccaccgcacaagaatgtcgtgctgggcgtcattactagtaagtttcctgagctcgaagatgtcggcgagatgaaagaacgcgtgtttgctgcggcggagatcattgctggtggagccggccaaacccgtgaggaggctctgaagagaattggcgtcagtccacaatgtggatttgcgagccaccatctaggcaactctgtgacacgagatgacatgattgccaagctaaaattagttcgagagcttgccgattctatctggcccggccagccttga

SEQ ID NO: 9484 - protein, 402 aa, Muscodor strobelii
  misc_feature: SGI Peptide ID NO. 562965
  misc_feature (25)..(396): Pfam Id: PF01717 Pfam Desc: Cobalamin-independent synthase, Catalytic domain
  misc_feature (6)..(402): NCBI GI: 156066077 Blast Desc: SS1G_01050 [Sclerotinia sclerotiorum 1980] gi|154691908|gb|EDN91646.1| SS1G_01050 [Sclerotinia sclerotiorum 1980]
  misc_feature (6)..(402): NCBI GI: 154294238 Blast Desc: BC1G_13805 [Botryotinia fuckeliana B05.10] gi|150844815|gb|EDN20008.1| BC1G_13805 [Botryotinia fuckeliana B05.10]
  misc_feature (6)..(401): NCBI GI: 145233081 Blast Desc: An02g07800 [Aspergillus niger] gi|134056838|emb|CAK37743.1| protein product [Aspergillus niger]
  misc_feature (8)..(401): NCBI GI: 169770881 Blast Desc: [Aspergillus oryzae RIB40] gi|238486638|ref|XP_002374557.1| Methionine synthase, vitamin-B12 independent, [Aspergillus flavus NRRL3357] protein product flavus
  misc_feature (8)..(401): NCBI GI: 115396582 Blast Desc: conserved [Aspergillus terreus NIH2624] gi|114193499|gb|EAU35199.1| conserved [Aspergillus terreus NIH2624]
  misc_feature (6)..(402): NCBI GI: 242782770 Blast Desc: Methionine synthase, vitamin-B12 independent, [Talaromyces stipitatus ATCC 10500] gi|242782775|ref|XP_002480067.1| Methionine synthase, vitamin-B12
  misc_feature (8)..(401): NCBI GI: 67537698 Blast Desc: AN5019.2 [Aspergillus nidulans FGSC A4] gi|40741907|gb|EAA61097.1| AN5019.2 [Aspergillus nidulans FGSC A4] gi|259482105|tpe|CBF76267.1| TPA: Methionine synthase, FGSC
  misc_feature (6)..(401): NCBI GI: 70999392 Blast Desc: Methionine synthase, vitamin-B12 independent [Aspergillus fumigatus Af293] gi|66852052|gb|EAL92377.1| Methionine synthase, vitamin-B12 independent, [Aspergillus Af293]
  misc_feature (2)..(402): NCBI GI: 119191336 Blast Desc: CIMG_00045 [Coccidioides immitis RS]
  misc_feature (6)..(402): NCBI GI: 212527144 Blast Desc: Methionine synthase, vitamin-B12 independent, [Penicillium marneffei ATCC 18224] gi|210073127|gb|EEA27214.1| Methionine synthase, vitamin-B12 independent, [Penicillium ATCC
  misc_feature: Useful for introducing or modulating the production of volatile compounds
MVVNKQRPPFRAEHLGSLLRPQELTERRVELDEAKALDIGHDEKLHAITDKAINEIVKLQLDLGFHAINDGEYRRHQFWGTFFPNLEGFEEITLKDWDIFRMYVPDIAAFTESGHKPGESIVCTGKIKHVGSSYLSDWNYLKNLVPADHVKKLKITLAAPEWYHLRYKKGMAYPKEVYANDAEYFADIAKAYRTELQILYDNGCRNVTIDDPNLAYFCSEKMIAGFKEVGEDPDALLDSYVGLYNDCISSRPDDMHLGIHLCRGNFAYSKHFSEGGYDRIATKLFKEINADTYFLEYDTDRAGSFEPLKELPPHKNVVLGVITSKFPELEDVGEMKERVFAAAEIIAGGAGQTREEALKRIGVSPQCGFASHHLGNSVTRDDMIAKLKLVRELADSIWPGQP

SEQ ID NO: 9485 - DNA, 1516 bp, Muscodor strobelii
  misc_feature: SGI EST ID NO. CUFF.22410.0
  misc_feature: Variant of the nucleotide sequence at SEQ ID NO 9483
ctgtttttttcgcatatctgtttagcctcttcagactgcctatacgacatcaaagttgatacacgacatggtggtgaacaagcaacggccaccgtttcgcgcggagcatctcggttcgctgctccgccctcaagagctgactgagagacgtgttgagcttgatgaagccaaagctcttgatatcggtcacgacgaaaagctccacgccattaccgacaaagccatcaatgagatagtcaagctacaattagatctcggctttcatgctatcaatgatggagagtatcgccgtcatcaattttggggcaccttctttcctaatcttgaaggattcgaggaaatcactcttaaggactgggatatattccgcatgtacgtgcctgacatcgcggcgtttaccgagtcaggtcacaagccgggcgagtctatcgtctgtactgggaagatcaaacatgtcggaagtagttatctttctgactggaactacctcaagaacctcgtccctgcagaccatgtgaagaagctcaagataacacttgccgctcccgagtggtaccatttgcgttataagaaagggatggcatacccgaaagaagtctacgcaaatgacgccgaatattttgccgacattgcaaaagcgtacagaacagagctccagattctatacgataatggctgccggaatgttaccatcgatgatccaaacctcgcatacttttgctcggagaagatgatcgcaggcttcaaagaagttggagaagacccagacgcgctcctggattcgtacgtcgggctgtacaatgactgtatctcgtcgcggccggacgacatgcatctcggtatccatctatgtcgtggtaatttcgcgtacagcaaacatttttcagagggcggctacgaccgcattgcaaccaagcttttcaaagaaattaatgcagacacctacttcctagagtatgatacggatcgagcaggctctttcgagccattgaaggagctcccaccgcacaagaatgtcgtgctgggcgtcattactagtaagtttcctgagctcgaagatgtcggcgagatgaaagaacgcgtgtttgctgcggcggagatcattgctggtggagccggccaaacccgtgaggaggctctgaagagaattggcgtcagtccacaatgtggatttgcgagccaccatctaggcaactctgtgacacgagatgacatgattgccaagctaaaattagttcgagagcttgccgattctatctggcccggccagccttgaagacatgacgccggccgggacttagggcgatggatctggatgctgataactggacaagttcatctcgctcccccgatttaggcttgaaatttctacctagtgtcgttttgctttgagttttgggctttgaggatttgtaaaattagttgcgtgagaactaaaaaacgttcgaacacctgttgttcaacggacgtatctagttggagatagttttcatggaaatgagtagcataattcctg

SEQ ID NO: 9486 - DNA, 942 bp, Muscodor strobelii
  misc_feature: SGI cDNA ID NO. 562966
  misc_feature: Encodes the peptide sequence at SEQ ID NO 9487
atgaagactgaaatcatcgttgccactgccgctcttgctgcaaagggtaccgcgctgccttctgccgacttagttgcgcgggcagtcgacctgcccgaggtccccaaaggatgtctaacatcttacaacgggatcaacgcgggctatctgcccgacgatgagactaacggcaaggttagcatggcggtacttcacgcagacactggtaaaccaggttgcttctttggggattactcccatatcaccagcacgtcgtatgacggtgctgacattaccggaaaagcagggagcacggacggtgcgatcatggttccatcgattatgccgactggcgtgacttgggaccaagtggacagcaacctagctagaaagatcgggaatgtcgtcaaagctttcaccagcaagaatatcccggtgtacctgcgttttgcacacgaggtcaactgctacgctaagccgggatgcgcgtcccctgcttaccctggcggaacgaactacgctgcattcaagaaggcgtgggcgaacgtggcggccgtttgtcgcagtattgaacactgctatatgtacttcagcccaaacaagaacggggacgacgacatcaagaactgggtgccagccaacgaagatatcgacatctggggcctcgacaaatacgtgagtgcgagcgagtcgggcagctcgtgggagagcgtgttcggctcgttctacaacgagtacgtcaagccctcgggaaagccttttatgatcggcgagacagcctgcggcggttgttccgaagcgcagaagttggcgtgggtgaagactttgtcaatgagcgacttcagcgcataccccttgtacaaggggtttatgtggttcgagtacaataaggagtccaacttctatgtcgtttatggccatagcaaggctgaaatcgaccagttcgatacgaacttcgcataa

SEQ ID NO: 9487 - protein, 313 aa, Muscodor strobelii
  misc_feature: SGI Peptide ID NO. 562966
  misc_feature (31)..(312): NCBI GI: 164423438 Blast Desc: NCU08087 [Neurospora crassa OR74A] gi|157070094|gb|EAA35982.2| [Neurospora crassa OR74A]
  misc_feature (5)..(301): NCBI GI: 154320061 Blast Desc: BC1G_02011 [Botryotinia fuckeliana B05.10] gi|150854750|gb|EDN29942.1| BC1G_02011 [Botryotinia fuckeliana B05.10]
  misc_feature (24)..(293): NCBI GI: 71024507 Blast Desc: UM06336.1 [Ustilago maydis 521] gi|46097732|gb|EAK82965.1| UM06336.1 [Ustilago maydis 521]
  misc_feature (1)..(252): NCBI GI: 156065007 Blast Desc: SS1G_00514 [Sclerotinia sclerotiorum 1980] gi|154691373|gb|EDN91111.1| SS1G_00514 [Sclerotinia sclerotiorum 1980]
  misc_feature (83)..(296): NCBI GI: 15895818 Blast Desc: endoglucanase family protein [Clostridium acetobutylicum ATCC 824] gi|15025580|gb|AAK80507.1|AE007754_5 Endoglucanase, family 26; S-layer homology domain [Clostridium
  misc_feature (138)..(296): NCBI GI: 219883075 Blast Desc: beta-mannanase-like protein [Arthrobacter chlorophenolicus A6] gi|219862081|gb|ACL42422.1| beta-mannanase-like protein [Arthrobacter chlorophenolicus A6]
  misc_feature (139)..(296): NCBI GI: 148273876 Blast Desc: endoglucanase [Clavibacter michiganensis subsp. michiganensis NCPPB 382] gi|147831806|emb|CAN02776.1| endoglucanase [Clavibacter michiganensis subsp. michiganensis
  misc_feature (131)..(296): NCBI GI: 108797384 Blast Desc: endoglucanase family protein [Mycobacterium sp. MCS] gi|108767803|gb|ABG06525.1| endoglucanase, family 26; S-layer domain protein [Mycobacterium sp. MCS]
  misc_feature (131)..(296): NCBI GI: 119866468 Blast Desc: endoglucanase family protein [Mycobacterium sp. KMS] gi|119692557|gb|ABL89630.1| endoglucanase, family 26; S-layer domain protein [Mycobacterium sp. KMS]
  misc_feature (131)..(296): NCBI GI: 126433005 Blast Desc: endoglucanase family protein [Mycobacterium sp. JLS] gi|126232805|gb|ABN96205.1| endoglucanase, family 26; S-layer domain protein [Mycobacterium sp. JLS]
MKTEIIVATAALAAKGTALPSADLVARAVDLPEVPKGCLTSYNGINAGYLPDDETNGKVSMAVLHADTGKPGCFFGDYSHITSTSYDGADITGKAGSTDGAIMVPSIMPTGVTWDQVDSNLARKIGNVVKAFTSKNIPVYLRFAHEVNCYAKPGCASPAYPGGTNYAAFKKAWANVAAVCRSIEHCYMYFSPNKNGDDDIKNWVPANEDIDIWGLDKYVSASESGSSWESVFGSFYNEYVKPSGKPFMIGETACGGCSEAQKLAWVKTLSMSDFSAYPLYKGFMWFEYNKESNFYVVYGHSKAEIDQFDTNFA

SEQ ID NO: 9488 - DNA, 945 bp, Muscodor strobelii
  misc_feature: SGI cDNA ID NO. 562967
  misc_feature: Encodes the peptide sequence at SEQ ID NO 9489
atgtccgctccagtcaagattctcatagtcggcgcaacgggggcaattggccgttacatcaccgacgcgatcgtgtcggcgaaacccaaacttggccaagaaataatcatcttcacatcggcagcaaccacctctgacccctcaaaatccgaacgtctatcctcctggcagtcacggggcgtatcagtaattacgggagatattacagacaccgacgatatcaccaaagcctacgagggcgttgacacggtcgtctcgtgtctgggtcgaaacgcactagcctcacaaattgaactacttagacttgcagaggagagcgctagcgtaaagtggttcttcccgagtgagtatggtacagatatcgagtacgatgacacgagcaaggatgagaagccgcaccagaacaagctcaaggtccgggcctatatccgcgagaatatcagaaaagttcagtgtggaccttatgccgatatgttctttgagctgcgaaatccggtaacaggtgggtatgatgtcaaggagaagagagcggtagtgattggtgatggggagggtcgtgttgggttgacgacgatgcctgatgtcgggaaactcgttgtggccgctctgcagcaccctaaagaatctcagggcaagattctgaaggtccagtcgtttgtcgtcacaccaaaccaaatcctgaaggaattcgaaaagcatggaggagactggaaagtggatcacgtgtcgcatgagactttgcgcgcggaagaaaggaaactctgggatgcagacaatccaacggcgactggtgccacgttgagacgcatctgggctgagggtggtacactttacgagaagacggacaacgagctgctaggcttgagtcctcaggatatggagccattgaccgctgtcactgagaggtatagcagcgctgtgaaggccggcaaggcgccttactaa

SEQ ID NO: 9489 - protein, 314 aa, Muscodor strobelii
  misc_feature: SGI Peptide ID NO. 562967
  misc_feature (7)..(243): Pfam Id: PF05368 Pfam Desc: NmrA-like family
  misc_feature (8)..(85): Pfam Id: PF01073 Pfam Desc: 3-beta hydroxysteroid dehydrogenase/isomerase family
  misc_feature (7)..(145): Pfam Id: PF05368 Pfam Desc: NmrA-like family
  misc_feature (7)..(302): NCBI GI: 256731081 Blast Desc: NECHADRAFT_96341 [Nectria haematococca mpVI 77-13-4]
  misc_feature (4)..(302): NCBI GI: 46123129 Blast Desc: FG05942.1 [Gibberella zeae PH-1]
  misc_feature (4)..(292): NCBI GI: 171676533 Blast Desc: protein product [Podospora anserina] gi|170936333|emb|CAP60991.1| protein product [Podospora anserina]
  misc_feature (4)..(302): NCBI GI: 145604164 Blast Desc: MGG_13929 [Magnaporthe grisea 70-15] gi|145012218|gb|EDJ96874.1| MGG_13929 [Magnaporthe grisea 70-15]
  misc_feature (6)..(301): NCBI GI: 116197375 Blast Desc: CHGG_06843 [Chaetomium globosum CBS 148.51] gi|88178122|gb|EAQ85590.1| CHGG_06843 [Chaetomium globosum CBS 148.51]
  misc_feature (6)..(283): NCBI GI: 119495455 Blast Desc: isoflavone reductase family protein [Neosartorya fischeri NRRL 181] gi|119412674|gb|EAW22615.1| isoflavone reductase family protein [Neosartorya fischeri NRRL 181]
  misc_feature (6)..(309): NCBI GI: 70995732 Blast Desc: isoflavone reductase family protein [Aspergillus fumigatus Af293] gi|41581327|emb|CAE47976.1| isoflavone reductase, [Aspergillus fumigatus] gi|66850256|gb|EAL90583.1|
  misc_feature (6)..(284): NCBI GI: 121701481 Blast Desc: isoflavone reductase family protein [Aspergillus clavatus NRRL 1] gi|119397148|gb|EAW07579.1| isoflavone reductase family protein [Aspergillus clavatus NRRL 1]
  misc_feature (7)..(308): NCBI GI: 259486583 Blast Desc: TPA: isoflavone reductase family protein (AFU_orthologue; AFUA_1G12510) [Aspergillus nidulans FGSC A4]
  misc_feature (6)..(287): NCBI GI: 115492477 Blast Desc: conserved [Aspergillus terreus NIH2624] gi|114197726|gb|EAU39426.1| conserved [Aspergillus terreus NIH2624]
  misc_feature (1)..(256): SWISSPROT Homolog: EC 1.3.1.45 2'-hydroxyisoflavone reductase
MSAPVKILIVGATGAIGRYITDAIVSAKPKLGQEIIIFTSAATTSDPSKSERLSSWQSRGVSVITGDITDTDDITKAYEGVDTVVSCLGRNALASQIELLRLAEESASVKWFFPSEYGTDIEYDDTSKDEKPHQNKLKVRAYIRENIRKVQCGPYADMFFELRNPVTGGYDVKEKRAVVIGDGEGRVGLTTMPDVGKLVVAALQHPKESQGKILKVQSFVVTPNQILKEFEKHGGDWKVDHVSHETLRAEERKLWDADNPTATGATLRRIWAEGGTLYEKTDNELLGLSPQDMEPLTAVTERYSSAVKAGKAPY

SEQ ID NO: 9490 - DNA, 640 bp, Muscodor strobelii
  misc_feature: SGI EST ID NO. CUFF.22435.0
  misc_feature: Variant of the nucleotide sequence at SEQ ID NO 9488
ttctactccatacaaaccgaacgggaaaaaggattaacgtttttttgatgcactagacatacattgtcacaggaccttatgccgatatgttctttgagctgcgaaatccggtaacaggtgggtatgatgtcaaggagaagagagcggtagtgattggtgatggggagggtcgtgttgggttgacgacgatgcctgatgtcgggaaactcgttgtggccgctctgcagcaccctaaagaatctcagggcaagattctgaaggtccagtcgtttgtcgtcacaccaaaccaaatcctgaaggaattcgaaaagcatggaggagactggaaagtggatcacgtgtcgcatgagactttgcgcgcggaagaaaggaaactctgggatgcagacaatccaacggcgactggtgccacgttgagacgcatctgggctgagggtggtacactttacgagaagacggacaacgagctgctaggcttgagtcctcaggatatggagccattgaccgctgtcactgagaggtatagcagcgctgtgaaggccggcaaggcgccttactaaacctatgatagagaattcggcttatagcatgttgcgtagtttattcgctgttataatacaatttggtttccaagtgtgtc

SEQ ID NO: 9491 - DNA, 1389 bp, Muscodor strobelii
  misc_feature: SGI cDNA ID NO. 562968
  misc_feature: Reduced expression when VOC is produced
  misc_feature: Encodes the peptide sequence at SEQ ID NO 9492
atggctgacgtcgaagtccccgtcgcccgctctcacagcgacgacaagccacaccgctccaagtcgaaaaagcgaaagaacggcgacgtcgaaagcgagggccgaaaacacaaacgctccaagagcgaagccgttgacgccgccgccaaagtcgccacctcaccagatgcagaagccgagcccaagcgcaagaccaagacccggaggccaagtcacggcggcaatggcacggcagatggacaaacaccacatgatgatgcagggcttccagataagtcagaaaaaaagagcaagagaagagaaaagaagaaaagggagaaggatgacgctgcccatgaagcccgagcagaacaggacgaggcagaccctttcgccgactcgccaagaaagaagaaagacaacaaactcaagaagacgagtgcacaacatgagaagcaggttgtctctcacgacagcatggacatcgacgagacaacaacagccgccaccacacccgcccagctatccgacagacagcacccattctacactcagactgtctcacagtacctgccgttgtcaccctacggcatcatcgaacctctccagagctatacagaccaacacctcaagcccctcctcaaccgctatgttcttcagttccatggcgtccttctggcctaccgtcatccaaggctcggcgaggcacccggccgtggctctctcaccgaggagagcgatatggacgacaccgttattctcgagtctatcaatgaatatgccgtcagctacggctggctaaccgtcgaagtcgatctcttccgtcccacccgcggtgcatggctcgagggagttgtcaacctgcagggcggtggccacatcggcgttgtctgctggggcaagttcaacgctgccatcgaggcacaacgattaccaaagggctggcgctgggttgatcttctccccaggggagatcgcgccaagggaagcacagccgctgagcctgagcctgcgcccgaagccgacgacgaggaagaagaaggcgatgagtcacaagttcacatggctggatattggatggatgacaaaggagcgcgcatcaaaaatggcacgaaattgtgcttccgcatcaaaaactacgaagtcggtgtcagtggtgattatggctatctgagcatcgagggcacaatgctgagcgaagaggatgaggaaaataagaggaaagtcgagacggagagaaagtcgcgggcgcagggcgcgaaacgccatggcataaggagagccgagcagagacgagtgcccgagtacagcatgacgaaattcggtcaggatgagatacaggagaacgaaagtcagcgtgctgaaatcagattacctagtcgcgcaggcagcgatacggatggcgcttga

SEQ ID NO: 9492 - protein, 462 aa, Muscodor strobelii
  misc_feature: SGI Peptide ID NO. 562968
  misc_feature (181)..(221): Pfam Id: PF03876 Pfam Desc: RNA polymerase Rpb7-like, N-terminal domain
  misc_feature (169)..(460): NCBI GI: 116197373 Blast Desc: CHGG_06842 [Chaetomium globosum CBS 148.51] gi|88178121|gb|EAQ85589.1| CHGG_06842 [Chaetomium globosum CBS 148.51]
  misc_feature (169)..(460): NCBI GI: 171676531 Blast Desc: protein product [Podospora anserina] gi|170936332|emb|CAP60990.1| protein product [Podospora anserina]
  misc_feature (151)..(449): NCBI GI: 46117256 Blast Desc: FG04470.1 [Gibberella zeae PH-1]
  misc_feature (173)..(446): NCBI GI: 85084873 Blast Desc: NCU07166 [Neurospora crassa OR74A] gi|28918482|gb|EAA28155.1| [Neurospora crassa OR74A] gi|28950262|emb|CAD71128.1| related to dna-dependent rna I a43
  misc_feature (192)..(449): NCBI GI: 261353591 Blast Desc: DNA-dependent RNA polymerase I subunit A43 [Verticillium albo-atrum VaMs.102]
  misc_feature (151)..(449): NCBI GI: 256729514 Blast Desc: NECHADRAFT_71413 [Nectria haematococca mpVI 77-13-4]
  misc_feature (146)..(321): NCBI GI: 145604182 Blast Desc: MGG_10674 [Magnaporthe grisea 70-15] gi|145012233|gb|EDJ96889.1| MGG_10674 [Magnaporthe grisea 70-15]
  misc_feature (157)..(421): NCBI GI: 156065847 Blast Desc: SS1G_00934 [Sclerotinia sclerotiorum 1980] gi|154691793|gb|EDN91531.1| SS1G_00934 [Sclerotinia sclerotiorum 1980]
  misc_feature (156)..(406): NCBI GI: 154301739 Blast Desc: BC1G_10021 [Botryotinia fuckeliana B05.10] gi|150855683|gb|EDN30875.1| BC1G_10021 [Botryotinia fuckeliana B05.10]
  misc_feature (159)..(407): NCBI GI: 115385320 Blast Desc: [Aspergillus terreus NIH2624] gi|114196899|gb|EAU38599.1| [Aspergillus terreus NIH2624]
  misc_feature: Useful for introducing or modulating the production of volatile compounds
MADVEVPVARSHSDDKPHRSKSKKRKNGDVESEGRKHKRSKSEAVDAAAKVATSPDAEAEPKRKTKTRRPSHGGNGTADGQTPHDDAGLPDKSEKKSKRREKKKREKDDAAHEARAEQDEADPFADSPRKKKDNKLKKTSAQHEKQVVSHDSMDIDETTTAATTPAQLSDRQHPFYTQTVSQYLPLSPYGIIEPLQSYTDQHLKPLLNRYVLQFHGVLLAYRHPRLGEAPGRGSLTEESDMDDTVILESINEYAVSYGWLTVEVDLFRPTRGAWLEGVVNLQGGGHIGVVCWGKFNAAIEAQRLPKGWRWVDLLPRGDRAKGSTAAEPEPAPEADDEEEEGDESQVHMAGYWMDDKGARIKNGTKLCFRIKNYEVGVSGDYGYLSIEGTMLSEEDEENKRKVETERKSRAQGAKRHGIRRAEQRRVPEYSMTKFGQDEIQENESQRAEIRLPSRAGSDTDGA

SEQ ID NO: 9493 - DNA, 1641 bp, Muscodor strobelii
  misc_feature: SGI cDNA ID NO. 562969
  misc_feature: Encodes the peptide sequence at SEQ ID NO 9494
atggccgacgacatggagatcgcgcgcacgacatctaattccaacgctgtgcaggatgaagaccgtctggcgcaattcggatacaagcaagagctgaaacgcgactggggtttggcgcataactttggcgtatcattttcgatcattagcgtcattacgggtatcacgactctattctccttcgggttgaacacgggcggaccagctgttatgagcataggctggataatcgtatctttctttacgctcatggtcgcaatagccatggcagagatcgtctctgcgatcccaacctcaggtggtccttatttctggtccgccatgatggcaccgccaaagtacagcgcagtcgcggcctggatcacaggatggttcaatcttcttggacaagtggccgtgacaactggtatatcattcggtcttgctgggttgatcgcgacgattgcgacggtcaaaaaccccgactatgaaccatctgcgccaaagacgatcggtatctatgccgctgttctcgtgtcccatggtctggtcaatacttttggtgtccatgtgctgagatatctgaacaatgtatcaattatcttgcactcggcgggtatcacggcattggctattgcggtactggctaaggccccgaagcatcaacctggatcgttcgtctttggctactacaacgacgggacgggtgtcgagggcgcagaaggatggagtattcgcgcctcaccggcgtatgtcgctgtttgcggtagtctactcacacaatacaccttaaccggttttgacgcatcggcacacttatcagaagaaaccaaaaatgcagcgtgggcggcctctatcggtgtgatatcttcagtcggcttcagcgctctatttggattgctcattctcctctctttcctcttctctattcaggatttccaagccacgctgaactcaatctatgggcagccgatcctgcaaatcctcgtagacattttcggcgaagatggagcattggttctgttcaccctgatcatcatttgcgtgtggcactgtgggctgttcagcatgacgtccaactcgcgcatgatgttcgcctttgcccgtgatggaggaattcatccgttcttccacaaagtcgacgagcgttttgcaagtccgatccgcgccgtctggctcgctgctactttgtcattcatcttagctctgccctcactggggagtagtgttgcgttctcggctgctacgagtatcgcaaccattgggctatacatcagctacggcattcctatcctcttgggtcttatctggcacaaaaactttgtgaatatgaaaggaccgttcaatttgggcgctttgagtagagtcgtggcgtgcattgctgttgcttggatcttgactatcactgtcatcttcgtgctcccaacggcgaatcccgtgaacagccagacgctgaattataccgttgtagctgttggcatcatagctattggagctatgggcgcctgggttctttgggcaagaaaatggttcactggccctggcgctgaggcaaaagaagctatgcgactcggtgtagacccaacggaaccaggcgcgctggagaagaaggaggccgaactccagaagtcggaggccgctagagagggtagtagtgaatag

SEQ ID NO: 9494 - protein, 546 aa, Muscodor strobelii
  misc_feature: SGI Peptide ID NO. 562969
  misc_feature (43)..(506): Pfam Id: PF00324 Pfam Desc: Amino acid permease
  misc_feature (12)..(533): NCBI GI: 164424350 Blast Desc: NCU07175 [Neurospora crassa OR74A] gi|28950241|emb|CAD71108.1| related to GABA transport protein [Neurospora crassa] gi|157070476|gb|EAA28164.2| conserved crassa
  misc_feature (4)..(533): NCBI GI: 154294272 Blast Desc: BC1G_13822 [Botryotinia fuckeliana B05.10] gi|150844832|gb|EDN20025.1| BC1G_13822 [Botryotinia fuckeliana B05.10]
  misc_feature (4)..(533): NCBI GI: 156066101 Blast Desc: SS1G_01062 [Sclerotinia sclerotiorum 1980] gi|154691920|gb|EDN91658.1| SS1G_01062 [Sclerotinia sclerotiorum 1980]
  misc_feature (1)..(531): NCBI GI: 170111226 Blast Desc: APC amino acid permease [Laccaria bicolor S238N-H82] gi|164638175|gb|EDR02454.1| APC amino acid permease [Laccaria bicolor S238N-H82]
  misc_feature (2)..(533): NCBI GI: 242214303 Blast Desc: [Postia placenta Mad-698-R] gi|220727947|gb|EED81852.1| [Postia placenta Mad-698-R]
  misc_feature (3)..(340): NCBI GI: 116179290 Blast Desc: CHGG_00273 [Chaetomium globosum CBS 148.51] gi|88184570|gb|EAQ92038.1| CHGG_00273 [Chaetomium globosum CBS 148.51]
  misc_feature (1)..(524): NCBI GI: 29830665 Blast Desc: amino acid permease [Streptomyces avermitilis MA-4680] gi|29607777|dbj|BAC71834.1| amino acid permease [Streptomyces avermitilis MA-4680]
  misc_feature (18)..(545): NCBI GI: 227990264 Blast Desc: amino acid transporter [Meiothermus silvanus DSM 9946] gi|227950913|gb|EEJ87920.1| amino acid transporter [Meiothermus silvanus DSM 9946]
  misc_feature (19)..(510): NCBI GI: 254378561 Blast Desc: amino acid permease [Streptomyces sp. SPB74] gi|197698348|gb|EDY45281.1| amino acid permease [Streptomyces sp. SPB74]
  misc_feature (18)..(534): NCBI GI: 256673082 Blast Desc: amino acid/metabolite permease [Streptomyces sp. AA4]
MADDMEIARTTSNSNAVQDEDRLAQFGYKQELKRDWGLAHNFGVSFSIISVITGITTLFSFGLNTGGPAVMSIGWIIVSFFTLMVAIAMAEIVSAIPTSGGPYFWSAMMAPPKYSAVAAWITGWFNLLGQVAVTTGISFGLAGLIATIATVKNPDYEPSAPKTIGIYAAVLVSHGLVNTFGVHVLRYLNNVSIILHSAGITALAIAVLAKAPKHQPGSFVFGYYNDGTGVEGAEGWSIRASPAYVAVCGSLLTQYTLTGFDASAHLSEETKNAAWAASIGVISSVGFSALFGLLILLSFLFSIQDFQATLNSIYGQPILQILVDIFGEDGALVLFTLIIICVWHCGLFSMTSNSRMMFAFARDGGIHPFFHKVDERFASPIRAVWLAATLSFILALPSLGSSVAFSAATSIATIGLYISYGIPILLGLIWHKNFVNMKGPFNLGALSRVVACIAVAWILTITVIFVLPTANPVNSQTLNYTVVAVGIIAIGAMGAWVLWARKWFTGPGAEAKEAMRLGVDPTEPGALEKKEAELQKSEAAREGSSE

SEQ ID NO: 9495 - DNA, 3704 bp, Muscodor strobelii
  misc_feature: SGI EST ID NO. CUFF.22441.0
  misc_feature: Variant of the nucleotide sequence at SEQ ID NO 9493
ctttctttacgctcatggtcgcaatagccatggcagagatcgtctctgcgatcccaacctcaggtggtccttatttctggtccgccatgatggcaccgccaaagtacagcgcagtcgcggcctggatcacaggatggttcaatcttcttggacaagtggccgtgacaactggtatatcattcggtcttgctgggttgatcgcgacgattgcgacggtcaaaaaccccgactatgaaccatctgcgccaaagacgatcggtatctatgccgctgttctcgtgtcccatggtctggtcaatacttttggtgtccatgtgctgagatatctgaacaatgtatcaattatcttgcactcggcgggtatcacggcattggctattgcggtactggctaaggccccgaagcatcaacctggatcgttcgtctttggctactacaacgacgggacgggtgtcgagggcgcagaaggatggagtattcgcgcctcaccggcgtatgtcgctgtttgcggtagtctactcacacaatacaccttaaccggttttgacgcatcggcacacttatcagaagaaaccaaaaatgcagcgtgggcggcctctatcggtgtgatatcttcagtcggcttcagcgctctatttggattgctcattctcctctctttcctcttctctattcaggatttccaagccacgctgaactcaatctatgggcagccgatcctgcaaatcctcgtagacattttcggcgaagatggagcattggttctgttcaccctgatcatcatttgcgtgtggcactgtgggctgttcagcatgacgtccaactcgcgcatgatgttcgcctttgcccgtgatggaggaattcatccgttcttccacaaagtcgacgagcgttttgcaagtccgatccgcgccgtctggctcgctgctactttgtcattcatcttagctctgccctcactggggagtagtgttgcgttctcggctgctacgagtatcgcaaccattgggctatacatcagctacggcattcctatcctcttgggtcttatctggcacaaaaactttgtgaatatgaaaggaccgttcaatttgggcgctttgagtagagtcgtggcgtgcattgctgttgcttggatcttgactatcactgtcatcttcgtgctcccaacggcgaatcccgtgaacagccagacgctgaattataccgttgtagctgttggcatcatagctattggagctatgggcgcctgggttctttgggcaagaaaatggttcactggccctggcgctgaggcaaaagaagctatgcgactcggtgtagacccaacggaaccaggcgcgctggagaagaaggaggccgaactccagaagtcggaggccgctagagagggtagtagtgaataggaggtctaacctccaagacagagcagtttcatcagcagcagctagtacctcatatacccctacgagtctattagcaaatagtacaatctttccactatccccaggtactcatctggcaccatggaagtccagatcactgatgtcttacgacggcaactatcacttattactctgtgaaactcaacacctgacataactgatactctcgggacgttgttttggacggcgcatgtattgattgcgcacgttgaaataatggttggttgtaggggctaaaaagctttggaagcgaagcattttatttgcacctaagtttccaacgtccaagcccatagccgttgtttaaggtatgcgttgtacaagattcaagcgccatccgtatcgctgcctgcgcgactaggtaatctgatttcagcacgctgactttcgttctcctgtatctcatcctgaccgaatttcgtcatgctgtactcgggcactcgtctctgctcggctctccttatgccatggcgtttcgcgccctgcgcccgcgactttctctccgtctcgactttcctcttattttcctcatcctcttcgctcagcattgtgccctcgatgctcagatagccataatcaccactgacaccgacttcgtagtttttgatgcggaagcacaatttcgtgccatttttgatgcgcgctcctttgtcatccatccaatatccagccatgtgaacttgtgactcatcgccttcttcttcctcgtcgtcggcttcgggcgcaggctcaggctcagcggctgtgcttcccttggcgcgatctcccctggggagaagatcaacccagcgccagccctttggtaatcgttgtgcctcgatggcagcgttgaacttgccccagcagacaacgccgatgtggccaccgccctgcaggttgacaactccctcgagccatgcaccgcgggtgggacggaagagatcgacttcgacggttagccagccgtagctgacggcatattcattgatagactcgagaataacggtgtcgtccatatcgctctcctcggtgagagagccacggccgggtgcctcgccgagccttggatgacggtaggccagaaggacgccatggaactgaagaacatagcggttgaggaggggcttgaggtgttggtctgtatagctctggagaggttcgatgatgccgtagggtgacaacggcaggtactgtgagacagtctgagtgtagaatgggtgctgtctgtcggatagctgggcgggtgtggtggcggctgttgttgtctcgtcgatgtccatgctgtcgtgagagacaacctgcttctcatgttgtgcactcgtcttcttgagtttgttgtctttcttctttcttggcgagtcggcgaaagggtctgcctcgtcctgttctgctcgggcttcatgggcagcgtcatccttctcccttttcttcttttctcttctcttgctctttttttctgacttatctggaagccctgcatcatcatgtggtgtttgtccatctgccgtgccattgccgccgtgacttggcctccgggtcttggtcttgcgcttgggctcggcttctgcatctggtgaggtggcgactttggcggcggcgtcaacggcttcgctcttggagcgtttgtgttttcggccctcgctttcgacgtcgccgttctttcgctttttcgacttggagcggtgtggcttgtcgtcgctgtgagagcgggcgacggggacttcgacgtcagccattttgacggggccggtgttcttaactgcccgcggtttcgggaattaaggtgtcaattgttcgaatagaaatgtcagatgtgtttcgaagcagcgaaacagtgagcatgtgctgggcgcgcaagcgattgagcttgtcgacgtgaacgggtaggtgattggagggctggatggcgacgaggcagggtttcgataagggaaaataaaaaatttggaggtctggcacggtcggagctttgcttatcgcattcgccgacgttccccactttcaccacgaatcacttaggttctgtcttcagctcattcacatccgagttgcttcatccgtgatcggtacatcgtggaaaatcacaccattagctacctacatgtaggcataacttcaaacctcctcaatttcgatcacttgcaaatatattttctcgcgattgattgaattgactatagcacacattactacaatctacaatccacggcaacgcaagcttaacatatttctcacagaggtgaaactggtgatcttggaagcttacctacggaagtgctg

SEQ ID NO: 9496 - DNA, 1059 bp, Muscodor strobelii
  misc_feature: SGI cDNA ID NO. 562970
  misc_feature: Elevated expression when VOC is produced
  misc_feature: Encodes the peptide sequence at SEQ ID NO 9497
atgcctctgattcccggtgcacccaaagatcgcatcatcctgggtttgatgacgtttggtcaagatatagacaagggcgcccgtattactgaactcgacgaattcaaacgtaccttcgaccgttttcaagagcgcggctatagtgagatagacactgcccgcgtgtacattgggggccaacaagaggcatttacgcgagaagctggctggaaagaccatggcttcactctcgctactaagttcatgtaccccaatagagacggcgataaccaggcggacaaaatcgaggcgagcttgaataagagcctggcagaattggaaaccgagtgcgttgatatttgctatatccacgcagcggatcgatcgacgcctttcgcagagacactggaggctgccgataagctacataaggcgggaaagttcgtacagttgggtctttccaactacacggctgccgaagttgctgaagcggtgatgatatgcaagtacaacggctgggtgcgacctaccatttatcaggcaatgtacaattgcatacttaggggtattgagcccgaattgatcccaacatgccgccgttacggtcttgacattgtcgtgtacaatccaattgccggcggtctcttcagcggaaaggtcaaaagcaaggacatcaagccagaggaaggacggtatagcgacaagaaccctggcgcagtgcaaagccgcaagcgatactttcgcgatagcacatttcgagctcttgagacaatcgagaaggcactggagaaacatccaggtctgaccgtaattgagacggcattgcgttggattgttcatcactcgcagctgcgcatcaaagacggcggtcgcgacggtgtcattatcggcatttcgtcttacgaccaacttgacaacaatcttgataatctcgagaaaggcccactaccctcagacgtcctcgaagccctcgacgaggcgtggatgattgttaagccggaagcggccaactactggcacggagagcttgcatatagatatgatacgcgcgaagcactgtttggtgcaaatgctaagtga

SEQ ID NO: 9497 - protein, 352 aa, Muscodor strobelii
  misc_feature: SGI Peptide ID NO. 562970
  misc_feature (8)..(322): Pfam Id: PF00248 Pfam Desc: Aldo/keto reductase family
  misc_feature (89)..(274): Pfam Id: PF00248 Pfam Desc: Aldo/keto reductase family
  misc_feature (1)..(352): NCBI GI: 261353570 Blast Desc: aflatoxin B1 aldehyde reductase member 2 [Verticillium albo-atrum VaMs.102]
  misc_feature (1)..(352): NCBI GI: 85076244 Blast Desc: NCU07240 [Neurospora crassa OR74A] gi|28916929|gb|EAA26664.1| NCU07240 [Neurospora crassa OR74A]
  misc_feature (1)..(352): NCBI GI: 256731821 Blast Desc: NECHADRAFT_61333 [Nectria haematococca mpVI 77-13-4]
  misc_feature (1)..(348): NCBI GI: 39946977 Blast Desc: conserved [Magnaporthe grisea 70-15] gi|59802971|gb|AAX07684.1| aflatoxin B1 aldehyde reductase-like protein [Magnaporthe grisea] gi|145012292|gb|EDJ96948.1| grisea
  misc_feature (2)..(352): NCBI GI: 171676571 Blast Desc: protein product [Podospora anserina] gi|170936352|emb|CAP61010.1| protein product [Podospora anserina]
  misc_feature (1)..(352): NCBI GI: 119495267 Blast Desc: aflatoxin B1-aldehyde reductase, [Neosartorya fischeri NRRL 181] gi|119412584|gb|EAW22525.1| aflatoxin B1-aldehyde reductase, [Neosartorya fischeri NRRL 181]
  misc_feature (1)..(348): NCBI GI: 255937153 Blast Desc: Pc13g11860 [Penicillium chrysogenum Wisconsin 54-1255] gi|211584223|emb|CAP92255.1| Pc13g11860 [Penicillium chrysogenum Wisconsin 54-1255]
  misc_feature (1)..(351): NCBI GI: 169763290 Blast Desc: [Aspergillus oryzae RIB40] gi|83770573|dbj|BAE60706.1| protein product [Aspergillus oryzae]
  misc_feature (1)..(351): NCBI GI: 238489175 Blast Desc: aflatoxin B1-aldehyde reductase GliO-like, [Aspergillus flavus NRRL3357] gi|220698213|gb|EED54553.1| aflatoxin B1-aldehyde reductase GliO-like, [Aspergillus flavus
  misc_feature (1)..(352): NCBI GI: 70995904 Blast Desc: aflatoxin B1-aldehyde reductase GliO-like [Aspergillus fumigatus Af293] gi|42820745|emb|CAF32058.1| aflatoxin b1 aldehyde reductase-like protein, [Aspergillus fumigatus] Af293]
  misc_feature (12)..(257): SWISSPROT Homolog: EC 1.1.1.91 Aryl-alcohol dehydrogenase (NADP(+))
  misc_feature: Useful for introducing or modulating the production of volatile compounds
MPLIPGAPKDRIILGLMTFGQDIDKGARITELDEFKRTFDRFQERGYSEIDTARVYIGGQQEAFTREAGWKDHGFTLATKFMYPNRDGDNQADKIEASLNKSLAELETECVDICYIHAADRSTPFAETLEAADKLHKAGKFVQLGLSNYTAAEVAEAVMICKYNGWVRPTIYQAMYNCILRGIEPELIPTCRRYGLDIVVYNPIAGGLFSGKVKSKDIKPEEGRYSDKNPGAVQSRKRYFRDSTFRALETIEKALEKHPGLTVIETALRWIVHHSQLRIKDGGRDGVIIGISSYDQLDNNLDNLEKGPLPSDVLEALDEAWMIVKPEAANYWHGELAYRYDTREALFGANAK

SEQ ID NO: 9498 - DNA, 1753 bp, Muscodor strobelii
  misc_feature: SGI EST ID NO. CUFF.22447.1
  misc_feature: Variant of the nucleotide sequence at SEQ ID NO 9496
tgatcggatagcttgcattgtcatttaggcctgtcataaagtgttattctctacttgcactcgtagatcttgggaccggtgagtttctttacactacttagatctcgattgcctctcgcggtgcctttgttgctctagatatttccaagatgcctctgattcccggtgcacccaaagatcgcatcatcctgggtttgatgacgtttggtcaagatatagacaagggcgcccgtattactgaactcgacgaattcaaacgtaccttcgaccgttttcaagagcgcggctatagtgagatagacactgcccgcgtgtacattgggggccaacaagaggcatttacgcgagaagctggctggaaagaccatggcttcactctcgctactaagttcatgtaccccaatagagacggcgataaccaggcggacaaaatcgaggcgagcttgaataagagcctggcagaattggaaaccgagtgcgttgatatttgctatatccacgcagcggatcgatcgacgcctttcgcagagacactggaggctgccgataagctacataaggcgggaaagttcgtacagttgggtctttccaactacacggctgccgaagttgctgaagcggtgatgatatgcaagtacaacggctgggtgcgacctaccatttatcaggcaatgtacaattgcatacttaggggtattgagcccgaattgatcccaacatgccgccgttacggtcttgacattgtcgtgtacaatccaattgccggcggtctcttcagcggaaaggtcaaaagcaaggacatcaagccagaggaaggacggtatagcgacaagaaccctggcgcagtgcaaagccgcaagcgatactttcgcgatagcacatttcgagctcttgagacaatcgagaaggcactggagaaacatccaggtctgaccgtaattgagacggcattgcgttggattgttcatcactcgcagctgcgcatcaaagacggcggtcgcgacggtgtcattatcggcatttcgtcttacgaccaacttgacaacaatcttgataatctcgagaaaggcccactaccctcagacgtcctcgaagccctcgacgaggcgtggatgattgttaagccggaagcggccaactactggcacggagagcttgcatatagatatgatacgcgcgaagcactgtttggtgcaaatgctaagtgaaagggacgtgcttggtgggacgtgccgagtggtttggatgctgattctcttgagtttgcaatagtatcttcgtgacttggggaaatcactggtgtgagcacgttggtcaattgcctcttggccgataacgagcggtatgctttcttattgatagatgatgttgaggtagttccgttgtaccaccggtgtgctattgtgctcactcggagtgaaatggaacgacgtggttgagtatatgttaagatctgtctttctcgccgattctcactatttgccgcgcctcatcccatgtgtttcgcgataaggctgtactaatctatgtacgtccttgattttgtcgggctagactcatctccaaaatatctgagtgtagatactcgagattaggttcgctccccagttgcgacttaacctattgtgacaagtacatgcggcctatctttctagagctgtcatctttctgtgtcaatgtttcttatcacatctctagtttccctgtttgggattaacatgtgtgtagatgacgagcagggatcaaggaggct

SEQ ID NO: 9499 - DNA, 474 bp, Muscodor strobelii
  misc_feature: SGI cDNA ID NO. 562971
  misc_feature: Reduced expression when VOC is produced
  misc_feature: Encodes the peptide sequence at SEQ ID NO 9500
atgacgacggtcctcgagaaccacgagacgcagggtcacgacatggggttcgcgatgcagaaatacctactactacacaatcagcacgaagagctccggcaacagctccatgagctgtgcccggcgatgggatcaccgtcagtgtcgccgacgcggtcgttcaacagcagcaacgggagctcacgcagatcgcccccgacaaggacgggatcgcaataccagagtcacttggtgtgcagcccgacgcggctggagccggtgctagacgagtcgctcgtgtcggagatggcgttgggagagcagaggctgttcgacgtcaacgagggcatcaagcgggcgctgacggagctgctgaactgcgaggcggtgcggggtgaccgggcgatgcgcacatgggtacagacacgactgatggagacggagaaggagctacgccggggcaggaggaggagaagctcggcgaccgtagagtag

SEQ ID NO: 9500 - protein, 157 aa, Muscodor strobelii
  misc_feature: SGI Peptide ID NO. 562971
  misc_feature (17)..(153): NCBI GI: 261353600 Blast Desc: VDBG_02137 [Verticillium albo-atrum VaMs.102]
  misc_feature (12)..(144): NCBI GI: 256729331 Blast Desc: NECHADRAFT_84172 [Nectria haematococca mpVI 77-13-4]
  misc_feature (13)..(140): NCBI GI: 171676519 Blast Desc: protein product [Podospora anserina] gi|170936326|emb|CAP60984.1| protein product [Podospora anserina]
  misc_feature (16)..(145): NCBI GI: 154298150 Blast Desc: BC1G_12040 [Botryotinia fuckeliana B05.10] gi|150858226|gb|EDN33418.1| BC1G_12040 [Botryotinia fuckeliana B05.10]
  misc_feature (16)..(152): NCBI GI: 156044594 Blast Desc: [Sclerotinia sclerotiorum 1980] gi|154694789|gb|EDN94527.1| [Sclerotinia sclerotiorum 1980]
  misc_feature (17)..(144): NCBI GI: 46117272 Blast Desc: FG04478.1 [Gibberella zeae PH-1]
  misc_feature (13)..(140): NCBI GI: 116197369 Blast Desc: CHGG_06840 [Chaetomium globosum CBS 148.51] gi|88178119|gb|EAQ85587.1| CHGG_06840 [Chaetomium globosum CBS 148.51]
  misc_feature (50)..(145): NCBI GI: 154298140 Blast Desc: BC1G_12035 [Botryotinia fuckeliana B05.10] gi|150858221|gb|EDN33413.1| BC1G_12035 [Botryotinia fuckeliana B05.10]
  misc_feature (13)..(141): NCBI GI: 145604172 Blast Desc: [Magnaporthe grisea 70-15] gi|145012222|gb|EDJ96878.1| [Magnaporthe grisea 70-15]
  misc_feature (2)..(138): NCBI GI: 85084924 Blast Desc: NCU07178 [Neurospora crassa OR74A] gi|28918494|gb|EAA28167.1| NCU07178 [Neurospora crassa OR74A] gi|28950238|emb|CAD71105.1| [Neurospora crassa]
  misc_feature: Useful for introducing or modulating the production of volatile compounds
MTTVLENHETQGHDMGFAMQKYLLLHNQHEELRQQLHELCPAMGSPSVSPTRSFNSSNGSSRRSPPTRTGSQYQSHLVCSPTRLEPVLDESLVSEMALGEQRLFDVNEGIKRALTELLNCEAVRGDRAMRTWVQTRLMETEKELRRGRRRRSSATVE

SEQ ID NO: 9501 - DNA, 2006 bp, Muscodor strobelii
  misc_feature: SGI EST ID NO. CUFF.22461.0
  misc_feature: Variant of the nucleotide sequence at SEQ ID NO 9499
attttgtgaatcgattcaagactcggtatcaaatataataagatataaataacaagactggcgagtaggcatttgatttcgcattttctgcgcgcgccaaggctcatatacaatacttcagagatcaactttcaggggtcgccaggtccagctctaccagacgtcccctcagtcgaaactatatctcggagggtgacgacaaccctctgccatcccaaactttattgtcattgcccataagctttatcgtttatcagggtccgcaacggctctgactggattatacattcattctctccgaaaagaagcgtcgttccaaatcttgccgattatctcgaaggcttgattgtcgactacctttttcgttggtagctgcaacccacccagtcaggaacaagttaacaacgccatcgggatcgtcagatcgacaggacacacaacacgcaacattcgatccacctcgattacatttcagaggaccttttgtaaagcagccaagtcagaagcgggctgaaagtgccgttttcctcatcgatcgatcgtgccatttcggaattggtggattcccattctcttaattggaagctctcgcactaggatcattgtttaattgcaccgtattacgtcgtttcatgtcctaccaagcactatctgtttgacgcaactcttaatttttgaagtctcacatctctatcaccattaccaatctcaactcattgaattgagctgcactactgtccatcgaaagtccagtaagagccggcaaagccgacgcagtctcccacagctacacatagcctccatcactacgaacctctactgcctggcatacgctcagcatatctaatgcgcgcgtcatttgtccggttatcaccctacgcccgcccatcggaaacgaaaagttaagaaatgacgatgacgacggtcctcgagaaccacgagacgcagggtcacgacatggggttcgcgatgcagaaatacctactactacacaatcagcacgaagagctccggcaacagctccatgagctgtgcccggcgatgggatcaccgtcagtgtcgccgacgcggtcgttcaacagcagcaacgggagctcacgcagatcgcccccgacaaggacgggatcgcaataccagagtcacttggtgtgcagcccgacgcggctggagccggtgctagacgagtcgctcgtgtcggagatggcgttgggagagcagaggctgttcgacgtcaacgagggcatcaagcgggcgctgacggagctgctgaactgcgaggcggtgcggggtgaccgggcgatgcgcacatgggtacagacacgactgatggagacggagaaggagctacgccggggcaggaggaggagaagctcggcgaccgtagagtagagattcacagcgtcggggcaggttcccgcgcggcaccgagatggtgtggaccgtcagaggaacacaccgcagcaaaccaaagcgtgcaactagaggggagagcggggttgagcaagacgacaatctgctgcacagacgtgcgcgctgtcggaggaggaggataatatctacttgcgttttcctgggctttgcttcacattgtgcgggcgcttgggagtatggggagcctgtttaggcacatatcatttagggcccaaaagggtagagaaaaggaccattggcacgatgacgataatgacacggaacgagatgcgcgagcgtacagctgagtacaactaggtatttagggaagaggcggataatggtattttactgtagtgttggataagtttgagtgcatccatcgacacccgggcagatccatgatgccacttcccatacggacacgtcgggcattggcatgctgagagttcaatgtatccatccaatacactcaagccatgaacgccacatgaagattgccttattgtagtattcggaagtagtcttcttatagaggtgagactggtaattgtggaagcttacggaagtgctatagacgcttatgtaggaaaagt

SEQ ID NO: 9502 - DNA, 1557 bp, Muscodor strobelii
  misc_feature: SGI cDNA ID NO. 562972
  misc_feature: Encodes the peptide sequence at SEQ ID NO 9503
atgtccgtgctgctcgagaccagcgcaggcgacatcgtcatcgacctgctgaccgactacgcgcccaaggagtgccaaaagtacgttgcggcgcggagtttcttcatcaccctccagcctaaatctggcacggcactatcgctgactctttgcgatctacctagcttcctcaaactctgcaagctcaagtactacaacttctctcccgtccactccatccagcagaacttctccttccagaccggcgatcccctcggcccgacctcagcccagtcggatggcggctcctccgtctggggcctgcttgacgggccgccgcggaagagcttcgccgccactttgcaccccaagctgaagcacctcgagcgcggcaccgtctccatggccaccgccccgcacccctccgaccccgatgtccgcctcgccgccagccagttcctcgtcactctcgccgacaacaccgacttcctcgacggcaaggctgccatcttcggccgcgtcgtcgagggcttcgacgccctcgaggccatcaacgccgccatcctcgacaaggacggccaccccctcgtcgacatccgcatcaagcacaccatcatcctcgacgacccctaccccgaccctcccggcctccgcgagcccagcaagtcgccgcagccgtccaaggcccagctggccaccgtgcgcatcgccgacgatgccaacctcgacgaggaggtcgacgaggaggccgccgagaggctccgccgcgagagggaagcccgcgcccaggccctgaccctcgagatgatgggcgacctcccctttgccgaggtcaagcctcccgagaacgtgctgttcgtctgcaagctcaaccccgtcaccgccgacgccgacctcgagttcatcttcagccgcttcggcaccatcctgtcctgcgaggtcatacgcgacaagaagaccggcgacagtctgcagtatgccttcatcgagtttgaggacaagggcgcctgcgagtctgcctacttcaagatgcagggtgtcctcatcgacgaccgacgcatccacgtcgacttcagccagagcgtgagcaagctggctgatgtctggaggggcggcgagaacgccaagcggaaacgttcaaagggcggctggggtggcgtccaggggctcgagaagtggaggaaatacaggaacgaggacgatgcgcgcgatgctggcgacgattacagtatggtctacggcgaggaggaaatgcgtgggcgccatcaacggcaacatgatgaaggggaccgacctgacaacagagcaacacatccatcgatccgtggccccgaccgcgaatctaggcccaggagagaggagagaccttaccaagatacgcatcgcaatccaagggaccgggattgtcaccagagaagacgcagccgcagcagaagtcccaggaggaggagcagggacagggtcagggacagaggcggatatggagaccgtcgaccccgcgatccagatcgggaccgtccgagagggagagacgaggggcgggatgggtaccgtgacaggaggagacgagatgactga

SEQ ID NO: 9503 - protein, 518 aa, Muscodor strobelii
  misc_feature: SGI Peptide ID NO. 562972
  misc_feature (2)..(200): Pfam Id: PF00160 Pfam Desc: Cyclophilin type peptidyl-prolyl cis-trans isomerase/CLD
  misc_feature (278)..(349): Pfam Id: PF00076 Pfam Desc: RNA recognition motif. (a.k.a. RRM, RBD, or RNP domain)
  misc_feature (117)..(200): Pfam Id: PF00160 Pfam Desc: Cyclophilin type peptidyl-prolyl cis-trans isomerase/CLD
  misc_feature (1)..(448): NCBI GI: 145604176 Blast Desc: MGG_10681 [Magnaporthe grisea 70-15] gi|145012225|gb|EDJ96881.1| MGG_10681 [Magnaporthe grisea 70-15]
  misc_feature (1)..(425): NCBI GI: 261353601 Blast Desc: peptidyl-prolyl cis-trans isomerase cyp6 [Verticillium albo-atrum VaMs.102]
  misc_feature (1)..(424): NCBI GI: 46117274 Blast Desc: FG04479.1 [Gibberella zeae PH-1] gi|93140626|sp|Q4IE79.1|PPIL4_GIBZE RecName: Full=Peptidyl-prolyl cis-trans isomerase-like 4; Short=PPIase; Short=Rotamase
  misc_feature (1)..(428): NCBI GI: 256729332 Blast Desc: NECHADRAFT_95831 [Nectria haematococca mpVI 77-13-4]
  misc_feature (1)..(488): NCBI GI: 169782058 Blast Desc: [Aspergillus oryzae RIB40] gi|93140623|sp|Q2U256.1|PPIL4_ASPOR RecName: Full=Peptidyl-prolyl cis-trans isomerase-like 4; Short=PPIase; Short=Rotamase protein
  misc_feature (1)..(436): NCBI GI: 164424346 Blast Desc: NCU10166 [Neurospora crassa OR74A] gi|74619618|sp|Q871A4.1|PPIL4_NEUCR RecName: Full=Peptidyl-prolyl cis-trans isomerase-like 4; Short=PPIase; Short=Rotamase crassa]
  misc_feature (1)..(410): NCBI GI: 70982374 Blast Desc: cyclophilin-type peptidyl-prolyl cis-trans isomerase [Aspergillus fumigatus Af293] gi|74666620|sp|Q4WAQ9.1|PPIL4_ASPFU RecName: Full=Peptidyl-prolyl cis-trans isomerase-like 4; Af293]
  misc_feature (1)..(484): NCBI GI: 119489203 Blast Desc: RNA binding protein, [Neosartorya fischeri NRRL 181] gi|119411011|gb|EAW20956.1| RNA binding protein, [Neosartorya fischeri NRRL 181]
  misc_feature (1)..(488): NCBI GI: 238498916 Blast Desc: cyclophilin-type peptidyl-prolyl cis-trans isomerase, [Aspergillus flavus NRRL3357] gi|220693967|gb|EED50312.1| cyclophilin-type peptidyl-prolyl cis-trans isomerase, flavus
  misc_feature (1)..(415): NCBI GI: 258576831 Blast Desc: UREG_02113 [Uncinocarpus reesii 1704] gi|237902863|gb|EEP77264.1| UREG_02113 [Uncinocarpus reesii 1704]
  misc_feature (1)..(434): SWISSPROT Homolog: EC 5.2.1.8 Peptidylprolyl isomerase
MSVLLETSAGDIVIDLLTDYAPKECQKYVAARSFFITLQPKSGTALSLTLCDLPSFLKLCKLKYYNFSPVHSIQQNFSFQTGDPLGPTSAQSDGGSSVWGLLDGPPRKSFAATLHPKLKHLERGTVSMATAPHPSDPDVRLAASQFLVTLADNTDFLDGKAAIFGRVVEGFDALEAINAAILDKDGHPLVDIRIKHTIILDDPYPDPPGLREPSKSPQPSKAQLATVRIADDANLDEEVDEEAAERLRREREARAQALTLEMMGDLPFAEVKPPENVLFVCKLNPVTADADLEFIFSRFGTILSCEVIRDKKTGDSLQYAFIEFEDKGACESAYFKMQGVLIDDRRIHVDFSQSVSKLADVWRGGENAKRKRSKGGWGGVQGLEKWRKYRNEDDARDAGDDYSMVYGEEEMRGRHQRQHDEGDRPDNRATHPSIRGPDRESRPRREERPYQDTHRNPRDRDCHQRRRSRSRSPRRRSRDRVRDRGGYGDRRPRDPDRDRPRGRDEGRDGYRDRRRRDD

SEQ ID NO: 9504 - DNA, 3599 bp, Muscodor strobelii
  misc_feature: SGI EST ID NO. CUFF.22476.0
  misc_feature: Variant of the nucleotide sequence at SEQ ID NO 9502
cttattgcgacaacatgcccacgtccatatcactgccatcgcaggcatcacgaccctacattagatattgccttttggtatttcgttcaatacaacggcatatacactactagacttcgctgtaaagtttattcttcgacgctcgaatcccgatctactcctcgcggtaccttccataccaatatcacatagctgggccaggctgttggagactgctgggccggctctgtgtcagtcggtgtcagtcgacagcgccttgccgcagcccttgacgacgacgacatgtccgtgctgctcgagaccagcgcaggcgacatcgtcatcgacctgctgaccgactacgcgcccaaggagtgccaaaacttcctcaaactctgcaagctcaagtactacaacttctctcccgtccactccatccagcagaacttctccttccagaccggcgatcccctcggcccgacctcagcccagtcggatggcggctcctccgtctggggcctgcttgacgggccgccgcggaagagcttcgccgccactttgcaccccaagctgaagcacctcgagcgcggcaccgtctccatggccaccgccccgcacccctccgaccccgatgtccgcctcgccgccagccagttcctcgtcactctcgccgacaacaccgacttcctcgacggcaaggctgccatcttcggccgcgtcgtcgagggcttcgacgccctcgaggccatcaacgccgccatcctcgacaaggacggccaccccctcgtcgacatccgcatcaagcacaccatcatcctcgacgacccctaccccgaccctcccggcctccgcgagcccagcaagtcgccgcagccgtccaaggcccagctggccaccgtgcgcatcgccgacgatgccaacctcgacgaggaggtcgacgaggaggccgccgagaggctccgccgcgagagggaagcccgcgcccaggccctgaccctcgagatgatgggcgacctcccctttgccgaggtcaagcctcccgagaacgtgctgttcgtctgcaagctcaaccccgtcaccgccgacgccgacctcgagttcatcttcagccgcttcggcaccatcctgtcctgcgaggtcatacgcgacaagaagaccggcgacagtctgcagtatgccttcatcgagtttgaggacaagggcgcctgcgagtctgcctacttcaagatgcagggtgtcctcatcgacgaccgacgcatccacgtcgacttcagccagagcgtgagcaagctggctgatgtctggaggggcggcgagaacgccaagcggaaacgttcaaagggcggctggggtggcgtccaggggctcgagaagtggaggaaatacaggaacgaggacgatgcgcgcgatgctggcgacgattacagtatggtctacggcgaggaggaaatgcgtgggcgccatcaacggcaacatgatgaaggggaccgacctgacaacagagcaacacatccatcgatccgtggccccgaccgcgaatctaggcccaggagagaggagagaccttaccaagatacgcatcgcaatccaagggaccgggattgtcaccagagaagacgcagccgcagcagaagtcccaggaggaggagcagggacagggtcagggacagaggcggatatggagaccgtcgaccccgcgatccagatcgggaccgtccgagagggagagacgaggggcgggatgggtaccgtgacaggaggagacgagatgactgaatgaacaccaacatagagcgcttacgaacggctatacttgcccatactacagacaggaaatggttcggcctttgaatactaatgcccggggatttggatcctgagactggggtcttttcgcgagcaaagtgacatcgtggtgaaaaccactctattgtcaagatgcgcaacatgggatgaaagacaatcccatgtgcatccggctcggagccttgcatatatctgcaattcatacgcgatcgtgtgcgacagttccatcatgggagtcgaagctcaggcgtcgcaggttgatggggtgtttaactcatatcatgagatatccggtgcgacgccagcagcatcatcatctagcagctagaccccgtttcggacacgatagggaggcgcgagaggtcactagcgaaggtatctaatatcagacaagtcgtcccatcttaacggttgttggttcgccaaaacacatgcaggccgatctgcttcgcgctacagggtcaccggcatctgtctgcgaccatgcttagcattgtcctaaattacatacaacgacgaagaggaaaagatagtttacaaattctcaagatcgccccccgaatgacttgccattgggtaaggctgtgagaccggatgccctgcctgccgagacttatacaaataaaaacatgcaggactgtatgtcagccaaaatagtttgttttacgctgctagctagttcatgatcgtggcctctcagctgggacgggtttcaatggtctgacgatgatgtcgggctacggaaatactgcgagcctgttttgggcgtgaaagaatttagcatgcataagctggactagatagtactaagtgacctttcgggcgcgagatatcgaaaaactgccccaatggtttgatgtttctgaattcgacacgaacagcactgcaaaatcatagaggagcaaatcagcatgtagatggaggaagggaaatcattcagctccgatggaaatatggattcgcccggaagcatagtttaagacacaagatgaacatatggttttacgacatggaaaatgggatcgaacatgttgcatcctgaggggaaagacgaccttcgcatgtgttgtctcgaattacgtcttacaggcatacccgccagggcaatttttgcgaaagattgttatctcctcgcagggctcacgaattcgagacaaagagtcctcctccggctcgtacctccagtgttctggattctggaatgcccatgccgttgggtgctggcaggggtgcaagttcaggcacatcttcagctgggggcgaattacgaccagctgagaatctggtgcgatatgaaggggcatgttttgctgggtccctgtagtgtatcgcaaagttccttacatgacttcgactttctcaatccctgaatcatttagtaggtggtttcatacctagtgcgtattgtattttgaggtccctattggtatgagtcacagagagagtagtgatgtttagcctcgatggcctttagctggtgtgcgagcaggttgcgcgctcaagatgaagatcccaagacacagtgctgagttttctattgttagcctcgtgatgggttgataactacaacggctcaccgctctttctgaagtactgagattggggattgaggggagtagaagagagaaagaggcaacaagatggaaagagctttctcaagattcaatatacggtactagatgttgttttacagaaacacaaaactctagacattttgtatattaatttgaattggaagcacgcgtagattgagactcgggagcattatctcgttaatgttttgcacgagcattatcttcttatgtagataagag

SEQ ID NO: 9505 - DNA, 1242 bp, Muscodor strobelii
  misc_feature: SGI cDNA ID NO. 562973
  misc_feature: Elevated expression when VOC is produced
  misc_feature: Encodes the peptide sequence at SEQ ID NO 9506
atgtcactgatggcagaaagagatgaccctgaccagcctcgcaagcggatcgccgtcgcggtaagcaacaatcctcttcttcgccaatgcaatgccccttccggtctcgtcgaggctgactcgaaagttatccgaagtgcggaagatgtcgtctcatcgcaagaaacgcaactcaaagatggtagtgactatggttataaccttgacgctgcccggccgtacgctcattcaagagccactgtttcgcatatgggctctctgtcgccttatgctcccgagatgcctacgggagatgtgctctatcgccagaccgcctatccgtatggaagcaaaagctactatccagcaatgtctggatgggccagtacatacgctgaagacggaggcgtcgactacagtctcaactatacgtacccgatgatgaaccaggaatctgcccctctggtacctggatacggacaatacagcactcgaaagtcatcgtacgtggatccagagacgtcatcctactcttatggtaatctagtccatcgacccgctgctagcagcgactctcaaaacttctccctttcgagcatggcgacagcacttcccagcacttcagaacgcatggtgtcttccgatcgtctccactctcacgtcaatcgtacattgacgagctcgtcaagctatcgcagtgatggactaccggctcactactctagtagcaagggatcctcgaccaccaccatgtctgatgtaggttacactggactacattcatcattcgagtctccatattcggcaccaaacacgctcccctccaccatctcccatcgctcgacaagccatacggatgcgtcgtactcgacgggcagctcctcggcccccgacacaatgtactccacaagcgaccatgctttgcgttctactgaagacagcagtagcggttatagttatatatacagcgatagcaagctcgattcctcacggcgggagtctcactcgagcggaggagccagcggcggttcagtcctgccgaacgggcacgtctatgttcctgatggccattctcctcatgtgcactctcatagctacgtggtaccaagcgcatcgagctcgcagggcggcggcatcagcggaagcactgcagcaataggaacaggtggcgttggtggttctgggagtggccgtggcagcggatcctcgcatagaccgtcggacagtcaccgtcgatctgcgggtagcctccgtgggggataa

SEQ ID NO: 9506 - protein, 413 aa, Muscodor strobelii
  misc_feature: SGI Peptide ID NO. 562973
  misc_feature (4)..(241): NCBI GI: 261353602 Blast Desc: conserved [Verticillium albo-atrum VaMs.102]
  misc_feature (4)..(197): NCBI GI: 256729333 Blast Desc: NECHADRAFT_47910 [Nectria haematococca mpVI 77-13-4]
  misc_feature: Useful for introducing or modulating the production of volatile compounds
MSLMAERDDPDQPRKRIAVAVSNNPLLRQCNAPSGLVEADSKVIRSAEDVVSSQETQLKDGSDYGYNLDAARPYAHSRATVSHMGSLSPYAPEMPTGDVLYRQTAYPYGSKSYYPAMSGWASTYAEDGGVDYSLNYTYPMMNQESAPLVPGYGQYSTRKSSYVDPETSSYSYGNLVHRPAASSDSQNFSLSSMATALPSTSERMVSSDRLHSHVNRTLTSSSSYRSDGLPAHYSSSKGSSTTTMSDVGYTGLHSSFESPYSAPNTLPSTISHRSTSHTDASYSTGSSSAPDTMYSTSDHALRSTEDSSSGYSYIYSDSKLDSSRRESHSSGGASGGSVLPNGHVYVPDGHSPHVHSHSYVVPSASSSQGGGISGSTAAIGTGGVGGSGSGRGSGSSHRPSDSHRRSAGSLRGG

SEQ ID NO: 9507 - DNA, 645 bp, Muscodor strobelii
  misc_feature: SGI cDNA ID NO. 562974
  misc_feature: Elevated expression when VOC is produced
  misc_feature: Encodes the peptide sequence at SEQ ID NO 9508
atgaagtactcaatctccattgcagccttgctgcccattggggccgtctttgccgctccggcacccgcccccgtggcagcgccgttgcctatgccgactccgccaggaattccttctgcttcatcggcgcgcactgctctggcggggctgacagtttcaacaaacccagacgacggcacatatgaccgtgatcttttcccgacttggatcaccatagagggcacatgtaacacgcgcgagtacgttctgaagcgcgatgccactacagtcacggtcgggtcggactgctatcccaccagcggtaaatggacgtcgccatacgatggagcaacatggaccgctgctagtgatcttgatatcgatcacatggtgccactcaagaatgcatggatttctggtgccagcaaatggacaacagccaagcgacagcagttcgcgaacgatgtggatagaccacagctatgggctgtcacggataatgtcaaccagtctaagggagacaagagccctgacagctggaagcctccctcatccagcttctactgcatttatgcccgctcctggattcaagtcaagagctactgggccctggcgatcacaaacgccgaaaaatcggcgctgtcaagcatgcttgacacttgttaa

SEQ ID NO: 9508 - protein, 214 aa, Muscodor strobelii
  misc_feature: SGI Peptide ID NO. 562974
  misc_feature (46)..(205): Pfam Id: PF09352 Pfam Desc: Domain of function (DUF1994)
  misc_feature (1)..(214): NCBI GI: 46125231 Blast Desc: FG06993.1 [Gibberella zeae PH-1]
  misc_feature (36)..(214): NCBI GI: 85090653 Blast Desc: NCU09525 [Neurospora crassa OR74A] gi|28919889|gb|EAA29284.1| conserved [Neurospora crassa OR74A]
  misc_feature (13)..(214): NCBI GI: 116191437 Blast Desc: CHGG_05436 [Chaetomium globosum CBS 148.51] gi|88181349|gb|EAQ88817.1| CHGG_05436 [Chaetomium globosum CBS 148.51]
  misc_feature (29)..(214): NCBI GI: 256732589 Blast Desc: bacterial-type extracellular deoxyribonuclease [Nectria haematococca mpVI 77-13-4]
  misc_feature (25)..(214): NCBI GI: 39941898 Blast Desc: MGG_10798 [Magnaporthe grisea 70-15] gi|145010299|gb|EDJ94955.1| MGG_10798 [Magnaporthe grisea 70-15]
  misc_feature (1)..(214): NCBI GI: 261357013 Blast Desc: secreted protein [Verticillium albo-atrum VaMs.102]
  misc_feature (15)..(214): NCBI GI: 169625182 Blast Desc: SNOG_15858 [Phaeosphaeria nodorum SN15] gi|111055576|gb|EAT76696.1| SNOG_15858 [Phaeosphaeria nodorum SN15]
  misc_feature (1)..(214): NCBI GI: 238843543 Blast Desc: secreted protein [Microsporum canis CBS 113480]
  misc_feature (22)..(214): NCBI GI: 119499265 Blast Desc: NFIA_040690 [Neosartorya fischeri NRRL 181] gi|119414554|gb|EAW24493.1| conserved [Neosartorya fischeri NRRL 181]
  misc_feature (41)..(214): NCBI GI: 171680954 Blast Desc: protein product [Podospora anserina] gi|170940435|emb|CAP65662.1| protein product [Podospora anserina]
  misc_feature: Useful for introducing or modulating the production of volatile compounds
MKYSISIAALLPIGAVFAAPAPAPVAAPLPMPTPPGIPSASSARTALAGLTVSTNPDDGTYDRDLFPTWITIEGTCNTREYVLKRDATTVTVGSDCYPTSGKWTSPYDGATWTAASDLDIDHMVPLKNAWISGASKWTTAKRQQFANDVDRPQLWAVTDNVNQSKGDKSPDSWKPPSSSFYCIYARSWIQVKSYWALAITNAEKSALSSMLDTC

SEQ ID NO: 9509 - DNA, 2507 bp, Muscodor strobelii
  misc_feature: SGI EST ID NO. CUFF.22578.1
  misc_feature: Variant of the nucleotide sequence at SEQ ID NO 9507
gataccactttaaaaggcaattttggtacaccaaccaaaggctttcaacctgacacgactcgcctaggctcgaccgtaatatcgcataagctctagcttagtatggaccctctttatcttctgagactcggaataggggacctaaataagcatacgggtcctacaataccctttttgcctagacagccaagacagccaagacggcacctacacttagcttagacccagtgccacaccattactcatgaatccggcaggtcgctcgcgtttatatcgtgaagcttgatacagctgtcgctgcttcgaggcgtgattggcaatctggatgagttatctcggatgtgcgacgagaatcgcggtttgctcgctggcacgttcagcaacgataggaaggtattactgttgaggctccgagctaacctcggtggcttcagctctatgaagaatcggaattttggaatgcttggagcgaatatggatcgtgctataagatcacgaccacctcctccgattttgaggccagggttcaagcagcttttgtcattgttggagactcgtttcgccgtccgttccacatttcagcgtgctctgtcgcaatgaagtactcaatctccattgcagccttgctgcccattggggccgtctttgccgctccggcacccgcccccgtggcagcgccgttgcctatgccgactccgccaggaattccttctgcttcatcggcgcgcactgctctggcggggctgacagtttcaacaaacccagacgacggcacatatgaccgtgatcttttcccgacttggatcaccatagagggcacatgtaacacgcgcgagtacgttctgaagcgcgatgccactacagtcacggtcgggtcggactgctatcccaccagcggtaaatggacgtcgccatacgatggagcaacatggaccgctgctagtgatcttgatatcgatcacatggtgccactcaagaatgcatggatttctggtgccagcaaatggacaacagccaagcgacagcagttcgcgaacgatgtggatagaccacagctatgggctgtcacggataatgtcaaccagtctaagggagacaagagccctgacagctggaagcctccctcatccagcttctactgcatttatgcccgctcctggattcaagtcaagagctactgggccctggcgatcacaaacgccgaaaaatcggcgctgtcaagcatgcttgacacttgttaagtcatcaatggcaatattgtcgaagtgttgcgtcgcgacgcagatcaatgttcttggagtggacgccgctcactgcatcgttacaatatcccttaatgtcacgtacctgcgtaatgcggtcagtgcttacgttagtgattagcacttgtgaatggtgacttaaatatcgcaatgattggattgttgaatggacgatagtttatcaaattctctctaatgataacacacttgtttccaccgacaaactacctccaagttagggcgacctatgacaatcttttgtaagcacgaagtatctgttccacgtaattccaccaatgccccagaccggtgaaatgcgggtttgacatgctagccatccagtgtcaagctgccgcccaaatacaagtctcaacccaatgcgtgtaatcaaggcaagacccaaaaagcgaagtaagcagactcgctttgaccttaagcaccatagcggagagctcgccaagcaccgccatgatccattagtattgccgctgacatacacgcacattcccatgcaacgagaatgtcactgataaaagaaaaagcctgtttttgtcttctatggctatcgccgatatgaattgctgatgatgctataaatcatgatgccagactgggaatatgcaccccaacgggacaatttgccggcagacctctcaaatcatagattgctcaatttgaaatatgttgctttcaaaacgaaaggaaactgaaacaagagaataggggtccatggggatggaagaaaccgtgttgaagctgaagcatctggctttccatgagccgcataacacagctctccgtcaggtccggatgccatgtcactgctgatacattagagcgtcaatgatttccgcaaggctatagacgggtagcgcctacgatattccagatagagtgatcgatcccgaagataagagctctattgattgtattgttaattctggattcatccggccgaactgtcaagtccttccctgcgttttccacgacaggccgctcgcatcatacgaagcgccatgcgttagccaaccccatggtggattgtctgcgagggggtagatcgggacattgggttgaacagctcgtgtgaaagaggcgtcggaagttgcccccaattcgggcgctggttttccgagtgacgcgccattagggagagataatgagaccagtattgaggcctgacatcgagccagggctgtgagagaggtaccaactgcaacgcggatgtaggcattgaaagggatg

SEQ ID NO: 9510 - DNA, 2487 bp, Muscodor strobelii
  misc_feature: SGI cDNA ID NO. 562975
  misc_feature: Encodes the peptide sequence at SEQ ID NO 9511
atggcaaacgtcgagctggggttgtcgattggcttctacctctatccctgcggccttatcgttacgctcttctcatcacaattgcttcgatatcgatatcaatatgcaggtagcaccgcctccgtcgacagcaagaatcgcgagaaaatccagcgattctacgctacctgcatctgggcagtacagctgctgctgacaccgatacttctcgcaagtatcattgatgtagcggccaacgctgtcgactatgcagatgtcaaaaccaacttccccttcagtgcttacttggcatcatatgttgctgtcctgctttattttcttgcgggtcttttacctgatcccgatggtccatggaaccccaccatctcccatggctatgcctgggcagctggtgttttgttcgaggccgtgattgccgccgtattcttctctcagaaaaaggctatcgatacgccgcctgaactgctcgatagtctctttgggttgggtcttgcgcgtgtcttcctattcatggttatgatctcacttctcatccgcagagaatatgcactcaggaaggaagccaagggaacaagatctgagcgtcaatcacttctcgaaaacggtgatgggcctgtaaatggatattccagtatcccgtcgccagcaacaaagggtgaagctaaaaaagtccgggatccgtccaagtcaaactggtttgactatttcgctggcacacgcgttcttttcccatacctctggccgtctgattcgcctttgcaccaggcaacagttctcctctgcgtcgtgcttctggtcgcccagcgcattgtgaacatcttagtaccgctgcagcttggtgtgcttgttgatgcccttggctacgggaaaattccgtataaagaggtagcgctgtacgtggtttaccgaggtcttcaaggtcagcaaggcgcacttggatccgcaaggtccgtgctatggatacctgtttcccaaaacctttttcggaggttgtcgaccgccgcctttgagcacgtccttggtctatctatggatttccatctcagtaagcggattggcgaagtaacaagcgcccttagccgtggcagcgctatcaacacttttctggagaatttcctgttccaggtcttccccatgctgttcgacatcctcgtcgccgctgtcgtgctgttcttcaagtatgatgcattctataccctcattgttctcgtcattatgtgggcatatatcttcatgacgatatatatggccaaatatcgaggaaaacaaaggcgagacatggcgacaaaagcccgagagatggaggctgccaaaactgatgctatcatggcgtacgagacggtgcagcacaactgcgcagtctcatctgagacagaaaagtacaaaagccatgtgacaacatatcagaaggctgaaagacttgtacttctatcgttgaacgcgctcaatctaacccaaagctccgtcttcacactgggagtggctatgatcgtcgttgtatctgcgtataagattgcgcatggtaagcaatctgttgctgactttgtcagcctcattacctattttgcccagcttcaggcccccttgaacttcttcggtacattctacacaatgcttcaaaacaatctgatcgaggcagagcgcatgctagagctttttgaagagacatccggagtcgtcgaaaagcccgacgcgaaggatctcccatccccacaaggcgaaatcaggttcaataatgtgaccttctcctatcaagggaaagaaccagttttgcacaatgtcaatttcacagtcgcccccgggacaaagactgctcttgtcggagaaacaggaagtggcaaatcgacgtgtctgaagctcctgtttcgattctacgatgttggcgatggctccattacggtggacggaaatgatgtgcgggaactcaagatcgatggactgcgtaaacacatcggtgtagtgccacaagatacggtccttttcaacgcgacgattatgtacaatctacaatatgccgacccgaatgcctcggaagccgatgtttatgaagcatgcaaggccgcaaatatccatgacgccataatggcatttcccgaccaatataacacaaaagtgggcgaaagagggctcaagttatctggtggagagcgccaacgtatcgccattgcccgtgccattttgaagaacgcgcgcgttcttttactcgacgaggccactgcgtcgttggacaccctcactgagagacagatccaagaggcgttagacagagttacagctggaagaaccactgtaacaatagcgcatcgtttatctaccatcgtaaattcggatcagattgtcgtacttcaccatggccgagtgattgagacaggaacacatagcgaactcctcaaattgagaggcagctaccatgcaatgtgggaaaagcagacggcaacagacaagaagcagtcagagaaggatgatgttaaacccgaggaagagtag

SEQ ID NO: 9511 - protein, 828 aa, Muscodor strobelii
  misc_feature: SGI Peptide ID NO. 562975
  misc_feature (258)..(529): Pfam Id: PF00664 Pfam Desc: ABC transporter transmembrane region
  misc_feature (601)..(785): Pfam Id: PF00005 Pfam Desc: ABC transporter
  misc_feature (1)..(828): NCBI GI: 256725423 Blast Desc: NECHADRAFT_83033 [Nectria haematococca mpVI 77-13-4]
  misc_feature (1)..(811): NCBI GI: 46115926 Blast Desc: FG03805.1 [Gibberella zeae PH-1]
  misc_feature (45)..(815): NCBI GI: 116205291 Blast Desc: CHGG_10529 [Chaetomium globosum CBS 148.51] gi|88176657|gb|EAQ84125.1| CHGG_10529 [Chaetomium globosum CBS 148.51]
  misc_feature (13)..(818): NCBI GI: 169768254 Blast Desc: [Aspergillus oryzae RIB40] gi|83766455|dbj|BAE56595.1| protein product [Aspergillus oryzae]
  misc_feature (104)..(818): NCBI GI: 238497538 Blast Desc: transport protein, [Aspergillus flavus NRRL3357] gi|220693278|gb|EED49623.1| transport protein, [Aspergillus flavus NRRL3357]
  misc_feature (95)..(827): NCBI GI: 121709603 Blast Desc: ABC heavy metal transporter, [Aspergillus clavatus NRRL 1] gi|119400615|gb|EAW11040.1| ABC heavy metal transporter, [Aspergillus clavatus NRRL 1]
  misc_feature (151)..(810): NCBI GI: 145238354 Blast Desc: An07g07500 [Aspergillus niger] gi|134076309|emb|CAK39565.1| protein product [Aspergillus niger]
  misc_feature (178)..(819): NCBI GI: 67536694 Blast Desc: AN4517.2 [Aspergillus nidulans FGSC A4] gi|40741670|gb|EAA60860.1| AN4517.2 [Aspergillus nidulans FGSC A4] gi|259482656|tpe|CBF77345.1| TPA: ABC heavy metal ion FGSC
  misc_feature (151)..(810): NCBI GI: 169775225 Blast Desc: [Aspergillus oryzae RIB40] gi|238496145|ref|XP_002379308.1| vacuolar ABC heavy metal transporter (Hmt1), [Aspergillus flavus NRRL3357] protein product
  misc_feature (213)..(810): NCBI GI: 119498231 Blast Desc: vacuolar ABC heavy metal transporter (Hmt1), [Neosartorya fischeri NRRL 181] gi|119414037|gb|EAW23976.1| vacuolar ABC heavy metal transporter (Hmt1), [Neosartorya NRRL
  misc_feature (336)..(810): SWISSPROT Homolog: EC 3.6.3.42 Beta-glucan-transporting ATPase
MANVELGLSIGFYLYPCGLIVTLFSSQLLRYRYQYAGSTASVDSKNREKIQRFYATCIWAVQLLLTPILLASIIDVAANAVDYADVKTNFPFSAYLASYVAVLLYFLAGLLPDPDGPWNPTISHGYAWAAGVLFEAVIAAVFFSQKKAIDTPPELLDSLFGLGLARVFLFMVMISLLIRREYALRKEAKGTRSERQSLLENGDGPVNGYSSIPSPATKGEAKKVRDPSKSNWFDYFAGTRVLFPYLWPSDSPLHQATVLLCVVLLVAQRIVNILVPLQLGVLVDALGYGKIPYKEVALYVVYRGLQGQQGALGSARSVLWIPVSQNLFRRLSTAAFEHVLGLSMDFHLSKRIGEVTSALSRGSAINTFLENFLFQVFPMLFDILVAAVVLFFKYDAFYTLIVLVIMWAYIFMTIYMAKYRGKQRRDMATKAREMEAAKTDAIMAYETVQHNCAVSSETEKYKSHVTTYQKAERLVLLSLNALNLTQSSVFTLGVAMIVVVSAYKIAHGKQSVADFVSLITYFAQLQAPLNFFGTFYTMLQNNLIEAERMLELFEETSGVVEKPDAKDLPSPQGEIRFNNVTFSYQGKEPVLHNVNFTVAPGTKTALVGETGSGKSTCLKLLFRFYDVGDGSITVDGNDVRELKIDGLRKHIGVVPQDTVLFNATIMYNLQYADPNASEADVYEACKAANIHDAIMAFPDQYNTKVGERGLKLSGGERQRIAIARAILKNARVLLLDEATASLDTLTERQIQEALDRVTAGRTTVTIAHRLSTIVNSDQIVVLHHGRVIETGTHSELLKLRGSYHAMWEKQTATDKKQSEKDDVKPEEE

SEQ ID NO: 9512 - DNA, 4391 bp, Muscodor strobelii
  misc_feature: SGI EST ID NO. CUFF.22488.0
  misc_feature: Variant of the nucleotide sequence at SEQ ID NO 9510
ctggccctcaccgtcattttccctagaacgcgatcagagtacttgaaggcctttctccgacttgtccgaatctcagccgtccaactaccaaccggttggtggtcacataattcaggctgaaatggcaaacgtcgagctggggttgtcgattggcttctacctctatccctgcggccttatcgttacgctcttctcatcacaattgcttcgatatcgatatcaatatgcaggtagcaccgcctccgtcgacagcaagaatcgcgagaaaatccagcgattctacgctacctgcatctgggcagtacagctgctgctgacaccgatacttctcgcaagtatcattgatgtagcggccaacgctgtcgactatgcagatgtcaaaaccaacttccccttcagtgcttacttggcatcatatgttgctgtcctgctttattttcttgcgggtcttttacctgatcccgatggtccatggaaccccaccatctcccatggctatgcctgggcagctggtgttttgttcgaggccgtgattgccgccgtattcttctctcagaaaaaggctatcgatacgccgcctgaactgctcgatagtctctttgggttgggtcttgcgcgtgtcttcctattcatggttatgatctcacttctcatccgcagagaatatgcactcaggaaggaagccaagggaacaagatctgagcgtcaatcacttctcgaaaacggtgatgggcctgtaaatggatattccagtatcccgtcgccagcaacaaagggtgaagctaaaaaagtccgggatccgtccaagtcaaactggtttgactatttcgctggcacacgcgttcttttcccatacctctggccgtctgattcgcctttgcaccaggcaacagttctcctctgcgtcgtgcttctggtcgcccagcgcattgtgaacatcttagtaccgctgcagcttggtgtgcttgttgatgcccttggctacgggaaaattccgtataaagaggtagcgctgtacgtggtttaccgaggtcttcaaggtcagcaaggcgcacttggatccgcaaggtccgtgctatggatacctgtttcccaaaacctttttcggaggttgtcgaccgccgcctttgagcacgtccttggtctatctatggatttccatctcagtaagcggattggcgaagtaacaagcgcccttagccgtggcagcgctatcaacacttttctggagaatttcctgttccaggtcttccccatgctgttcgacatcctcgtcgccgctgtcgtgctgttcttcaagtatgatgcattctataccctcattgttctcgtcattatgtgggcatatatcttcatgacgatatatatggccaaatatcgaggaaaacaaaggcgagacatggcgacaaaagcccgagagatggaggctgccaaaactgatgctatcatggcgtacgagacggtgcagcacaactgcgcagtctcatctgagacagaaaagtacaaaagccatgtgacaacatatcagaaggctgaaagacttgtacttctatcgttgaacgcgctcaatctaacccaaagctccgtcttcacactgggagtggctatgatcgtcgttgtatctgcgtataagattgcgcatggtaagcaatctgttgctgactttgtcagcctcattacctattttgcccagcttcaggcccccttgaacttcttcggtacattctacacaatgcttcaaaacaatctgatcgaggcagagcgcatgctagagctttttgaagagacatccggagtcgtcgaaaagcccgacgcgaaggatctcccatccccacaaggcgaaatcaggttcaataatgtgaccttctcctatcaagggaaagaaccagttttgcacaatgtcaatttcacagtcgcccccgggacaaagactgctcttgtcggagaaacaggaagtggcaaatcgacgtgtctgaagctcctgtttcgattctacgatgttggcgatggctccattacggtggacggaaatgatgtgcgggaactcaagatcgatggactgcgtaaacacatcggtgtagtgccacaagatacggtccttttcaacgcgacgattatgtacaatctacaatatgccgacccgaatgcctcggaagccgatgtttatgaagcatgcaaggccgcaaatatccatgacgccataatggcatttcccgaccaatataacacaaaagtgggcgaaagagggctcaagttatctggtggagagcgccaacgtatcgccattgcccgtgccattttgaagaacgcgcgcgttcttttactcgacgaggccactgcgtcgttggacaccctcactgagagacagatccaagaggcgttagacagagttacagctggaagaaccactgtaacaatagcgtatgatcttgcccctatgttgctttccatttgactaattcgggagtaggcatcgtttatctaccatcgtaaattcggatcagattgtcgtacttcaccatggccgagtgattgagacaggaacacatagcgaactcctcaaattgagaggcagctaccatgcaatgtgggaaaagcagacggcaacagacaagaagcagtcagagaaggatgatgttaaacccgaggaagagtagaaggatctgagatacgactcgaatcctactttctcgtatcatacattgtgtgtaaataaaaggtgtaaaaaatagaagggcatagaaaaatgaaattcccagtctctgtctaggttgacatatgagcctgacggacttcctcttattcacttgtgtttttcatcgttgtcgcgacaatcactgcgcatcaatgcatatcacgaagtctcgttcttctatgtgggcgtgatgttgagatagctttccaagacgcaccgtaaaacgcatacatatgccgacgacgattgttcctgggttgaacgagttgctactatgcatgtatacatacataccccatgcgaataacacataggtatcattcgtcctcttcaaagaccgaagaatctgtctatatttgcatgcatgtctcgagcgatcagagaatgcacgcgcgtgcttggctgaatataattcatccagtagaacttctgggctccttcccacgtgtatgagccaccaatgcaagtgtcccacatgttatttgagtcgttgggatcgccgtcacagtaaacggtcagaggctcagtcaagccgaagtcctctttgttttccatgatgctaatcatataactgtagacgtcatagtagatgaacttgtttgcatatttggactcagagagagcggtttcgatggctttgttggcggtttcgatgatattaccccaggtgtcgacgcaaccaccatcagggcacagatatttaggcgtcactggtgcaagatgcttcggatagatattggcgatgaagacatatggtgcaccctgctcgacgagatattcggcattccatgcaatcctgctagaaatgttgctagcaaactcactgttccgtagatctccttcccagaaagcgtcagtgtgttgggatagatcattttcaccagtccagatgaaatgaagagaggtcttgatgctggcaggaggcgatgggtaggtatagtttgaaacaatctgttcgtgtaccgagggcacaggtttcccgttccattgggcttgtcctgctgtgtaggcgttgttgattgttgcaccaaatgtggatgcgccgttcgagccgccgaaagcgtaatcagtcaaagggacattgagaagtgaagcaaggtattgaaccgcaacgggaccatccgtccatgtgccgaacccatatacattcgggggatcgccagaaatcccatgtgcatatgacccatttccattgtcgctcaactcatcaccgaatgccacgagcttgtcaaaaggatagtcagatcgcaactgaagcttaggatgagtgtgactaagataaggagctgcggaaaccactgcgcaagtagttgcagttgcaatgagttgggagagaaggaagtgcatctttcgaagacgcagcacagaatcaacgaacgatggtatcgtaatgatgctcaatgcaagaaagaaaatgaccggacgtggcagctagtgcacaccagaatgaaaaatgaagcgggaaccagacttgaacacagcttcttgagcgcgtgcagacggacttcaatttgtattgacccttgtggcgtagaaagagttttgtattaaaggggagcgccttgcaggtttgattacgccaaaagctgccgagatcattaaggaccaaagggtttgccgtcagcatttttgcaagcgcgaagacgagactaatgacattattaccaaggtagcgctcaatcatgcacaagcaaag

SEQ ID NO: 9513 - DNA, 1017 bp, Muscodor strobelii
  misc_feature: SGI cDNA ID NO. 562976
  misc_feature: Encodes the peptide sequence at SEQ ID NO 9514
atgcacttccttctctcccaactcattgcaactgcaactacttgcgcagtggtttccgcagctccttatcttagtcacactcatcctaagcttcagttgcgatctgactatccttttgacaagctcgtggcattcggtgatgagttgagcgacaatggaaatgggtcatatgcacatgggatttctggcgatcccccgaatgtatatgggttcggcacatggacggatggtcccgttgcggttcaataccttgcttcacttctcaatgtccctttgactgattacgctttcggcggctcgaacggcgcatccacatttggtgcaacaatcaacaacgcctacacagcaggacaagcccaatggaacgggaaacctgtgccctcggtacacgaacagattgtttcaaactatacctacccatcgcctcctgccagcatcaagacctctcttcatttcatctggactggtgaaaatgatctatcccaacacactgacgctttctgggaaggagatctacggaacagtgagtttgctagcaacatttctagcaggattgcatggaatgccgaatatctcgtcgagcagggtgcaccatatgtcttcatcgccaatatctatccgaagcatcttgcaccagtgacgcctaaatatctgtgccctgatggtggttgcgtcgacacctggggtaatatcatcgaaaccgccaacaaagccatcgaaaccgctctctctgagtccaaatatgcaaacaagttcatctactatgacgtctacagttatatgattagcatcatggaaaacaaagaggacttcggcttgactgagcctctgaccgtttactgtgacggcgatcccaacgactcaaataacatgtgggacacttgcattggtggctcatacacgtgggaaggagcccagaagttctactggatgaattatattcagccaagcacgcgcgtgcattctctgatcgctcgagacatgcatgcaaatatagacagattcttcggtctttga

SEQ ID NO: 9514 - protein, 338 aa, Muscodor strobelii
  misc_feature: SGI Peptide ID NO. 562976
  misc_feature (39)..(326): NCBI GI: 164660120 Blast Desc: MGL_1366 [Malassezia globosa CBS 7966] gi|159105083|gb|EDP43969.1| MGL_1366 [Malassezia globosa CBS 7966]
  misc_feature (39)..(326): NCBI GI: 196259473 Blast Desc: lipolytic protein G-D-S-L family [Cyanothece sp. PCC 7822] gi|196199685|gb|EDX94509.1| lipolytic protein G-D-S-L family [Cyanothece sp. PCC 7822]
  misc_feature (26)..(334): NCBI GI: 15600114 Blast Desc: PA4921 [Pseudomonas aeruginosa PAO1] gi|107104020|ref|ZP_01367938.1| PaerPA_01005093 [Pseudomonas aeruginosa PACS2] gi|218894016|ref|YP_002442885.1| phospholipase
  misc_feature (1)..(334): NCBI GI: 71907400 Blast Desc: lipolytic protein [Dechloromonas aromatica RCB] gi|71847021|gb|AAZ46517.1| Lipolytic enzyme, G-D-S-L [Dechloromonas aromatica RCB]
  misc_feature (26)..(334): NCBI GI: 254244186 Blast Desc: PA2G_05031 [Pseudomonas aeruginosa 2192] gi|126197564|gb|EAZ61627.1| PA2G_05031 [Pseudomonas aeruginosa 2192]
  misc_feature (26)..(334): NCBI GI: 254238361 Blast Desc: PACG_04499 [Pseudomonas aeruginosa C3719] gi|126170292|gb|EAZ55803.1| PACG_04499 [Pseudomonas aeruginosa C3719]
  misc_feature (41)..(337): NCBI GI: 46135685 Blast Desc: FG09358.1 [Gibberella zeae PH-1]
  misc_feature (26)..(334): NCBI GI: 116053070 Blast Desc: PA14_64990 [Pseudomonas aeruginosa UCBPP-PA14] gi|115588291|gb|ABJ14306.1| phospholipase [Pseudomonas aeruginosa UCBPP-PA14]
  misc_feature (8)..(336): NCBI GI: 15237350 Blast Desc: GDSL-motif lipase/hydrolase family protein [Arabidopsis thaliana] gi|75170952|sp|Q9FJ41.1|GDL85_ARATH RecName: Full=GDSL esterase/lipase At5g45950; AltName: lipase
  misc_feature (39)..(274): NCBI GI: 218245203 Blast Desc: lipolytic protein G-D-S-L family [Cyanothece sp. PCC 8801] gi|257058234|ref|YP_003136122.1| lipolytic protein G-D-S-L family [Cyanothece sp. PCC 8802] gi|218165681|gb|ACK64418.1| sp.
MHFLLSQLIATATTCAVVSAAPYLSHTHPKLQLRSDYPFDKLVAFGDELSDNGNGSYAHGISGDPPNVYGFGTWTDGPVAVQYLASLLNVPLTDYAFGGSNGASTFGATINNAYTAGQAQWNGKPVPSVHEQIVSNYTYPSPPASIKTSLHFIWTGENDLSQHTDAFWEGDLRNSEFASNISSRIAWNAEYLVEQGAPYVFIANIYPKHLAPVTPKYLCPDGGCVDTWGNIIETANKAIETALSESKYANKFIYYDVYSYMISIMENKEDFGLTEPLTVYCDGDPNDSNNMWDTCIGGSYTWEGAQKFYWMNYIQPSTRVHSLIARDMHANIDRFFGL

SEQ ID NO: 9515 - DNA, 1539 bp, Muscodor strobelii
  misc_feature: SGI cDNA ID NO. 562977
  misc_feature: Elevated expression when VOC is produced
  misc_feature: Encodes the peptide sequence at SEQ ID NO 9516
atgattttcaacgctattaccgccgtgagtgcgttcgctttaaccagtaccctggtttctgggagtgcaattcctcgatactttgagaagaatcccatgacgcgtcggggcatgcccgtgacaactatccaacaagagttaggagccatactgtcgaagaaagcagagatctttgggcctgagaactcccgtttcgaaaatgcaacggaaaggtataatgcttttgcggttcctactgttggagttgtggttcgcccaggtgttgaaaaagacgttgccaaaatcgtcaaatattgcaatgacaatagctttgagttcttaaccaacaatcggggccatggttggacttcttctttgaatgtgtttgatggcctccagattgacatggcattgctttcaaacatcactatcaaaccaaacaagaagtctgcgatgtttcaaggtggcacttataatggtcaagtgattgactatctttgggatcgtggttatgttaccacgactggtgcttgtgcttgtgttgggatggtaggccctgcccttggcggaggacatggacggctcgagggccattatggattaattagcgatcaaatcatcaatttgaatgtggttaccgctgatggatctgagatccaggtcaaccagaacagctacaaagatctcttctggggtatgcgaggtgctggacataacttcggtattgtcaccagctttgaaatgaacatctaccctcgtggaccggacacttggcactaccacaactacatttggactggtgataagcttgagaggatgatagacgagctgaacaggatgcacaacaatggttccacaccggtagacttggctttcgagtttggccatatgaactttaatgatagcatcagcgaaactgagcctgttctcacctggtcattcatctatcgaggcagcgcacgtgagggagaaaagcttttgaagggaatgagcagcataggcgcagtatatgaagagaccggagatgtgccttatacgcaaatcgccactgctcagggcaccggactcggggatccgctctgcaccgagaaacacttgaaccacatattttcgactgtccatcttcaagtctacaacgcgacagccgagcgcaagatctacaacgccctctatgaacaagcaaagacccaccccgagttcaagacggccaacatcattcacgaaggctattccaacaaggcagtgcacgagcagccatctgatgactcggcgttcccatttcgtgcagagaatcacctcatgctcttcgatctgccaatccctactggctctgaccttgagaaccccgcacgcgagcttgctgataaagtacgcgatctttggaatgagggacagccgggccgtcctgctaccacatatgtgaattatgcaagggggtctgagacgcctaagcaaatgtatggcccggatgaatggcggttgcagaggcttcagaaactgaaggcgaagtacgatcctataaatcggtttcgattttacaacccaattatcgtggattag

SEQ ID NO: 9516 - protein, 512 aa, Muscodor strobelii
  misc_feature: SGI Peptide ID NO. 562977
  misc_feature (465)..(510): Pfam Id: PF08031 Pfam Desc: Berberine and berberine like
  misc_feature (80)..(215): Pfam Id: PF01565 Pfam Desc: FAD binding domain
  misc_feature (4)..(511): NCBI GI: 39970897 Blast Desc: MGG_02915 [Magnaporthe grisea 70-15] gi|149210401|ref|XP_001522575.1| MGCH7_ch7g678 [Magnaporthe grisea 70-15] gi|86196633|gb|EAQ71271.1| MGCH7_ch7g678 grisea
  misc_feature (18)..(512): NCBI GI: 261358233 Blast Desc: FAD binding domain-containing protein [Verticillium albo-atrum VaMs.102]
  misc_feature (6)..(510): NCBI GI: 85089908 Blast Desc: NCU09635 [Neurospora crassa OR74A] gi|28919498|gb|EAA28930.1| conserved [Neurospora crassa OR74A]
  misc_feature (18)..(510): NCBI GI: 170940309 Blast Desc: protein product [Podospora anserina]
  misc_feature (5)..(509): NCBI GI: 39943374 Blast Desc: MGG_10907 [Magnaporthe grisea 70-15] gi|145010943|gb|EDJ95599.1| MGG_10907 [Magnaporthe grisea 70-15]
  misc_feature (12)..(510): NCBI GI: 67528330 Blast Desc: AN4363.2 [Aspergillus nidulans FGSC A4] gi|40741334|gb|EAA60524.1| AN4363.2 [Aspergillus nidulans FGSC A4] gi|259482827|tpe|CBF77678.1| TPA: conserved [Aspergillus FGSC
  misc_feature (43)..(510): NCBI GI: 149211333 Blast Desc: MGCH7_ch7g1123 [Magnaporthe grisea 70-15] gi|86197078|gb|EAQ71716.1| MGCH7_ch7g1123 [Magnaporthe grisea 70-15]
  misc_feature (12)..(510): NCBI GI: 171681662 Blast Desc: protein product [Podospora anserina] gi|170940790|emb|CAP66439.1| protein product [Podospora anserina]
  misc_feature (33)..(510): NCBI GI: 85119273 Blast Desc: NCU02927 [Neurospora crassa OR74A] gi|28927420|gb|EAA36373.1| [Neurospora crassa OR74A]
  misc_feature (1)..(510): NCBI GI: 116205529 Blast Desc: CHGG_10648 [Chaetomium globosum CBS 148.51] gi|88176776|gb|EAQ84244.1| CHGG_10648 [Chaetomium globosum CBS 148.51]
  misc_feature: Useful for introducing or modulating the production of volatile compounds
MIFNAITAVSAFALTSTLVSGSAIPRYFEKNPMTRRGMPVTTIQQELGAILSKKAEIFGPENSRFENATERYNAFAVPTVGVVVRPGVEKDVAKIVKYCNDNSFEFLTNNRGHGWTSSLNVFDGLQIDMALLSNITIKPNKKSAMFQGGTYNGQVIDYLWDRGYVTTTGACACVGMVGPALGGGHGRLEGHYGLISDQIINLNVVTADGSEIQVNQNSYKDLFWGMRGAGHNFGIVTSFEMNIYPRGPDTWHYHNYIWTGDKLERMIDELNRMHNNGSTPVDLAFEFGHMNFNDSISETEPVLTWSFIYRGSAREGEKLLKGMSSIGAVYEETGDVPYTQIATAQGTGLGDPLCTEKHLNHIFSTVHLQVYNATAERKIYNALYEQAKTHPEFKTANIIHEGYSNKAVHEQPSDDSAFPFRAENHLMLFDLPIPTGSDLENPARELADKVRDLWNEGQPGRPATTYVNYARGSETPKQMYGPDEWRLQRLQKLKAKYDPINRFRFYNPIIVD

SEQ ID NO: 9517 - DNA, 2448 bp, Muscodor strobelii
  misc_feature: SGI EST ID NO. CUFF.22500.0
  misc_feature: Variant of the nucleotide sequence at SEQ ID NO 9515
tccagatcctttaaactttaaaccttcgacactatagactgattggattgtgtggcgcacagcttggacctttttgtaaataacaccgaagtctagatgacatgcgatttggtagcctgacgggcgcagtcggtgcggctgaacgacaagggaaatttccgagccagactgttggctccccaagctgcatccttcaacacaggggttgacaacgaagctatgcaggtgatgagaaaatactgtatggtgataagaagacgaataaaaatagttttttttctttttttcgctgagcatcgcatcggacctggcaaggcggataaacatgagggccagtgcatggactggatttgttgatataagaagacctatctgcactctgtatgattcgcagatttcatgaacatccagaccattagatatattgcaattggcgacataatttcaagcctccgatatgattttcaacgctattaccgccgtgagtgcgttcgctttaaccagtaccctggtttctgggagtgcaattcctcgatactttgagaagaatcccatgacgcgtcggggcatgcccgtgacaactatccaacaagagttaggagccatactgtcgaagaaagcagagatctttgggcctgagaactcccgtttcgaaaatgcaacggaaaggtataatgcttttgcggttcctactgttggagttgtggttcgcccaggtgttgaaaaagacgttgccaaaatcgtcaaatattgcaatgacaatagctttgagttcttaaccaacaatcggggccatggttggacttcttctttgaatgtgtttgatggcctccagattgacatggcattgctttcaaacatcactatcaaaccaaacaagaagtctgcgatgtttcaaggtggcacttataatggtcaagtgattgactatctttgggatcgtggttatgttaccacgactggtgcttgtgcttgtgttgggatggtaggccctgcccttggcggaggacatggacggctcgagggccattatggattaattagcgatcaaatcatcaatttgaatgtggttaccgctgatggatctgagatccaggtcaaccagaacagctacaaagatctcttctggggtatgcgaggtgctggacataacttcggtattgtcaccagctttgaaatgaacatctaccctcgtggaccggacacttggcactaccacaactacatttggactggtgataagcttgagaggatgatagacgagctgaacaggatgcacaacaatggttccacaccggtagacttggctttcgagtttggccatatgaactttaatgatagcatcagcgaaactgagcctgttctcacctggtcattcatctatcgaggcagcgcacgtgagggagaaaagcttttgaagggaatgagcagcataggcgcagtatatgaagagaccggagatgtgccttatacgcaaatcgccactgctcagggcaccggactcggggatccgctctgcaccgagaaacacttgaaccacatattttcgactgtccatcttcaagtctacaacgcgacagccgagcgcaagatctacaacgccctctatgaacaagcaaagacccaccccgagttcaagacggccaacatcattcacgaaggctattccaacaaggcagtgcacgagcagccatctgatgactcggcgttcccatttcgtgcagagaatcacctcatgctcttcgatctgccaatccctactggctctgaccttgagaaccccgcacgcgagcttgctgataaagtacgcgatctttggaatgagggacagccgggccgtcctgctaccacatatgtgaattatgcaagggggtctgagacgcctaagcaaatgtatggcccggatgaatggcggttgcagaggcttcagaaactgaaggcgaagtacgatcctataaatcggtttcgattttacaacccaattatcgtggattagcaagtggcatagcggccgagactactagggctccactctaaaacctatgcttgggctcgttttcctttgtctcgattattttcaaactagaactagactttaaatgctcgcggcgaccttgtaatattatctgatcctctttgtacctatttcataacgcgtatatctagaaagcccttttatataccttatgcttccacaaatcagttcaaatcgcggacgtgccgattgaaaccccgacgagatctagccacatagtccctttccagatcttaattataacgtctctttacgtttcgcgtggtatccagctgtatatatgactgctacctgtcgaataggttagcgggggtgctattacaggcagctttacttgaattcgagaacaagtttgttgattggcataagccaacgccgtttattcatgttacctcgtaggcattatctcctgg

SEQ ID NO: 9518 - DNA, 270 bp, Muscodor strobelii
  misc_feature: SGI cDNA ID NO. 562978
  misc_feature: Encodes the peptide sequence at SEQ ID NO 9519
atgggtctctttaccggctcgtcgtccgacgctcccgcgaaagcgacccgcgaggagatgcgcgatgcgaagctgcccctagcctaccgcgacagctgcgccaacctgctcatccccctcaaccgctgccgcaaagacacctactacctgccctggaagtgcgaggacgagcggcacagctacgaaaagtgccagtatgtcgagttcaagaaacgtgttgccaagatggacgaactgcgcgcctccaaagacggtgctcgaagcaactaa

SEQ ID NO: 9519 - protein, 89 aa, Muscodor strobelii
  misc_feature: SGI Peptide ID NO. 562978
  misc_feature (1)..(77): Pfam Id: PF05676 Pfam Desc: NADH-ubiquinone oxidoreductase B18 subunit (NDUFB7)
  misc_feature (14)..(66): Pfam Id: PF05676 Pfam Desc: NADH-ubiquinone oxidoreductase B18 subunit (NDUFB7)
  misc_feature (3)..(89): NCBI GI: 171676509 Blast Desc: protein product [Podospora anserina] gi|170936321|emb|CAP60979.1| protein product [Podospora anserina]
  misc_feature (9)..(89): NCBI GI: 46117250 Blast Desc: FG04467.1 [Gibberella zeae PH-1]
  misc_feature (3)..(89): NCBI GI: 164424335 Blast Desc: NCU11348 [Neurospora crassa OR74A] gi|157070471|gb|EAA28195.2| NCU11348 [Neurospora crassa OR74A]
  misc_feature (8)..(89): NCBI GI: 116197477 Blast Desc: CHGG_06894 [Chaetomium globosum CBS 148.51] gi|88178173|gb|EAQ85641.1| CHGG_06894 [Chaetomium globosum CBS 148.51]
  misc_feature (8)..(89): NCBI GI: 256729512 Blast Desc: [Nectria haematococca mpVI 77-13-4]
  misc_feature (6)..(89): NCBI GI: 261353610 Blast Desc: NADH-ubiquinone oxidoreductase B18 subunit family protein [Verticillium albo-atrum VaMs.102]
  misc_feature (3)..(89): NCBI GI: 258572979 Blast Desc: UREG_00184 [Uncinocarpus reesii 1704] gi|237900937|gb|EEP75338.1| UREG_00184 [Uncinocarpus reesii 1704]
  misc_feature (3)..(89): NCBI GI: 119191398 Blast Desc: CIMG_00076 [Coccidioides immitis RS]
  misc_feature (14)..(89): NCBI GI: 145602398 Blast Desc: MGG_04940 [Magnaporthe grisea 70-15] gi|145010825|gb|EDJ95481.1| MGG_04940 [Magnaporthe grisea 70-15]
  misc_feature (11)..(89): NCBI GI: 115391427 Blast Desc: conserved [Aspergillus terreus NIH2624] gi|114194142|gb|EAU35842.1| conserved [Aspergillus terreus NIH2624]
MGLFTGSSSDAPAKATREEMRDAKLPLAYRDSCANLLIPLNRCRKDTYYLPWKCEDERHSYEKCQYVEFKKRVAKMDELRASKDGARSN

SEQ ID NO: 9520 - DNA, 1436 bp, Muscodor strobelii
  misc_feature: SGI EST ID NO. CUFF.22584.0
  misc_feature: Variant of the nucleotide sequence at SEQ ID NO 9518
cttcaattcgctagcagaaaggccctacagacgacgacgctgcttccaggttgttcgcttcggacctccaaaagctccagcatcagcccagctccagcccagctcgaattatctctgattaacgacgacatctcgcttcccacggccgcatagactcaatcgcagaccatctctatctctcgcgcgtataccaccgaccgccgtcgccatgggtctctttaccggctcgtcgtccgacgctcccgcgagtatgtgtgccactcaatccatccctctgccctctaccctcggcccttagctctcaaggcctcaaggcctcaagcccccaaagccctcagacgctcaactaaaacccgcccgccgcgtctcgatccaacacgcctcgccactccattcttgcagcaactatatgagtatgacgagcatgagctaggacacagaggctgacggcgcaatgcctcgacagaagcgacccgcgaggagatgcgcgatgcgaagctgcccctagcctaccgcgacagctgcgccaacctgctcatccccctcaaccgctgccgcaaagacacctactacctgccctggaagtgcgaggacgagcggcacagctacgaaaagtgccagtatgtcgagttcaagaaacgtgttgccaagatggacgaactgcgcgcctccaaagacggtgctcgaagcaactaaactaacgccgatacccgagccctactctcccgacctatctgcatctccctgccggcctactccatttccaaatcactcctgatctcgagcccgagcccgacagctcacacgacgcggctgaatctgcgaaggatagtagcagcgagatgggccacctgggaatggaccaagaggccgtgagggtctccaggctgcaataggtcgaggatgggatatggacggagcggcgatcagcaagactaaagggcaaaaggaatgtgaatgtgaaacagggacaactgtacatacacacgcaaaccaactttcatggcctcttcgaatcccaacagtttcctacaaatcgagatatcggaatagagaagggtagagaaggacatgtacactacacaccaaagtacagcctgtgccagctgctctgggctacaggcagaggaagaattctatcttcatcttcacggtccacttctacccacgcgacctatgtggttttttatcctcggtcgagtcacgtatacctggtaagtgttttaggctcatggctccccttagcagagaaatggaccaaatcaacatctgtaaataagccggccgaggctgctcggaaactggatcctcatagcgcaggcaaacatcaactctgttgttccctttctgtcatttatgtctattcctcaagacagcttgaaacatctcaacctggtcacgaagccgagttatgtcatgacatgtcttgttacaat

SEQ ID NO: 9521 - DNA, 1035 bp, Muscodor strobelii
  misc_feature: SGI cDNA ID NO. 562979
  misc_feature: Encodes the peptide sequence at SEQ ID NO 9522
atgaactcatcggtgcctcttactcagctagacgacgagacggatattatcgccggtactcctaggatgctgcgaaatcggcgacccgttattccctcttcaccgggcagcgtccagagtggtcgacaaccggattttgcgatggacatgattgctgatcacgtgccggactcatacattgctacgactgatgaacttgaccgcgatatgacaccaataccccagacatctcagctgcttgaccgtattagctccccagtaacacctaagcctaattccagccatccaacagacttgcacggcacaccggagaatacaaccgccgatcccatccgaactccttccgcgcccacaagttccggatcgttatgctcgctgaatgaggtgtggtgtacagcacatacttcgcggaatactcaaagcccgtccaaagcgcatgcggctatcccgagcatgtctcaagccctgcgtgaccccgcggagtctgatgaagatttcagaccaacgagcagcatccctaccaaagtagataaagggattcgcaaaggtcccaccaacgtcacgattgaaccagcagaacgtattcctgccagcaagatcaaagaggagcaggttgaagcctgggaaaaagaaaatcgccgctcggctgcaactgagaggaagatctcgccaccacctcgtcggtcctcccgacagcccttcttgatcccgccgggctcgcaggttttcgaactatcatcggactcggacgagtcacccttgctagagaactacgcggatgaagacgtcgatgggacatattcacccaaagtcggtcgtagcagtagtcagagcagtcttcctaatggtgggggctgggtggccaagaagaaaacacgaccgacaaggagttcgagcgcgcttggcccattgatggagaatgcgatgtcgagagcgtcgctgccggcttcttcatcttcccagccgatgggtactggcccatcggaggcttcgcagggagcacgctcacggaggaaaatcagtgcaaggttctag

SEQ ID NO: 9522 - protein, 344 aa, Muscodor strobelii
  misc_feature: SGI Peptide ID NO. 562979
  misc_feature (24)..(289): NCBI GI: 256729328 Blast Desc: NECHADRAFT_95828 [Nectria haematococca mpVI 77-13-4]
  misc_feature (198)..(341): NCBI GI: 171676517 Blast Desc: protein product [Podospora anserina] gi|170936325|emb|CAP60983.1| protein product [Podospora anserina]
MNSSVPLTQLDDETDIIAGTPRMLRNRRPVIPSSPGSVQSGRQPDFAMDMIADHVPDSYIATTDELDRDMTPIPQTSQLLDRISSPVTPKPNSSHPTDLHGTPENTTADPIRTPSAPTSSGSLCSLNEVWCTAHTSRNTQSPSKAHAAIPSMSQALRDPAESDEDFRPTSSIPTKVDKGIRKGPTNVTIEPAERIPASKIKEEQVEAWEKENRRSAATERKISPPPRRSSRQPFLIPPGSQVFELSSDSDESPLLENYADEDVDGTYSPKVGRSSSQSSLPNGGGWVAKKKTRPTRSSSALGPLMENAMSRASLPASSSSQPMGTGPSEASQGARSRRKISARF

SEQ ID NO: 9523 - DNA, 5396 bp, Muscodor strobelii
  misc_feature: SGI EST ID NO. CUFF.22513.0
  misc_feature: Variant of the nucleotide sequence at SEQ ID NO 9521
ccaggacatgtcggttgataaggtatttacatgtaactagttttctcgacgtgtggtttctgatattctactttgtaatgatacccctgtcctattggcactcttaatctcggcgtgtctgctcatctgcctcccatcttcgcatctcgactcgacttgtcccacctcgtcgtcgtcacaccatccacctgctctcagacctcaaaccacacactttcaccaccactgattcagcgacaagctctccgaccctcatttcttgtggtcacgtgcggaagacatacaaccaaccatctgcagactcatcaacaggcccatcgctcagccagcccatcctcgtcacccgccgcggccgccatggctgccgaccaggacatgcgcctgcgtctcgtcgtgcgccgccatgggcttcccgaggcccgcctcatgtggagcgtgcgactggacagcgactcgaccatctcgaagctgctcgagcacctcgacaaggccgtgcccctcgagagcgatgactggggcctcgaggactacgccgtcgagctgcacgacgacgacggcaccgccttcgagtgcctgcactaccagctggtccgcgacgtgctgaagcccgacgaccgcgtcttcatccgcgtcctcgagcgcaacgaccaccgcgccgccgcgccagtggccgcgaccagatctccaccgacggccgccatctcatcgacggtgtgccctttggccgcccccgcctgcgctcccccgtcggccgcccatctgtccacatccccccgcgtaagcgaccccgactcgcctaccaccagccagacccgcgcgccctcctgctgaccaacggcgagcctcccgacgatctcgacccctacattgctatgggctatgatgtgcacggcgacgacaaggacaaggatgacgacgacaccgatgatagcgattatgcacacgattcggagctcgacgaagaagacctcttatcgtcctcggatgaagatgtggatggccatgaccgtgacgaaagcgacgactcctccttctccgctgcagcaatatcggaccatgaagattatgacgaagatctacaccaagaagcgccccacctgagcgaagagaacttcaccctcgacccacgcagtacacccaagaagcagtcctcggcctcggacaagctctctgccctgcgcgccgctttccccgatgcgcccattgacgtgtgcgagggggtgctggctacgtgccaaggcgacctcaacgttacataccgcacgctggccgaggccttcaccccgttcttgaccaagaagaacctgctttctgccaaagcgttaccaagttctgaggccggaaacgtcgagatccctccgccgctgccattggcagctgaagcaccagacacagcacgagagcaggaaggcgaccttgaggaagaacaagaagacgaaaaagagagtgacgaatctgaggaggaggacaatgatctaattcgcaagtacgaccatgctggcttcccgccgggtaccatctcatctggaaaaggtctcactcacatggcaaccgtctcagcatctttcgctagcagtaagattagtggcgctagtgagaccacatctacgacactcaagccgagtcccaagccgagtccgacagagcctgctatccaacaaaacgtgcgagtcaatgacgatgatgagacatcaagcagcgggactagctcggattcaagctcagacgacaatgattctgatttcgattccgattctgaatcggattccgatcctaagaatgatgacccatcttccagttcgtccgattccgacagttcggagtctgataatctagattctgattctgattctgatgactcagattcggactcggattctagttcaaatcaagactcgaggaacgatgccattgctcgtaaacccatcaataccgcccactcccttgcctccaactcttcggaatctagcagtgaaggcagcgtcagtgatgatgacggcccagatagtggccctgaagaagcacctatcgctcgcaatctctcgcgggtggtctctaacaatcatgatatttcgagctcgggcacttcatcggatggaacatccagccagtcttctgacagttcatcggacagcaatagcgatgatgacagcgacggtgaggagagtagtcccgattctgacggtgacatacaggatgagcgagccagcgaatataatcagcttgcgaagagtccttcgacagcaataattgtgcaagacagtaagcacatattttcgaaggagagccaaccaaaaccaacctccatcccagtgccgccgggagctggcaagtcaaagactcaattacgcaatgcccgcaggagagcttcgaagaaagcccagaaggccgagcagtggctccaggaagaggccggtcctaaaactcaaaaggctattcagagtcacgatacagctacacaagtggagatgcgggacgcgagcgaaggcgaaactccaatcgacacgcacgatcaagaagctcttctatttgaagcgaaaagaaacgctttgctagcggccattgcaaatggcggcattgaaattgggccttcgggcgatgttgatctgggcgaaacacccgggggaacacctggtgagaaacgaaagcgtagcacacagttggatgcggatgagaagattcgaaatgaaaacgtggctggcgcgacgcctgaagatggagcaaccgagactcctccatcaactgcgagccagaaaagacgcaaggtcgacgttggtgctgggcgtcgtcttctttttggtgccctcggtctgcgtaatccgaagaccaaagaagacgaggacaagcttcgagacaagcttaccgtagaggctcgtgcgcttcctggcaacaaagcaagtctacgcgagctgtcgatcgtagagccgcccaaagaagatacatccgatcaaaggggcgagaattgggaacgtaagatcaactatcgagcagtggagtgctgccacgaaggaatcgaattgagcccggctccatttcctttccaaatgcggtgggatcctcaacagcaaggctcattgtatcgtaagaagcataatcgcggtggccaaggcaagcaaacgctgcggaatcagtcgcacttctatcagcaggagagcgggactgggaagaagaggaaacgtcttgggtcaggtaccgagcccagtgttgagtacgacgtcacagtcaatagcacagactacaacgccctggcgcccgactacgagaatccggagcccgaaagccaacagataggcgaagagcaagagccaaaacaagagtttagccaagctactgatcttgatgacctgccctcgctaccgacagatatctccgaacttctccctcttcgacctgggcaggctcagattggcatggtcattacctggcaaaagtggtcgtgctcatcagccaccaattggcagccgcaggtctccagcgttacggcaatcattgtccgtgtagacgatgaagatgcggcactggaagtatgtctcgccaaaagggaccgccatttggatagtcagcagaagcgatacgatgacaggactggcaaacgcatatacgacaagtttgaggcacctgatctaaatgaagatggtgaggagatggagaatgatgaagacgaaggatttcggactgttctttggagcgagatgcaagatccgagaattctccagcaacctcaagacctcaccaacgacctggagcctgaaacagacactgaacagtcaaagaacgtaatccagtccattgaggatacggcggatcctgacgacactcgctcccctgaccttgatccaactaagagagaggcaagtccaacatcgggccaacctgagctgagctcgaaatcgaaggcggccgaccccgtttccacagccggaacagacaacacaagtaattcaacatcccatcaagccggacaaggtcaacacacagctgaccgagtgatgtccgatacttctcagattagtagtccctctcagcaattacatgagacaaccagccaggcccttgaggtcagccagatcagcgctgaagctgaatctaccgcccaagatcaagtagagcccacactaccaagtgccatgaactcatcggtgcctcttactcagctagacgacgagacggatattatcgccggtactcctaggatgctgcgaaatcggcgacccgttattccctcttcaccgggcagcgtccagagtggtcgacaaccggattttgcgatggacatgattgctgatcacgtgccggactcatacattgctacgactgatgaacttgaccgcgatatgacaccaataccccagacatctcagctgcttgaccgtattagctccccagtaacacctaagcctaattccagccatccaacagacttgcacggcacaccggagaatacaaccgccgatcccatccgaactccttccgcgcccacaagttccggatcgttatgctcgctgaatgaggtgtggtgtacagcacatacttcgcggaatactcaaagcccgtccaaagcgcatgcggctatcccgagcatgtctcaagccctgcgtgaccccgcggagtctgatgaagatttcagaccaacgagcagcatccctaccaaagtagataaagggattcgcaaaggtcccaccaacgtcacgattgaaccagcagaacgtattcctgccagcaagatcaaagaggagcaggttgaagcctgggaaaaagaaaatcgccgctcggctgcaactgagaggaagatctcgccaccacctcgtcggtcctcccgacagcccttcttgatcccgccgggctcgcaggttttcgaactatcatcggactcggacgagtcacccttgctagagaactacgcggatgaagacgtcgatgggacatattcacccaaagtcggtcgtagcagtagtcagagcagtcttcctaatggtgggggctgggtggccaagaagaaaacacgaccgacaaggagttcgagcgcgcttggcccattgatggagaatgcgatgtcgagagcgtcgctgccggcttcttcatcttcccagccgatgggtactggcccatcggaggcttcgcagggagcacgctcacggaggaaaatcagtgcaaggttctaggaactgtgaacaatgactgggctttatactcatttctgtgtgaagacaatccgtccgttgtggtattggtagtacagcatatagcttatattcaacaagggagatatgtctatgcatatgcgcgatgtcaacatgattcaatgttgccccgcggcttgattgtcgtgggaacagtgttaagctctagataaacaaaaagggaaatactctcactattatcacgtcagaccatcc

SEQ ID NO: 9524 - DNA, 1572 bp, Muscodor strobelii
  misc_feature: SGI cDNA ID NO. 562980
  misc_feature: Encodes the peptide sequence at SEQ ID NO 9525
atgtacaagacaattgttcgcagaacggaacaaaagagacaagatacggagaagcgagatcagagtaacgcgaaacaaagtgatgaacaacgccattgtgttgccggtcaagctcggcctttagagtcaatcataaatggaattcatatgctagttgccgcagagctttggaaaaatcttcgtaatggcaaaatcgtacagcttgccaatatgattgactctacgcaggatccggcgagccagtcgggtgacaagcgccctgaacaaccctattttgtttacaagatactggctccggggttgatgcattatcgcttccaccgctactctggatgggatgctcagtttgcacaaggcaccggtgagcatattgtgtttcaattgatgagagatgatgcggtgtattcagttgtagtagccatgaacgctgtcaccactgttttcgggccacaacgaggaatggataagattgctaatcttgccaaacaggtgaaaggacctgccgttgttgtgaatggaggtttctttgttcacgagaagggtatatttcgtcaagattgggacagagagatgttacaggatgagtatgttggctgcaccgttgggaagacgacgtctagtccgaattggattgcctctccggcaggttactctaacgagatgaagtttcgtcctatgacggatgacaccgggttcactgctggcccgtctttaaagaatgaacttattttaggatcgccgtgctggaaaaatatcaataagaaagacggtcgatttacttatttcgctcgcgatgagcacggaaaccgaattcccagcggcggcagagatcatgtcgtccacaaggagagaaaggattgggacgctcgaatgcgccagctgcaagaagatgcagagatgccaaatgcgccagaatcgatcaagtccttgtttgagagggagcaagccaggctaattgacataggccgcccacctgtgtctcgtccaggccaagacaccaaatgggcccaacgctcatctcacgatagctcggtgaagactgtttgggctatcatccctgggaatctttctcacgcgggagagccgaacaatcgagctggcctggtggaccatgctgatggatcatggagttcccatgcctacactggccatcgggataaaagcggactgacccttccgtgttttggagaactgatgcatgctttcatggactttatagggcgtgatgccaatgctgttggggaagactccatgttcgcagtcgacggggggcaaagtgtggctcagattttcgtagatgcaaagggaaaccaatgccgcctgtcacagggtgtcggcttcgaagataaccatccgtttcctatcccggatgacgctccaacgaggccaattccacacgctgtcaccttaggcacccgtcagcgacggttcaggcttcgagacccgttgactctcaagcgtcctcatagtgatgacgacgttgaaggagaagttcatatgaacaaacgtgggaaaacgtacttggatgatgacttcgaatcctctgacgaggacatgtttgactcgttgtga

SEQ ID NO: 9525 - protein, 523 aa, Muscodor strobelii
  misc_feature: SGI Peptide ID NO. 562980
MYKTIVRRTEQKRQDTEKRDQSNAKQSDEQRHCVAGQARPLESIINGIHMLVAAELWKNLRNGKIVQLANMIDSTQDPASQSGDKRPEQPYFVYKILAPGLMHYRFHRYSGWDAQFAQGTGEHIVFQLMRDDAVYSVVVAMNAVTTVFGPQRGMDKIANLAKQVKGPAVVVNGGFFVHEKGIFRQDWDREMLQDEYVGCTVGKTTSSPNWIASPAGYSNEMKFRPMTDDTGFTAGPSLKNELILGSPCWKNINKKDGRFTYFARDEHGNRIPSGGRDHVVHKERKDWDARMRQLQEDAEMPNAPESIKSLFEREQARLIDIGRPPVSRPGQDTKWAQRSSHDSSVKTVWAIIPGNLSHAGEPNNRAGLVDHADGSWSSHAYTGHRDKSGLTLPCFGELMHAFMDFIGRDANAVGEDSMFAVDGGQSVAQIFVDAKGNQCRLSQGVGFEDNHPFPIPDDAPTRPIPHAVTLGTRQRRFRLRDPLTLKRPHSDDDVEGEVHMNKRGKTYLDDDFESSDEDMFDSL

SEQ ID NO: 9526 - DNA, 915 bp, Muscodor strobelii
  misc_feature: SGI cDNA ID NO. 562981
  misc_feature: Encodes the peptide sequence at SEQ ID NO 9527
atgtcttccaagctcgagagacaaagcgcatacgaggcaacattcactcacaattttatgaagcaagtgttttcgagaatcccaccaattcctgtcgatattgatctagccggcaagacagttttagtaacaggatccaatgctggtattggactcgggagcgtccggcacttcctaacgttaaagccgagtcttctcatcatggccgtacggtcgctagaaaagggcgaaactgcggctgcagctctgcgtacagagtttcccggcgccaagatagtggtgtggcagctcgatatggcatcattcacatcggttcagcgctttgctgtacgttgcgaagaacagctgagcagaatacacattgcaatcctgaatgctggcctctggaatttgaagttcgaacgctctgaggaaggtaaccgccgcgagtctaccattcaagtcaattacttatccactgtcctgctcgctctgctattgatcccgagattgaggcccacggccacatcgccagaccctagccatttgacgatagtcaattctggtgccgctctaccgttgaaaatagcaacttctggccatgatagtattttggacacgctgacacagcccgacaactacgatgccctcggtcagtacggattgtcaaaattgcttgttcaaatgcttgtcacaaaactagcagatgtaatcagcgcgaaacatatcatcatcaattgtaccgatccgggcgcaaccaaagggaccgctttctttcggaatgtggactcgtggccgatgaagatggctctcagaatattccaaagtatcctagcgcgcgaaactaatgacgcagcgagagtatatgtatattccactgtagtcttcggcgaggaaagtcacgggtcatggactgactggttgattagagcgtaa

SEQ ID NO: 9527 - protein, 304 aa, Muscodor strobelii
  misc_feature: SGI Peptide ID NO. 562981
  misc_feature (39)..(198): Pfam Id: PF00106 Pfam Desc: short chain dehydrogenase
  misc_feature (39)..(127): Pfam Id: PF00106 Pfam Desc: short chain dehydrogenase
  misc_feature (1)..(304): NCBI GI: 169625258 Blast Desc: SNOG_15899 [Phaeosphaeria nodorum SN15] gi|111055617|gb|EAT76737.1| SNOG_15899 [Phaeosphaeria nodorum SN15]
  misc_feature (1)..(303): NCBI GI: 256720903 Blast Desc: NECHADRAFT_50515 [Nectria haematococca mpVI 77-13-4]
  misc_feature (1)..(297): NCBI GI: 46116774 Blast Desc: FG04229.1 [Gibberella zeae PH-1]
  misc_feature (19)..(303): NCBI GI: 169780140 Blast Desc: [Aspergillus oryzae RIB40] gi|83773274|dbj|BAE63401.1| protein product [Aspergillus oryzae]
  misc_feature (19)..(303): NCBI GI: 238505799 Blast Desc: short-chain dehydrogenase/reductase family protein, [Aspergillus flavus NRRL3357] gi|220690218|gb|EED46568.1| short-chain dehydrogenase/reductase family protein, [Aspergillus
  misc_feature (1)..(297): NCBI GI: 46103007 Blast Desc: FG00073.1 [Gibberella zeae PH-1]
  misc_feature (1)..(303): NCBI GI: 242773363 Blast Desc: short-chain dehydrogenase/reductase family protein, [Talaromyces stipitatus ATCC 10500] gi|218721844|gb|EED21262.1| short-chain dehydrogenase/reductase family protein, [Talaromyces
  misc_feature (1)..(297): NCBI GI: 256725584 Blast Desc: NECHADRAFT_94266 [Nectria haematococca mpVI 77-13-4]
  misc_feature (1)..(303): NCBI GI: 39974993 Blast Desc: MGG_00357 [Magnaporthe grisea 70-15] gi|145018753|gb|EDK03032.1| MGG_00357 [Magnaporthe grisea 70-15]
  misc_feature (11)..(297): NCBI GI: 256727323 Blast Desc: NECHADRAFT_34006 [Nectria haematococca mpVI 77-13-4]
MSSKLERQSAYEATFTHNFMKQVFSRIPPIPVDIDLAGKTVLVTGSNAGIGLGSVRHFLTLKPSLLIMAVRSLEKGETAAAALRTEFPGAKIVVWQLDMASFTSVQRFAVRCEEQLSRIHIAILNAGLWNLKFERSEEGNRRESTIQVNYLSTVLLALLLIPRLRPTATSPDPSHLTIVNSGAALPLKIATSGHDSILDTLTQPDNYDALGQYGLSKLLVQMLVTKLADVISAKHIIINCTDPGATKGTAFFRNVDSWPMKMALRIFQSILARETNDAARVYVYSTVVFGEESHGSWTDWLIRA

SEQ ID NO: 9528 - DNA, 411 bp, Muscodor strobelii
  misc_feature: SGI cDNA ID NO. 562982
  misc_feature: Elevated expression when VOC is produced
  misc_feature: Encodes the peptide sequence at SEQ ID NO 9529
atgcagggcatcaactcggaaggcacttttcaatccggatactccaccgatttccaaccagcacgatcagtcgttcatagcgtacaaagagctttcacaggtagtcccaaattcgatatggagaggggcgagtatatcccgctagattcccccagcttgaagtatataggatccgatgcagaagtggacaaggcttgggcagagctcacaaaaaaccgctacttccttctcacagacgctgaagcgagagaaaccctgggtgagagttataccgaatactgggatgagctacgagggggctaccttggaggccttgacatgttccatactcttcactgcttgaacggtatcgacatcacggacatgaccatatccatcaggttcactgcatcgatcatctacgacagatga

SEQ ID NO: 9529 - protein, 136 aa, Muscodor strobelii
  misc_feature: SGI Peptide ID NO. 562982
  misc_feature (4)..(117): NCBI GI: 189204938 Blast Desc: conserved [Pyrenophora tritici-repentis Pt-1C-BFP] gi|187985903|gb|EDU51391.1| conserved [Pyrenophora tritici-repentis Pt-1C-BFP]
  misc_feature (20)..(120): NCBI GI: 189211607 Blast Desc: [Pyrenophora tritici-repentis Pt-1C-BFP] gi|187979332|gb|EDU45958.1| [Pyrenophora tritici-repentis Pt-1C-BFP]
  misc_feature (7)..(115): NCBI GI: 242774243 Blast Desc: conserved [Talaromyces stipitatus ATCC 10500] gi|218722021|gb|EED21439.1| conserved [Talaromyces stipitatus ATCC 10500]
  misc_feature (8)..(115): NCBI GI: 189204942 Blast Desc: [Pyrenophora tritici-repentis Pt-1C-BFP] gi|187985905|gb|EDU51393.1| [Pyrenophora tritici-repentis Pt-1C-BFP]
  misc_feature (9)..(117): NCBI GI: 242795396 Blast Desc: conserved [Talaromyces stipitatus ATCC 10500] gi|218719167|gb|EED18587.1| conserved [Talaromyces stipitatus ATCC 10500]
  misc_feature (7)..(115): NCBI GI: 212531891 Blast Desc: conserved [Penicillium marneffei ATCC 18224] gi|210071466|gb|EEA25555.1| conserved [Penicillium marneffei ATCC 18224]
  misc_feature (3)..(117): NCBI GI: 212536326 Blast Desc: conserved [Penicillium marneffei ATCC 18224] gi|210070718|gb|EEA24808.1| conserved [Penicillium marneffei ATCC 18224]
  misc_feature (3)..(117): NCBI GI: 212536324 Blast Desc: conserved [Penicillium marneffei ATCC 18224] gi|210070717|gb|EEA24807.1| conserved [Penicillium marneffei ATCC 18224]
  misc_feature (10)..(115): NCBI GI: 121704455 Blast Desc: ACLA_078130 [Aspergillus clavatus NRRL 1] gi|119398636|gb|EAW09065.1| ACLA_078130 [Aspergillus clavatus NRRL 1]
  misc_feature (43)..(117): NCBI GI: 121700008 Blast Desc: conserved [Aspergillus clavatus NRRL 1] gi|119396411|gb|EAW06843.1| conserved [Aspergillus clavatus NRRL 1]
  misc_feature: Useful for introducing or modulating the production of volatile compounds
MQGINSEGTFQSGYSTDFQPARSVVHSVQRAFTGSPKFDMERGEYIPLDSPSLKYIGSDAEVDKAWAELTKNRYFLLTDAEARETLGESYTEYWDELRGGYLGGLDMFHTLHCLNGIDITDMTISIRFTASIIYDR

SEQ ID NO: 9530 - DNA, 1226 bp, Muscodor strobelii
  misc_feature: SGI EST ID NO. CUFF.22522.0
  misc_feature: Variant of the nucleotide sequence at SEQ ID NO 9528
ctgatttcttactggtacatcgttgtccgcatgcagcgtagagaaacgacgccagtgccacttagttatagtgcatgcatacagctgaagattgcaaatcatcaagctaatatcaatctattgcgctcccaccatggagaaatcctcgtgtcttcgtgccgcctcttgtgtgcgacgcaccttggatcttgaaccgtatgatgccgccttaaggccacttctagatcgcagagctacgaaggctttctgcgtaaaaatatgacgagctatagggaggccgagaaggagaagttcttacccagtgagatcgactacatccccggagaatcagacgccgatatacatggttcggattcaaatgtgttatcgcggacgcatcggacgttgttcaaagcaccatgcttaatagtagcagtcctttggccgttgtccgttatcttgacagcaatgataacggtctccacaacaataaagatgcagggcatcaactcggaaggcacttttcaatccggatactccaccgatttccaaccagcacgatcagtcgttcatagcgtacaaagagctttcacaggtagtcccaaattcgatatggagaggggcgagtatatcccgctagattcccccagcttgaagtatataggatccgatgcagaagtggacaaggcttgggcagagctcacaaaaaaccgctacttccttctcacagacgctgaagcgagagaaaccctgggtgagagttataccgaatactgggatgagctacgagggggctaccttggaggccttgacatgttccatactcttcactgcttggatcatatccgcatgacgctgtacgcagaacggtatcgacatcacggacatgaccatatccatcaggttcactgcatcgatcatctacgacagatgatacagtgcaattcggacatgacaatagtgccgactcggtattttgaatcagtcgggcataactatattgactctgatagagtacacacatgtagagacttctcccgcattagagaatgggcttcaagtcgttttaacggagagttggctattcgccctcgatatcggaatggaacagagagagaaaattacaaaccgcctgccgacttcgtatagccagttgcgagagatactgggctgttaagttcttatagaggtgcgactggtcgtgaaagcttacggaggtgctatagacgcttatgtgggaatagtaa

SEQ ID NO: 9531 - DNA, 1053 bp, Muscodor strobelii
  misc_feature: SGI cDNA ID NO. 562983
  misc_feature: Encodes the peptide sequence at SEQ ID NO 9532
atgtctgatgctgtttcgaatgcacctgtaaacgcaaaccttcgcgtcatatcgtatgacaaacttgtgcgaaatgacgttgaagccgatgcacagctcatcgctgcatgcgtagagcttggctttttctatctagattttagcgattacaaatctggccactttctgaaacaagtcgacgatgttttccaagcaacgcgagatacatacgatcttccccaagaggagaaggacaaatggattgtcgataaagatcacggtgaagacctgcctgtttgcggatacaagagggcaggcgtcagtaacggtcctgtcgagggaaagaaggacggcttcgaaggcatcatgttgttcgagagtgcactcgagacagccacaaacaacccaacgatccaagctccggctccccttgcagagaaacgtgagattttctccgaaagtatcaagacgttgcacgaatctggattagcaatcctttcgagcttgagtcgcagcttgcgactcccgagtggagaacggtttgagagcgctcataggatcggccaaaagtgcacaacagctttaggcctcttgaaatattgcaagtaccagccagctggcgaagaagttggtcacattgcacatacagacgccggcagcctctcatttgttttttccaatattggtggtctccaagtcttgatgccgtcaactgatgagtggtctttcatccctccaaaagccggctgcgctgttgtcaatgttggtgactcactccagtttctatctaaaggagctttgcgatccagtttgcatcgcgtggtacctcatgcggatcaagtcaaccaggaaaagcttaccgttgtctatctcatgcgaccagaaagcgaggctatttttagggacgtagacgggaatgagtggaaaagcatcgagtggtgcaacaagaaattttcagtctttagagcagagctggcgcagcagaagcttgggagatttttgactgggcgtgatggtttcacaggaatgtcgtctgccgaagcgatacaacagcatagcgctgccttagcctaa

SEQ ID NO: 9532 - protein, 350 aa, Muscodor strobelii
  misc_feature: SGI Peptide ID NO. 562983
  misc_feature (184)..(287): Pfam Id: PF03171 Pfam Desc: 2OG-Fe(II) oxygenase superfamily
  misc_feature (204)..(287): Pfam Id: PF03171 Pfam Desc: 2OG-Fe(II) oxygenase superfamily
  misc_feature (8)..(335): NCBI GI: 238839261 Blast Desc: conserved [Microsporum canis CBS 113480]
  misc_feature (12)..(339): NCBI GI: 46110839 Blast Desc: FG02301.1 [Gibberella zeae PH-1]
  misc_feature (4)..(338): NCBI GI: 169773235 Blast Desc: [Aspergillus oryzae RIB40] gi|238491194|ref|XP_002376834.1| gibberellin 3-beta hydroxylase, [Aspergillus flavus NRRL3357] gi|83768947|dbj|BAE59084.1| protein
  misc_feature (6)..(337): NCBI GI: 119501503 Blast Desc: 2OG-Fe(II) oxygenase family oxidoreductase, [Neosartorya fischeri NRRL 181] gi|119415674|gb|EAW25611.1| 2OG-Fe(II) oxygenase family oxidoreductase, [Neosartorya fischeri
  misc_feature (8)..(329): NCBI GI: 256721263 Blast Desc: NECHADRAFT_44650 [Nectria haematococca mpVI 77-13-4]
  misc_feature (10)..(329): NCBI GI: 154311343 Blast Desc: BC1G_06524 [Botryotinia fuckeliana B05.10] gi|150850921|gb|EDN26114.1| BC1G_06524 [Botryotinia fuckeliana B05.10]
  misc_feature (12)..(332): NCBI GI: 238507652 Blast Desc: gibberellin 20-oxidase family protein [Aspergillus flavus NRRL3357] gi|220688546|gb|EED44898.1| gibberellin 20-oxidase family protein [Aspergillus flavus NRRL3357]
  misc_feature (13)..(314): NCBI GI: 261358031 Blast Desc: conserved [Verticillium albo-atrum VaMs.102]
  misc_feature (12)..(338): NCBI GI: 189199006 Blast Desc: conserved [Pyrenophora tritici-repentis Pt-1C-BFP] gi|187982939|gb|EDU48427.1| conserved [Pyrenophora tritici-repentis Pt-1C-BFP]
  misc_feature (12)..(333): NCBI GI: 212547090 Blast Desc: oxidoreductase, 2OG-Fe(II) oxygenase family, [Penicillium marneffei ATCC 18224] gi|210064458|gb|EEA18554.1| oxidoreductase, 2OG-Fe(II) oxygenase family, [Penicillium ATCC
MSDAVSNAPVNANLRVISYDKLVRNDVEADAQLIAACVELGFFYLDFSDYKSGHFLKQVDDVFQATRDTYDLPQEEKDKWIVDKDHGEDLPVCGYKRAGVSNGPVEGKKDGFEGIMLFESALETATNNPTIQAPAPLAEKREIFSESIKTLHESGLAILSSLSRSLRLPSGERFESAHRIGQKCTTALGLLKYCKYQPAGEEVGHIAHTDAGSLSFVFSNIGGLQVLMPSTDEWSFIPPKAGCAVVNVGDSLQFLSKGALRSSLHRVVPHADQVNQEKLTVVYLMRPESEAIFRDVDGNEWKSIEWCNKKFSVFRAELAQQKLGRFLTGRDGFTGMSSAEAIQQHSAALA

SEQ ID NO: 9533 - DNA, 893 bp, Muscodor strobelii
  misc_feature: SGI EST ID NO. CUFF.22533.0
  misc_feature: Variant of the nucleotide sequence at SEQ ID NO 9531
tgcggatacaagagggcaggcgtcagtaacggtcctgtcgagggaaagaaggacggcttcgaaggcatcatgttgttcgagagtgcactcgagacagccacaaacaacccaacgatccaagctccggctccccttgcagagaaacgtgagattttctccgaaagtatcaagacgttgcacgaatctggattagcaatcctttcgagcttgagtcgcagcttgcgactcccgagtggagaacggtttgagagcgctcataggatcggccaaaagtgcacaacagctttaggcctcttgaaatattgcaagtaccagccagctggcgaagaagttggtcacattgcacatacagacgccggcagcctctcatttgttttttccaatattggtggtctccaagtcttgatgccgtcaactgatgagtggtctttcatccctccaaaagccggctgcgctgttgtcaatgttggtgactcactccagtttctatctaaaggagctttgcgatccagtttgcatcgcgtggtacctcatgcggatcaagtcaaccaggaaaagcttaccgttgtctatctcatgcgaccagaaagcgaggctatttttagggacgtagacgggaatgagtggaaaagcatcgagtggtgcaacaagaaattttcagtctttagagcagagctggcgcagcagaagcttgggagatttttgactgggcgtgatggtttcacaggaatgtcgtctgccgaagcgatacaacagcatagcgctgccttagcctaagagggttggattataggcataaaagatgagggcctatgccatttcatcttatactggagtgtttcttacatatagtatactgctccttcttgccttatgaaatatggagtctcgtg

SEQ ID NO: 9534 - DNA, 678 bp, Muscodor strobelii
  misc_feature: SGI cDNA ID NO. 562984
  misc_feature: Encodes the peptide sequence at SEQ ID NO 9535
atgacatcgctagagtctagcacgcgattgggagcgtcgatcccacactccgaagcaccgtattcggtctccttcctagcccccgctgagctacgaggcccagacccccctgctaccaagcaagccagcaccatcatcgagacacgcatcgagacacgcatcgagacacgcatcgagacaagcatcgttgacgccactgcccttccttgccccactgagatcatctttcataagaacaacgacatgaaggtgcttgttcacagcaccgatgaagatgctactcgcactgtcttcaagttttgtgctggacagctctccagcgcctctgacgtctggcgcaccatgatctatgcccagattggtcccggcaagaccgacaccgacggggatctcaagctgcctggaaacgccgaggtcatcgacgtgatccttcgcattatccactccagttcaacctggtcccctgggagcctgacttgcgccaacggtatcctccccttcccgggctcaccaccttcgaagataaaccctgacataatcagcaactccgccgaggtcgtcaacgacctctttcgggcggccagtgccgccacggtcggtcgggttgttggcgaccagttggtccagagtgagcggttagctacggggctcgctcttcatggtgacgctctcttctga

SEQ ID NO: 9535 - protein, 225 aa, Muscodor strobelii
  misc_feature: SGI Peptide ID NO. 562984
MTSLESSTRLGASIPHSEAPYSVSFLAPAELRGPDPPATKQASTIIETRIETRIETRIETSIVDATALPCPTEIIFHKNNDMKVLVHSTDEDATRTVFKFCAGQLSSASDVWRTMIYAQIGPGKTDTDGDLKLPGNAEVIDVILRIIHSSSTWSPGSLTCANGILPFPGSPPSKINPDIISNSAEVVNDLFRAASAATVGRVVGDQLVQSERLATGLALHGDALF

SEQ ID NO: 9536 - DNA, 1110 bp, Muscodor strobelii
  misc_feature: SGI cDNA ID NO. 562985
  misc_feature: Encodes the peptide sequence at SEQ ID NO 9537
gacgccggctccaccctcgccctgcccgacgagtccggctccgacgtcgccaacctgggcgaggacgtgccctggcacttcgccgcgagcgtcctcgactacgcccgcatcatgaagggcaccagcgactacgtcgtccagcagtacgaccgcgagatcgacgagctgcagaggcaggcgcaggaggacgagttccagttcggcgtcgaggacggcgactggacgcagagggccatacgcgccatcaggacggccagggacaaggtgaaggcgcagagcgaagacggggaatccattgtccagcctgcgacgctgaaaggcaagcaaccggccggacagaagttccacttctacacggcaccgccacacctctacctctcgcctctcgacatccgcatcctcaagaccaagtttggcgacttctcgaatttcccatcgacactgctccccagagtcgagcacatctcggccggtcacgtggtggatgatgccttgaggaaacgcgccaagtatcttgcccaccttccacaaggctgcgtcatcagctttctagaatgcgattggaccgacatcgtgcctgcggaaatactggacgcattttctcatgatctagagcgacggagaaaagcgcatcgcgacaaagcagcgcaagaagaccgcgagaggctgcaggcagagagactagaagccgcggccattggacgcagtacccgccgtcactttgacaacatcaacgaagacaagttcgaacctggtccggtgatgaactcggatgatttccagcccctatcttccgtcatgggcacaactccgccgaaccctcggccaggctttgagcagcttgccgagatgtccacgagtccatctacgtcgaggacaatctggggcacgccggctgctcaaccgacatcgcccgatctaagaccaatgcccatgcatcccgtggatgacgggtggctcaaggacgatgttcttttcggtacggccgagatcgccatgcagatggaagaattcagcatggatggcccggcgtctgcgagtaacccccagaatccgggagtaggtggtggcggtggcggtaaaaagaaaaaaagaaaaaaatcactctaa

SEQ ID NO: 9537 - protein, 369 aa, Muscodor strobelii
  misc_feature: SGI Peptide ID NO. 562985
  misc_feature (4)..(356): NCBI GI: 171677985 Blast Desc: protein product [Podospora anserina] gi|170937061|emb|CAP61720.1| protein product [Podospora anserina]
  misc_feature (1)..(342): NCBI GI: 164426576 Blast Desc: NCU11263 [Neurospora crassa OR74A] gi|157071393|gb|EDO65244.1| conserved [Neurospora crassa OR74A]
  misc_feature (1)..(336): NCBI GI: 46136745 Blast Desc: FG09888.1 [Gibberella zeae PH-1] gi|116090841|gb|ABJ56002.1| RING-15 protein [Gibberella zeae]
  misc_feature (2)..(326): NCBI GI: 39973731 Blast Desc: MGG_00988 [Magnaporthe grisea 70-15] gi|145018057|gb|EDK02336.1| MGG_00988 [Magnaporthe grisea 70-15]
  misc_feature (4)..(348): NCBI GI: 116201593 Blast Desc: CHGG_08681 [Chaetomium globosum CBS 148.51] gi|88177199|gb|EAQ84667.1| CHGG_08681 [Chaetomium globosum CBS 148.51]
  misc_feature (2)..(240): NCBI GI: 261351906 Blast Desc: RING-15 protein [Verticillium albo-atrum VaMs.102]
  misc_feature (3)..(321): NCBI GI: 145238794 Blast Desc: An07g09700 [Aspergillus niger] gi|134076541|emb|CAK39735.1| protein product [Aspergillus niger]
  misc_feature (3)..(359): NCBI GI: 255948674 Blast Desc: Pc22g11570 [Penicillium chrysogenum Wisconsin 54-1255] gi|211592121|emb|CAP98445.1| Pc22g11570 [Penicillium chrysogenum Wisconsin 54-1255]
  misc_feature (114)..(340): NCBI GI: 189202396 Blast Desc: RING finger domain containing protein [Pyrenophora tritici-repentis Pt-1C-BFP] gi|187984633|gb|EDU50121.1| RING finger domain containing protein [Pyrenophora tritici-repentis
  misc_feature (114)..(337): NCBI GI: 169594856 Blast Desc: SNOG_00157 [Phaeosphaeria nodorum SN15] gi|111070532|gb|EAT91652.1| SNOG_00157 [Phaeosphaeria nodorum SN15]
DAGSTLALPDESGSDVANLGEDVPWHFAASVLDYARIMKGTSDYVVQQYDREIDELQRQAQEDEFQFGVEDGDWTQRAIRAIRTARDKVKAQSEDGESIVQPATLKGKQPAGQKFHFYTAPPHLYLSPLDIRILKTKFGDFSNFPSTLLPRVEHISAGHVVDDALRKRAKYLAHLPQGCVISFLECDWTDIVPAEILDAFSHDLERRRKAHRDKAAQEDRERLQAERLEAAAIGRSTRRHFDNINEDKFEPGPVMNSDDFQPLSSVMGTTPPNPRPGFEQLAEMSTSPSTSRTIWGTPAAQPTSPDLRPMPMHPVDDGWLKDDVLFGTAEIAMQMEEFSMDGPASASNPQNPGVGGGGGGKKKKRKKSL

SEQ ID NO: 9538 - DNA, 2434 bp, Muscodor strobelii
  misc_feature: SGI EST ID NO. CUFF.22867.1
  misc_feature: Variant of the nucleotide sequence at SEQ ID NO 9536
cgacgccggctccaccctcgccctgcccgacgagtccggctccgacgtcgccaacctgggcgaggacgtgccctggcacttcgccgcgagcgtcctcgactacgcccgcatcatgaagggcaccagcgactacgtcgtccagcagtacgaccgcgagatcgacgagctgcagaggcaggcgcaggaggacgagttccagttcggcgtcgaggacggcgactggacgcagagggccatacgcgccatcaggacggccagggacaaggtgaaggcgcagagcgaagacggggaatccattgtccagcctgcgacgctgaaaggcaagcaaccggccggacagaagttccacttctacacggcaccgccacacctctacctctcgcctctcgacatccgcatcctcaagaccaagtttggcgacttctcgaatttcccatcgacactgctccccagagtcgagcacatctcggccggtcacgtggtggatgatgccttgaggaaacgcgccaagtatcttgcccaccttccacaaggctgcgtcatcagctttctagaatgcgattggaccgacatcgtgcctgcggaaatactggacgcattttctcatgatctagagcgacggagaaaagcgcatcgcgacaaagcagcgcaagaagaccgcgagaggctgcaggcagagagactagaagccgcggccattggacgcagtacccgccgtcactttgacaacatcaacgaagacaagttcgaacctggtccggtgatgaactcggatgatttccagcccctatcttccgtcatgggcacaactccgccgaaccctcggccaggctttgagcagcttgccgagatgtccacgagtccatctacgtcgaggacaatctggggcacgccggctgctcaaccgacatcgcccgatctaagaccaatgcccatgcatcccgtggatgacgggtggctcaaggacgatgttcttttcggtacggccgagatcgccatgcagatggaagaattcagcatggatggcccggcgtctgcgagtaacccccagaatccgggagtaggtggtggcggtggcggtaaaaagaaaaaaagaaaaaaatcactctaatgagcactggcggtcgacgtggtaactgatctagaaaatggaaaaactactagaagctttaaacgtcacacactgcatcacacatcctgatgatctgtcttgctacctgttgttttcatcggagttgggagaggttgacatggcttgcgtgagttatagcgatgtgcgtgcgttagcacccaacaaaattagaaactcgcaaacactgagatcgaataattatatatcaattaatctatactcgtcatcctggggagaccgagtcgcagtcgtgttcctccatgtctacaacatcatggcttgttattggtaatagtcattcgtgccagcttatctcagacctacttacctacatgtggttaccccgcgccagcgttattatcgagtgctatacagccaatggccgccatacgctttgagaaccggcaacgtcgttggtaggctatatctggttcaaacattcatggccgcgcaagccctaagaaacatcacggagcgcattgatcctttcaccttcaacacaagcactcagctttaagagttcatcacctggggggtgcgcatcgaggcattgatcttcacgaattaggtatactcatcgcaacggctgcccggtatcacaaaatttcaaggttaaatttctacagaccacaaaaaaatggtatcaaaactaccaccaaagctcgttatagacccaccactgctcaattctgcgaatccgtgggcgacgacactccgagatctgcggaccctatatgcgtgtcccgccacaggcgccgtgacaacgcgcacctctctaatcgatgggttccaacatgacgatgaggtgcatcggtttacattcttcgaggccgggaaatcgagtagaacggtcaacacggatgagggagtgagagtaggagagaagaacgcgagtatcaattcgttgggctacagcccgattcccctcgacgggtatctggggtttatcaaagccattgatagtgatgatgatttggcgaaagagaggcagaaaactatcattgtttcggttacggggagcccagatgaagtcgcggagtgttactcccgcatcgcgagactgaggtttggggggagcgggacgaggatggaactcgccatggagattaatttgagctgtccaaatattcctggcaagccgccgcctgcgtatacatcggaagccatgtggaactacgtcaaggttgtgagtgaaactgtacaggatgtcgatgagcaattgaggaaggaaaatggggatggggattatagaattccgtggggactgaagacaccgccctatacgcggtatgtgtggaaaga

SEQ ID NO: 9539 - DNA, 657 bp, Muscodor strobelii
  misc_feature: SGI cDNA ID NO. 562986
  misc_feature: Encodes the peptide sequence at SEQ ID NO 9540
atggtatcaaaactaccaccaaagctcgttatagacccaccactgctcaattctgcgaatccgtgggcgacgacactccgagatctgcggaccctatatgcgtgtcccgccacaggcgccgtgacaacgcgcacctctctaatcgatgggttccaacatgacgatgaggtgcatcggtttacattcttcgaggccgggaaatcgagtagaacggtcaacacggatgagggagtgagagtaggagagaagaacgcgagtatcaattcgttgggctacagcccgattcccctcgacgggtatctggggtttatcaaagccattgatagtgatgatgatttggcgaaagagaggcagaaaactatcattgtttcggttacggggagcccagatgaagtcgcggagtgttactcccgcatcgcgagactgaggtttggggggagcgggacgaggatggaactcgccatggagattaatttgagctgtccaaatattcctggcaagccgccgcctgcgtatacatcggaagccatgtggaactacgtcaaggttgtgagtgaaactgtacaggatgtcgatgagcaattgaggaaggaaaatggggatggggattatagaattccgtggggactgaagacaccgccctatacgcgtaagtga

SEQ ID NO: 9540 - protein, 218 aa, Muscodor strobelii
  misc_feature: SGI Peptide ID NO. 562986
  misc_feature (1)..(216): NCBI GI: 154294713 Blast Desc: BC1G_13483 [Botryotinia fuckeliana B05.10] gi|150844618|gb|EDN19811.1| BC1G_13483 [Botryotinia fuckeliana B05.10]
  misc_feature (6)..(218): NCBI GI: 116197759 Blast Desc: CHGG_07035 [Chaetomium globosum CBS 148.51] gi|88178314|gb|EAQ85782.1| CHGG_07035 [Chaetomium globosum CBS 148.51]
  misc_feature (9)..(216): NCBI GI: 169607785 Blast Desc: SNOG_06955 [Phaeosphaeria nodorum SN15] gi|111064486|gb|EAT85606.1| SNOG_06955 [Phaeosphaeria nodorum SN15]
  misc_feature (6)..(216): NCBI GI: 261351907 Blast Desc: dihydroorotate oxidase [Verticillium albo-atrum VaMs.102]
  misc_feature (2)..(217): NCBI GI: 171693771 Blast Desc: protein product [Podospora anserina] gi|170946834|emb|CAP73638.1| protein product [Podospora anserina]
  misc_feature (9)..(216): NCBI GI: 156048762 Blast Desc: SS1G_09113 [Sclerotinia sclerotiorum 1980] gi|154693509|gb|EDN93247.1| SS1G_09113 [Sclerotinia sclerotiorum 1980]
  misc_feature (5)..(216): NCBI GI: 256722888 Blast Desc: NECHADRAFT_87157 [Nectria haematococca mpVI 77-13-4]
  misc_feature (6)..(218): NCBI GI: 46115870 Blast Desc: FG03777.1 [Gibberella zeae PH-1]
  misc_feature (9)..(216): NCBI GI: 189188972 Blast Desc: dihydroorotate dehydrogenase [Pyrenophora tritici-repentis Pt-1C-BFP] gi|187972431|gb|EDU39930.1| dihydroorotate dehydrogenase [Pyrenophora tritici-repentis
  misc_feature (7)..(216): NCBI GI: 28950178 Blast Desc: related to dihydroorotate dehydrogenase a [Neurospora crassa]
  misc_feature (11)..(215): SWISSPROT Homolog: EC 1.3.3.1 Dihydroorotate oxidase
MVSKLPPKLVIDPPLLNSANPWATTLRDLRTLYACPATGAVTTRTSLIDGFQHDDEVHRFTFFEAGKSSRTVNTDEGVRVGEKNASINSLGYSPIPLDGYLGFIKAIDSDDDLAKERQKTIIVSVTGSPDEVAECYSRIARLRFGGSGTRMELAMEINLSCPNIPGKPPPAYTSEAMWNYVKVVSETVQDVDEQLRKENGDGDYRIPWGLKTPPYTRK

SEQ ID NO: 9541 - DNA, 2390 bp, Muscodor strobelii
  misc_feature: SGI EST ID NO. CUFF.22867.0
  misc_feature: Variant of the nucleotide sequence at SEQ ID NO 9539
cgacgccggctccaccctcgccctgcccgacgagtccggctccgacgtcgccaacctgggcgaggacgtgccctggcacttcgccgcgagcgtcctcgactacgcccgcatcatgaagggcaccagcgactacgtcgtccagcagtacgaccgcgagatcgacgagctgcagaggcaggcgcaggaggacgagttccagttcggcgtcgaggacggcgactggacgcagagggccatacgcgccatcaggacggccagggacaaggtgaaggcgcagagcgaagacggggaatccattgtccagcctgcgacgctgaaaggcaagcaaccggccggacagaagttccacttctacacggcaccgccacacctctacctctcgcctctcgacatccgcatcctcaagaccaagtttggcgacttctcgaatttcccatcgacactgctccccagagtcgagcacatctcggccggtcacgtggtggatgatgccttgaggaaacgcgccaagtatcttgcccaccttccacaaggctgcgtcatcagctttctagaatgcgattggaccgacatcgtgcctgcggaaatactggacgcattttctcatgatctagagcgacggagaaaagcgcatcgcgacaaagcagcgcaagaagaccgcgagaggctgcaggcagagagactagaagccgcggccattggacgcagtacccgccgtcactttgacaacatcaacgaagacaagttcgaacctggtccggtgatgaactcggatgatttccagcccctatcttccgtcatgggcacaactccgccgaaccctcggccaggctttgagcagcttgccgagatgtccacgagtccatctacgtcgaggacaatctggggcacgccggctgctcaaccgacatcgcccgatctaagaccaatgcccatgcatcccgtggatgacgggtggctcaaggacgatgttcttttcggtacggccgagatcgccatgcagatggaagaattcagcatggatggcccggcgtctgcgagtaacccccagaatccgggagtaggtggtggcggtggcggtaaaaagaaaaaaagaaaaaaatcactctaatgagcactggcggtcgacgtggtaactgatctagaaaatggaaaaactactagaagctttaaacgtcacacactgcatcacacatcctgatgatctgtcttgctacctgttgttttcatcggagttgggagaggttgacatggcttgcgtgagttatagcgatgtgcgtgcgttagcacccaacaaaattagaaactcgcaaacactgagatcgaataattatatatcaattaatctatactcgtcatcctggggagaccgagtcgcagtcgtgttcctccatgtctacaacatcatggcttgttattggtaatagtcattcgtgccagcttatctcagacctacttacctacatgtggttaccccgcgccagcgttattatcgagtgctatacagccaatggccgccatacgctttgagaaccggcaacgtcgttggtaggctatatctggttcaaacattcatggccgcgcaagccctaagaaacatcacggagcgcattgatcctttcaccttcaacacaagcactcagctttaagagttcatcacctggggggtgcgcatcgaggcattgatcttcacgaattagaccacaaaaaaatggtatcaaaactaccaccaaagctcgttatagacccaccactgctcaattctgcgaatccgtgggcgacgacactccgagatctgcggaccctatatgcgtgtcccgccacaggcgccgtgacaacgcgcacctctctaatcgatgggttccaacatgacgatgaggtgcatcggtttacattcttcgaggccgggaaatcgagtagaacggtcaacacggatgagggagtgagagtaggagagaagaacgcgagtatcaattcgttgggctacagcccgattcccctcgacgggtatctggggtttatcaaagccattgatagtgatgatgatttggcgaaagagaggcagaaaactatcattgtttcggttacggggagcccagatgaagtcgcggagtgttactcccgcatcgcgagactgaggtttggggggagcgggacgaggatggaactcgccatggagattaatttgagctgtccaaatattcctggcaagccgccgcctgcgtatacatcggaagccatgtggaactacgtcaaggttgtgagtgaaactgtacaggatgtcgatgagcaattgaggaaggaaaatggggatggggattatagaattccgtggggactgaagacaccgccctatacgcgtaagtgatctaacttgtcaaatatcagaa

SEQ ID NO: 9542 - DNA, 288 bp, Muscodor strobelii
  misc_feature: SGI cDNA ID NO. 562987
  misc_feature: Encodes the peptide sequence at SEQ ID NO 9543
atggcccaaggcgctcccaaaaagaccaccaagcccgccatgcagtcgcgcgccaacaagccgcagcaggccaagaagggcgcccgcgtcgccaagtccaagaaggctaccgccgccgacaagctgcagcgcaagctggccgccggcatcgtcaacaagacggagcgcctgctgggcgagcgcgccggccacctcgagctgatcggacccggcaagaaggcccgcggccagagcaaggatgacaaggacgcaaaggccaccaaaggcggcagccgcaagtttggctga

SEQ ID NO: 9543 - protein, 95 aa, Muscodor strobelii
  misc_feature: SGI Peptide ID NO. 562987
  misc_feature (1)..(75): Pfam Id: PF09495 Pfam Desc: UPF0390 protein
  misc_feature (1)..(95): NCBI GI: 39944374 Blast Desc: MGG_04198 [Magnaporthe grisea 70-15] gi|145014936|gb|EDJ99504.1| MGG_04198 [Magnaporthe grisea 70-15]
  misc_feature (30)..(95): NCBI GI: 116180104 Blast Desc: CHGG_00680 [Chaetomium globosum CBS 148.51] gi|88184977|gb|EAQ92445.1| CHGG_00680 [Chaetomium globosum CBS 148.51]
  misc_feature (16)..(95): NCBI GI: 46137359 Blast Desc: FG10195.1 [Gibberella zeae PH-1]
  misc_feature (1)..(95): NCBI GI: 171691999 Blast Desc: protein product [Podospora anserina] gi|170945948|emb|CAP72749.1| protein product [Podospora anserina]
  misc_feature (1)..(95): NCBI GI: 156055708 Blast Desc: SS1G_05206 [Sclerotinia sclerotiorum 1980] gi|154702990|gb|EDO02729.1| SS1G_05206 [Sclerotinia sclerotiorum 1980]
  misc_feature (1)..(68): NCBI GI: 225677963 Blast Desc: [Paracoccidioides brasiliensis Pb03]
  misc_feature (1)..(68): NCBI GI: 85103897 Blast Desc: NCU11275 [Neurospora crassa OR74A] gi|28923161|gb|EAA32377.1| [Neurospora crassa OR74A] gi|28950080|emb|CAD70833.1| related to ribosomal protein s25
  misc_feature (1)..(68): NCBI GI: 226287290 Blast Desc: [Paracoccidioides brasiliensis Pb18]
  misc_feature (1)..(92): NCBI GI: 239609580 Blast Desc: [Ajellomyces dermatitidis ER-3]
  misc_feature (1)..(73): NCBI GI: 261196708 Blast Desc: [Ajellomyces dermatitidis SLH14081] gi|239596002|gb|EEQ78583.1| [Ajellomyces dermatitidis SLH14081]
MAQGAPKKTTKPAMQSRANKPQQAKKGARVAKSKKATAADKLQRKLAAGIVNKTERLLGERAGHLELIGPGKKARGQSKDDKDAKATKGGSRKFG

SEQ ID NO: 9544 - DNA, 2367 bp, Muscodor strobelii
  misc_feature: SGI EST ID NO. CUFF.22870.0
  misc_feature: Variant of the nucleotide sequence at SEQ ID NO 9542
ctttggttcttgattaggtacactcgcgacttttctgctgcaattgccgctggacttggactccagcagccacctctctcaccctcgtgatcggcctttagcacagtacagtcactgccgaccaccgccgtttccgacagacacgagcacaacttgaagcagaagcaccatggcccaaggcgctcccaaaaagaccaccaagcccgccatgcagtcgcgcgccaacaagccgcagcaggccaagaagggcgcccgcgtcgccaagtccaagaaggctaccgccgccgacaagctgcagcgcaagctggccgccggcatcgtcaacaagacggagcgcctgctgggcgagcgcgccggccacctcgagctgatcggacccggcaagaaggcccgcggccagagcaaggatgacaaggacgcaaaggccaccaaaggcggcagccgcaagtttggctgagcgtcgtgcacgaccctccttcaggacgacacacaacgacagcgacggcaacacagattgtgccaggcttctcaaagctgcggccgctggctgctctgctgctctatcaagcactagtgcggtgtcggaatgacatgtagctatgtgtcgagtcgaggtacagacttctccagtacccttgaccacctgtgcggtaatccaagcggctccgatcctccatctcctgcggcagtcaacatccttcttctggaaacggcaagggattttgaaacgatacttcttttgcccatcgccgtcagttcactgccgaccaccgccttgtagcaaaacactaccttaacgatcaagatatcattcaatccgtccaaggtggtaagaatgattttgaacctcgctcgcttcggtggaccatgggaagaggaagatagggatcctcaccaagaacgctagtgtgtcatgagattaggctcggcagagctcgttggcatatcttgtggctctatcatacatcgttgttggtcagttacggtattctagtcaagtgctagagacacatttcaaatcacgtctcgacctgggcactgcgccgcagtggttgctcgagactggcaacacgctatcaacaacaacatgttgatgtagcactaggcaaggaggtcttcggttctgttctctaccgtagaagaagggcgagagtataaactgttgcaaaagcaaatgaatgccaatagctccgatgctttcgcggctggcctccatccattcatgtcgttataaagcgtaattccgttctgcagtacttggcaccgctggttcaccacaacacatatacaatggcttgggcctgcccatctgtgtacttgtgattcgagtttgagactggagcggctatcgatcagctattgagatatctacatgacctaaggcaaccgttgctacatctcataggacactttcaactcgagctcggcagctgtagcgttatcactggctctgacccgcttcatcaggataatgttagctagccccgtcgttggtaaaaagggggaaagaagaacagccacccctgctgttttccatcaaatttgagcatcaagctcttctttgtaaatcacagcagttttgtctatccagatattgcgcggaacaatctgatccggatatttccaccaagtaaagtcatcttccatagctatgacggcatcctcggtcacgtgctgcttttcaagatgtgctgagttccaagtgctgttgtataagactctgcaagttcaatgcattccattacatatcacgggcgcggcagaccattgggccgaaaaatgtctggtagcactgcgtagacttctttagaagcttgactaatagatacctcatccctttgcgcacaaatattatctcctcatcctagctctggaatagggtcactgcaacgattggttgcccatcatcaccgttcctgttctcgtttctcatggggaacctccctctcttttgtatcatcggatctaaatcctgtccgagtctttcaccctcttccaaatatcctcaaagacgccgacaccactaattcccaaggccgtcccaaccccaaccgccagagcgccaaccgccctcatcctcttgaaaccctccccatcactcacaccgccaaccccaatcaaacccacatgttctgtccccttcttcttgttcaacagctccctgattttcttcacattccccaaagccagaggatgcaatggagctcccgccatcccaccggcgatatcttgtctcccttcttcatcaaacaccacacaactccccaacgtattcgtggctgtgacaaagcttagcgggcaaaccccctcatgctccgtggcaagattccacatcacctcggcaaacatagcgaactgcccgtcttc

SEQ ID NO: 9545 - DNA, 1239 bp, Muscodor strobelii
  misc_feature: SGI cDNA ID NO. 562988
  misc_feature: Encodes the peptide sequence at SEQ ID NO 9546
atgaaatcctccatggcctggtcgctcttcggcgtctttggtgccaccgcctttgcatcggtcatgaggcaccctcaacgggctgacgatgcgtgttgtttcggcctcacgtccctaggtctcagccgcaacgctcaactcaaagaaagcagtgacggcaaattggtcctcggtggggactacccacaggccggcttttgtcttgagccctctgacaacaccctctcggacggccgaggacataattgcttcattgacaagacttcatggcaatttcgctgtcacgctggatccatcaatgccacagtttttagtcttctgcctggcactgtacaaggcgagccttttctcgcgtggagcctatacaacagattggaaggcttccatggtgaaaacttctgggcctgtcctactggcgacatggatgatccgtcctacaatatctttgctggcgacaaattcgactatgactctgccgatgctggatgtcttctgattggcctggttctcactgagcccacctcgagctgtaaatattcgcacaagaagacatcacatgccatacctcgaagatcgagcgggacaagcgagacaacatttgtcgtgtctagtatcgaggtatcgccatcgacaacttgcatgttgtcggattcttctccatcagttgcgccaatggctatcatcatttacgacgttggccaaaagggccactaccttgactcatctactcatcatgtagatatcacgcccaaaaactacagtgtcctcgaattcggactctcggaagacttccttgagccctatcagacgtataaccagtcagcaaatcagtcagctcagtcacccgatcacaagagaactcgttgtgcccttgagttccgcatgccaacttgttcgcaattgcctcgagggtatccttgttatcgtttcagtggaatcgaacaagaagttcttgccaattcgggcctgaatgtcagcctcacctctcgccaaacgaatttcttcgacaattgggacagacgccagtggaacagctcgacattgcatcaagtcttcccgggggacactaccgtcatcggcacgttcgactgcaccatggcaccagaaactaatgttccgggaggagtcgttgaattcacggtgtcaagtgtgagagacttgagtctcagcttcgaacaggctggggacaactataatttcacagatgggattggtatgtggattcgtcgatgtctgtga

SEQ ID NO: 9546 - protein, 412 aa, Muscodor strobelii
  misc_feature: SGI Peptide ID NO. 562988
  misc_feature (32)..(411): NCBI GI: 156056210 Blast Desc: SS1G_05457 [Sclerotinia sclerotiorum 1980] gi|154703241|gb|EDO02980.1| SS1G_05457 [Sclerotinia sclerotiorum 1980]
  misc_feature (26)..(411): NCBI GI: 154302631 Blast Desc: BC1G_09892 [Botryotinia fuckeliana B05.10] gi|150855381|gb|EDN30573.1| BC1G_09892 [Botryotinia fuckeliana B05.10]
  misc_feature (29)..(168): NCBI GI: 259487009 Blast Desc: TPA: GPI anchored cell wall protein, (AFU_orthologue; AFUA_4G08960) [Aspergillus nidulans FGSC A4]
  misc_feature (29)..(168): NCBI GI: 67522427 Blast Desc: AN1670.2 [Aspergillus nidulans FGSC A4] gi|40745634|gb|EAA64790.1| AN1670.2 [Aspergillus nidulans FGSC A4]
  misc_feature (30)..(169): NCBI GI: 145257471 Blast Desc: An04g03830 [Aspergillus niger] gi|134058663|emb|CAK38647.1| protein product [Aspergillus niger]
  misc_feature (1)..(106): NCBI GI: 242801095 Blast Desc: conserved [Talaromyces stipitatus ATCC 10500] gi|218717039|gb|EED16460.1| conserved [Talaromyces stipitatus ATCC 10500]
  misc_feature (29)..(106): NCBI GI: 119500740 Blast Desc: NFIA_107210 [Neosartorya fischeri NRRL 181] gi|119415292|gb|EAW25230.1| NFIA_107210 [Neosartorya fischeri NRRL 181]
  misc_feature (30)..(149): NCBI GI: 212526028 Blast Desc: conserved [Penicillium marneffei ATCC 18224] gi|210072569|gb|EEA26656.1| conserved [Penicillium marneffei ATCC 18224]
  misc_feature (1)..(168): NCBI GI: 154322539 Blast Desc: BC1G_00612 [Botryotinia fuckeliana B05.10] gi|150847946|gb|EDN23139.1| BC1G_00612 [Botryotinia fuckeliana B05.10]
MKSSMAWSLFGVFGATAFASVMRHPQRADDACCFGLTSLGLSRNAQLKESSDGKLVLGGDYPQAGFCLEPSDNTLSDGRGHNCFIDKTSWQFRCHAGSINATVFSLLPGTVQGEPFLAWSLYNRLEGFHGENFWACPTGDMDDPSYNIFAGDKFDYDSADAGCLLIGLVLTEPTSSCKYSHKKTSHAIPRRSSGTSETTFVVSSIEVSPSTTCMLSDSSPSVAPMAIIIYDVGQKGHYLDSSTHHVDITPKNYSVLEFGLSEDFLEPYQTYNQSANQSAQSPDHKRTRCALEFRMPTCSQLPRGYPCYRFSGIEQEVLANSGLNVSLTSRQTNFFDNWDRRQWNSSTLHQVFPGDTTVIGTFDCTMAPETNVPGGVVEFTVSSVRDLSLSFEQAGDNYNFTDGIGMWIRRCL

SEQ ID NO: 9547 - DNA, 1493 bp, Muscodor strobelii
  misc_feature: SGI EST ID NO. CUFF.22565.0
  misc_feature: Variant of the nucleotide sequence at SEQ ID NO 9545
cgggctgacgatgcgtgttgtttcggcctcacgtccctaggtctcagccgcaacgctcaactcaaagaaagcagtgacggcaaattggtcctcggtggggactacccacaggccggcttttgtcttgagccctctgacaacaccctctcggacggccgaggacataattgcttcattgacaagacttcatggcaatttcgctgtcacgctggatccatcaatgccacagtttttagtcttctgcctggcactgtacaaggcgagccttttctcgcgtggagcctatacaacagattggaaggcttccatggtgaaaacttctgggcctgtcctactggcgacatggatgatccgtcctacaatatctttgctggcgacaaattcgactatgactctgccgatgctggatgtcttctgattggcctggttctcactgagcccacctcgagctgtaaatattcgcacaagaagacatcacatgccatacctcgaagatcgagcgggacaagcgagacaacatttgtcgtgtctagtatcgaggtatcgccatcgacaacttgcatgttgtcggattcttctccatcagttgcgccaatggctatcatcatttacgacgttggccaaaagggccactaccttgactcatctactcatcatgtagatatcacgcccaaaaactacagtgtcctcgaattcggactctcggaagacttccttgagccctatcagacgtataaccagtcagcaaatcagtcagctcagtcacccgatcacaagagaactcgttgtgcccttgagttccgcatgccaacttgttcgcaattgcctcgagggtatccttgttatcgtttcagtggaatcgaacaagaagttcttgccaattcgggcctgaatgtcagcctcacctctcgccaaacgaatttcttcgacaattgggacagacgccagtggaacagctcgacattgcatcaagtcttcccgggggacactaccgtcatcggcacgttcgactgcaccatggcaccagaaactaatgttccgggaggagtcgttgaattcacggtgtcaagtgtgagagacttgagtctcagcttcgaacaggctggggacaactataatttcacagatgggattggtatgtggattcgtcgatgtctgtgagttgaactgagatgcgttacatccaaagatggattcggtgtctgaacgaacttccacgccgatggaccctatgaggcataatgatcgctttcaagtatcctttcctgtatcattgtatcgcagactgattgcatgcattatctaatactaatgctaataccgaagggagatcgacgctacgcgttggtacatagtcgagtcgagtaatggcacgctgaattcaattattattcccacaatgtattagctatgatcctcgctgaccttgtgatgagttcgttcgaagggccactgcgagagttcgcaaccgaggtaggtggtattgatgaatg

SEQ ID NO: 9548 - DNA, 450 bp, Muscodor strobelii
  misc_feature: SGI cDNA ID NO. 562989
  misc_feature: Encodes the peptide sequence at SEQ ID NO 9549
atgttcaacgacaccgcggcttccaatggcttcggtgtattcacaggaccccgtggcgcgccggagaacgtaggcgaagtgctcgaggcgaaccacccggtcattcgcacgaatcccgtgactggatggaagagcgtctttgccgttggctaccatgtaaagcgaatcttggggcttgctgatgccgagtccgagcatttcctcaagtggttcgtcaatctaattatggagaatcacgatctgcaggttcgacatcattgggataacgtcaatgacttggccatctgggataaccgctctgcttaccatgccgcgacccctgactacgttgagggaggctttggtgaccgtacgggatcacgtgctgtgagtttgggtgaaagaccttactttgatcctcaaagtactagtagaaaggagggactgtctcaggagggagccttactgtaa

SEQ ID NO: 9549 - protein, 149 aa, Muscodor strobelii
  misc_feature: SGI Peptide ID NO. 562989
  misc_feature (2)..(131): Pfam Id: PF02668 Pfam Desc: Taurine catabolism dioxygenase TauD, TfdA family
  misc_feature (1)..(144): NCBI GI: 171682728 Blast Desc: protein product [Podospora anserina] gi|170941323|emb|CAP66973.1| protein product [Podospora anserina]
  misc_feature (2)..(145): NCBI GI: 261359053 Blast Desc: alpha-ketoglutarate-dependent sulfonate dioxygenase [Verticillium albo-atrum VaMs.102]
  misc_feature (1)..(148): NCBI GI: 85074576 Blast Desc: NCU09800 [Neurospora crassa OR74A] gi|28921578|gb|EAA30874.1| NCU09800 [Neurospora crassa OR74A]
  misc_feature (2)..(148): NCBI GI: 169784512 Blast Desc: [Aspergillus oryzae RIB40] gi|83775464|dbj|BAE65584.1| protein product [Aspergillus oryzae]
  misc_feature (1)..(142): NCBI GI: 116202901 Blast Desc: CHGG_09335 [Chaetomium globosum CBS 148.51] gi|88177853|gb|EAQ85321.1| CHGG_09335 [Chaetomium globosum CBS 148.51]
  misc_feature (2)..(146): NCBI GI: 238508338 Blast Desc: alpha-ketoglutarate-dependent sulfonate dioxygenase, [Aspergillus flavus NRRL3357] gi|220688884|gb|EED45236.1| alpha-ketoglutarate-dependent sulfonate dioxygenase, [Aspergillus
  misc_feature (2)..(144): NCBI GI: 154304901 Blast Desc: BC1G_09036 [Botryotinia fuckeliana B05.10] gi|150853898|gb|EDN29090.1| BC1G_09036 [Botryotinia fuckeliana B05.10]
  misc_feature (2)..(144): NCBI GI: 121700426 Blast Desc: TfdA family taurine dioxygenase, [Aspergillus clavatus NRRL 1] gi|119396620|gb|EAW07052.1| TfdA family taurine dioxygenase, [Aspergillus clavatus NRRL 1]
  misc_feature (2)..(142): NCBI GI: 255953905 Blast Desc: Pc21g06600 [Penicillium chrysogenum Wisconsin 54-1255] gi|211589416|emb|CAP95557.1| Pc21g06600 [Penicillium chrysogenum Wisconsin 54-1255]
  misc_feature (2)..(142): NCBI GI: 212534164 Blast Desc: alpha-ketoglutarate-dependent sulfonate dioxygenase, [Penicillium marneffei ATCC 18224] gi|210069637|gb|EEA23727.1| alpha-ketoglutarate-dependent sulfonate dioxygenase, [Penicillium
  misc_feature (32)..(131): SWISSPROT Homolog: EC 1.14.11.17 Taurine dioxygenase
MFNDTAASNGFGVFTGPRGAPENVGEVLEANHPVIRTNPVTGWKSVFAVGYHVKRILGLADAESEHFLKWFVNLIMENHDLQVRHHWDNVNDLAIWDNRSAYHAATPDYVEGGFGDRTGSRAVSLGERPYFDPQSTSRKEGLSQEGALL

SEQ ID NO: 9550 - DNA, 1218 bp, Muscodor strobelii
  misc_feature: SGI cDNA ID NO. 562990
  misc_feature: Encodes the peptide sequence at SEQ ID NO 9551
atggcgccctccgcaactgagatcgtgacaccagctgtcgaggcgctgaagcagaagattgtatctcacgccgcacatgatggaaaagactcagaaccggccccagaagttctagctccagcagtgaagcctccgtccctagagccacttcctgagctcgagaccagtcatcgcgagccattgaaacttagcggtgttcttgaacagttcaagtatttcgacaagaccccggtcattggtcgtgaatttgtagatgttgacctcgctgagtggcttcgtgcaccaaactcggatgagctactaagagatctagcaattactatctctcgtcgaggcgtcgtcttcttccgcaagcaagacaacatcacgaatgacctccagaaagagctcgttcagcgtctcggacagcttgcaggaaagccggagtcatccggtcttcacattcaccccgtaattaatgccggacgtgagcatggcggcaatgacgacgagattagcgtcatctcctccaagggagcacgcaaactgtacaaaaatcatctacaacagactcgcggtggctacaaccgcgtacagacgcagcgtctgcagtggcattcggacattacatttgagcctatcccaagtgactactccttactcaggcttacagagttgcccgtaactggtggagacactctttgggcatccggctatgaagtctacgacagaatctcgcccaccctgcaaaaattcctcgacggtctaaccgcgtattatgctcagcccatgttcaacgacaccgcggcttccaatggcttcggtgtattcacaggaccccgtggcgcgccggagaacgtaggcgaagtgctcgaggcgaaccacccggtcattcgcacgaatcccgtgactggatggaagagcgtctttgccgttggctaccatgtaaagcgaatcttggggcttgctgatgccgagtccgagcatttcctcaagtggttcgtcaatctaattatggagaatcacgatctgcaggttcgacatcattgggataacgtcaatgacttggccatctgggataaccgctctgcttaccatgccgcgacccctgactacgttgagggaggctttggtgaccgtacgggatcacgtgctgtgagtttgggtgaaagaccttactttgatcctcaaagtactagtagaaaggagggactgtctcaggagggagccttactgtaa

SEQ ID NO: 9551 - protein, 405 aa, Muscodor strobelii
  misc_feature: SGI Peptide ID NO. 562990
  misc_feature (71)..(387): Pfam Id: PF02668 Pfam Desc: Taurine catabolism dioxygenase TauD, TfdA family
  misc_feature (1)..(400): NCBI GI: 171682728 Blast Desc: protein product [Podospora anserina] gi|170941323|emb|CAP66973.1| protein product [Podospora anserina]
  misc_feature (1)..(398): NCBI GI: 116202901 Blast Desc: CHGG_09335 [Chaetomium globosum CBS 148.51] gi|88177853|gb|EAQ85321.1| CHGG_09335 [Chaetomium globosum CBS 148.51]
  misc_feature (1)..(404): NCBI GI: 85074576 Blast Desc: NCU09800 [Neurospora crassa OR74A] gi|28921578|gb|EAA30874.1| NCU09800 [Neurospora crassa OR74A]
  misc_feature (55)..(404): NCBI GI: 169784512 Blast Desc: [Aspergillus oryzae RIB40] gi|83775464|dbj|BAE65584.1| protein product [Aspergillus oryzae]
  misc_feature (55)..(402): NCBI GI: 238508338 Blast Desc: alpha-ketoglutarate-dependent sulfonate dioxygenase, [Aspergillus flavus NRRL3357] gi|220688884|gb|EED45236.1| alpha-ketoglutarate-dependent sulfonate dioxygenase, [Aspergillus
  misc_feature (55)..(400): NCBI GI: 121700426 Blast Desc: TfdA family taurine dioxygenase, [Aspergillus clavatus NRRL 1] gi|119396620|gb|EAW07052.1| TfdA family taurine dioxygenase, [Aspergillus clavatus NRRL 1]
  misc_feature (1)..(401): NCBI GI: 261359053 Blast Desc: alpha-ketoglutarate-dependent sulfonate dioxygenase [Verticillium albo-atrum VaMs.102]
  misc_feature (39)..(398): NCBI GI: 255953905 Blast Desc: Pc21g06600 [Penicillium chrysogenum Wisconsin 54-1255] gi|211589416|emb|CAP95557.1| Pc21g06600 [Penicillium chrysogenum Wisconsin 54-1255]
  misc_feature (34)..(402): NCBI GI: 115436892 Blast Desc: ATEG_09049 [Aspergillus terreus NIH2624] gi|114188486|gb|EAU30186.1| ATEG_09049 [Aspergillus terreus NIH2624]
  misc_feature (40)..(385): NCBI GI: 169601974 Blast Desc: SNOG_03864 [Phaeosphaeria nodorum SN15] gi|160706047|gb|EAT89069.2| SNOG_03864 [Phaeosphaeria nodorum SN15]
  misc_feature (77)..(387): SWISSPROT Homolog: EC 1.14.11.17 Taurine dioxygenase
MAPSATEIVTPAVEALKQKIVSHAAHDGKDSEPAPEVLAPAVKPPSLEPLPELETSHREPLKLSGVLEQFKYFDKTPVIGREFVDVDLAEWLRAPNSDELLRDLAITISRRGVVFFRKQDNITNDLQKELVQRLGQLAGKPESSGLHIHPVINAGREHGGNDDEISVISSKGARKLYKNHLQQTRGGYNRVQTQRLQWHSDITFEPIPSDYSLLRLTELPVTGGDTLWASGYEVYDRISPTLQKFLDGLTAYYAQPMFNDTAASNGFGVFTGPRGAPENVGEVLEANHPVIRTNPVTGWKSVFAVGYHVKRILGLADAESEHFLKWFVNLIMENHDLQVRHHWDNVNDLAIWDNRSAYHAATPDYVEGGFGDRTGSRAVSLGERPYFDPQSTSRKEGLSQEGALL

SEQ ID NO: 9552 - DNA, 821 bp, Muscodor strobelii
  misc_feature: SGI EST ID NO. CUFF.22574.0
  misc_feature: Variant of the nucleotide sequence at SEQ ID NO 9550
atagagtttgcctatataaaagcttggaagcacctagtatctcaaatgaaaagcccttttgcttgcctctgctactactgttataacacaaaccatcacaatttttgaccttggcataatatttcatcaatcaagacgcatcacaagacaatggcgccctccgcaactgagatcgtgacaccagctgtcgaggcgctgaagcagaagattgtatctcacgccgcacatgatggaaaagactcagaaccggccccagaagttctagctccagcagtgaagcctccgtccctagagccacttcctgagctcgagaccagtcatcgcgagccattgaaacttagcggtgttcttgaacagttcaagtatttcgacaagaccccggtcattggtcgtgaatttgtagatgttgacctcgctgagtggcttcgtgcaccaaactcggatgagctactaagagatctagcaattactatctctcgtcgaggcgtcgtcttcttccgcaagcaagacaacatcacgaatgacctccagaaagagctcgttcagcgtctcggacagcttgcaggaaagccggagtcatccggtcttcacattcaccccgtaattaatgccggacgtgagcatggcggcaatgacgacgagattagcgtcatctcctccaagggagcacgcaaactgtacaaaaatcatctacaacagactcgcggtggctacaaccgcgtacagacgcagcgtctgcagtggcattcggacattacatttgagcctatcccaagtgactactccttactcaggcttacagagttgcccgtaactggtgg

SEQ ID NO: 9553 - DNA, 1368 bp, Muscodor strobelii
  misc_feature: SGI cDNA ID NO. 562991
  misc_feature: Encodes the peptide sequence at SEQ ID NO 9554
atggcctactcaataatcgccttggccttgacggctgtcatggctgtccatgcctcccctacgcgtacagaacaggaattaccaagacgagccaatgctctcccctctgtcaccgcttcaggaaatgctttctggactggtaaaacccgattctatgttcgcggcatcgattaccaacctggcggctcctccgccaacgaggaccctctcgccgataccgacatctgcacccgggatattgaacgcttcaaagacctaggcgttaacaccatcagagtctactcagtggacaactccaaggatcataccgactgcatgcagcagctcaatgatgctgggatctacctcgtcctcgatgtcaacaacccgcaatactccatcaaccgagacaaccctgccccgtcctacaatgatgtctatctacaaagcgtttttgccaccattgacgagtttgctcaatattcaaataccctcgcattcttcagtggcaatgaagttatcaacgataagccaggtacggtccaggctgcgccttacgtcaaggccacaactcgcgatatgcgacagtatatcggcagtagaggctatcgcaagattcctgtcggctattccgcggccgacgtcagcgataaccgcatgcaaacagcggcatacttcaactgcgggactgacgatgagcgcagcgatttctttgcctttaatgactattcgtggtgctatccatcatcttttactcagtctggatgggatcagaaagtgaagaactttaccggatatggacttcctatctttctgtccgaatggggctgcaccacgaacggccgcaacttcgaggagctgggggccctgatgagcacagatgagatgacgagtgtgtattctggaggattgatgtacgagtatagtcgcgaagagggaaataagtttggtattgttgagctctccgggacttccgaatcggtcacggatgaggatgattttgataagtttaagtcagcactgtccgcgtatcccacgccttcgggcaatggaggattcacctcgactacggcgtctgtggtctgcccaacgattgatgacatttgggctatcaaagactggggtgagagtgctctgccggcaatccccgaaggtgcagttcagtatatgtcgaaaggtgctgggaagggtcctgggctcgacggaaaggggtctcagaacgctggcggcgcctcaacgggcacctctaccccaggatcaggcgaggtcactgcgactgcatctgatgatagtggctctggacgtccagctccgccactagatatgagtgtctttgcattgacgggcgttgtctgcttcttcactcttatcggcacactgctgctataa

SEQ ID NO: 9554 - protein, 455 aa, Muscodor strobelii
  misc_feature: SGI Peptide ID NO. 562991
  misc_feature (21)..(338): Pfam Id: PF03198 Pfam Desc: Glycolipid anchored surface protein (GAS1)
  misc_feature (31)..(338): Pfam Id: PF03198 Pfam Desc: Glycolipid anchored surface protein (GAS1)
  misc_feature (7)..(455): NCBI GI: 85103502 Blast Desc: NCU01162 [Neurospora crassa OR74A] gi|18376255|emb|CAD21369.1| GEL1 protein [Neurospora crassa] gi|28923075|gb|EAA32292.1| NCU01162 [Neurospora crassa OR74A]
  misc_feature (35)..(455): NCBI GI: 116180142 Blast Desc: CHGG_00699 [Chaetomium globosum CBS 148.51] gi|88184996|gb|EAQ92464.1| CHGG_00699 [Chaetomium globosum CBS 148.51]
  misc_feature (20)..(455): NCBI GI: 154300159 Blast Desc: BC1G_10455 [Botryotinia fuckeliana B05.10] gi|150856744|gb|EDN31936.1| BC1G_10455 [Botryotinia fuckeliana B05.10]
  misc_feature (7)..(455): NCBI GI: 46136929 Blast Desc: FG09980.1 [Gibberella zeae PH-1]
  misc_feature (1)..(442): NCBI GI: 256732196 Blast Desc: glycoside hydrolase family 72 [Nectria haematococca mpVI 77-13-4]
  misc_feature (7)..(411): NCBI GI: 145256130 Blast Desc: An10g00400 [Aspergillus niger CBS 513.88] gi|134078602|emb|CAK49130.1| protein product [Aspergillus niger]
  misc_feature (12)..(455): NCBI GI: 156044498 Blast Desc: SS1G_10353 [Sclerotinia sclerotiorum 1980] gi|154694741|gb|EDN94479.1| SS1G_10353 [Sclerotinia sclerotiorum 1980]
  misc_feature (30)..(454): NCBI GI: 258573183 Blast Desc: glycolipid-anchored surface protein 5 [Uncinocarpus reesii 1704] gi|237901039|gb|EEP75440.1| glycolipid-anchored surface protein 5 [Uncinocarpus reesii 1704]
  misc_feature (1)..(455): NCBI GI: 85106174 Blast Desc: NCU07253 [Neurospora crassa OR74A] gi|28923703|gb|EAA32871.1| NCU07253 [Neurospora crassa OR74A]
  misc_feature (16)..(455): NCBI GI: 116195520 Blast Desc: CHGG_04358 [Chaetomium globosum CBS 148.51] gi|88180271|gb|EAQ87739.1| CHGG_04358 [Chaetomium globosum CBS 148.51]
MAYSIIALALTAVMAVHASPTRTEQELPRRANALPSVTASGNAFWTGKTRFYVRGIDYQPGGSSANEDPLADTDICTRDIERFKDLGVNTIRVYSVDNSKDHTDCMQQLNDAGIYLVLDVNNPQYSINRDNPAPSYNDVYLQSVFATIDEFAQYSNTLAFFSGNEVINDKPGTVQAAPYVKATTRDMRQYIGSRGYRKIPVGYSAADVSDNRMQTAAYFNCGTDDERSDFFAFNDYSWCYPSSFTQSGWDQKVKNFTGYGLPIFLSEWGCTTNGRNFEELGALMSTDEMTSVYSGGLMYEYSREEGNKFGIVELSGTSESVTDEDDFDKFKSALSAYPTPSGNGGFTSTTASVVCPTIDDIWAIKDWGESALPAIPEGAVQYMSKGAGKGPGLDGKGSQNAGGASTGTSTPGSGEVTATASDDSGSGRPAPPLDMSVFALTGVVCFFTLIGTLLL

SEQ ID NO: 9555 - DNA, 2211 bp, Muscodor strobelii
  misc_feature: SGI EST ID NO. CUFF.23432.1
  misc_feature: Variant of the nucleotide sequence at SEQ ID NO 9553
ggaaaggccgggtgcaacttgatcatgactctagcgtctcgagacaacatgttgtgtttcttctttctcctcctcctcctcttgccattgacttttcttccatgctgcaagctcataattcgtaacattcgttgctatctccccgaagagtttcatttcgttagagcaattccttcgcttcaattactcacttcttgtgcgtgcccatcgttgtaactcaatcgcttcttgtttccagtcgcattttaatcccgtcttgtgccttgcacttcgccagtgactgcgaatgcctgccacgccgttgtaatatttcttgaatatttaatttcaaatctcttaggtagcaacagtgtcccgttactatggcctactcaataatcgccttggccttgacggctgtcatggctgtccatgcctcccctacgcgtacagaacaggaattaccaagacgagccaatgctctcccctctgtcaccgcttcaggaaatgctttctggactggtaaaacccgattctatgttcgcggcatcgattaccaacctggcggctcctccgccaacgaggaccctctcgccgataccgacatctgcacccgggatattgaacgcttcaaagacctaggcgttaacaccatcagagtctactcagtggacaactccaaggatcataccgactgcatgcagcagctcaatgatgctgggatctacctcgtcctcgatgtcaacaacccgcaatactccatcaaccgagacaaccctgccccgtcctacaatgatgtctatctacaaagcgtttttgccaccattgacgagtttgctcaatattcaaataccctcgcattcttcagtggcaatgaagttatcaacgataagccaggtacggtccaggctgcgccttacgtcaaggccacaactcgcgatatgcgacagtatatcggcagtagaggctatcgcaagattcctgtcggctattccgcggccgacgtcagcgataaccgcatgcaaacagcggcatacttcaactgcgggactgacgatgagcgcagcgatttctttgcctttaatgactattcgtggtgctatccatcatcttttactcagtctggatgggatcagaaagtgaagaactttaccggatatggacttcctatctttctgtccgaatggggctgcaccacgaacggccgcaacttcgaggagctgggggccctgatgagcacagatgagatgacgagtgtgtattctggaggattgatgtacgagtatagtcgcgaagagggaaataagtttggtattgttgagctctccgggacttccgaatcggtcacggatgaggatgattttgataagtttaagtcagcactgtccgcgtatcccacgccttcgggcaatggaggattcacctcgactacggcgtctgtggtctgcccaacgattgatgacatttgggctatcaaagactggggtgagagtgctctgccggcaatccccgaaggtgcagttcagtatatgtcgaaaggtgctgggaagggtcctgggctcgacggaaaggggtctcagaacgctggcggcgcctcaacgggcacctctaccccaggatcaggcgaggtcactgcgactgcatctgatgatagtggctctggacgtccagctccgccactagatatgagtgtctttgcattgacgggcgttgtctgcttcttcactcttatcggcacactgctgctataatctcgacaatcagcaaccaaatctgcggcggatttcacttggcaagaatcacactcagagtgccgcacgaacgtttttgaatactgcgaaagatgaagagaccataaatctctcgtttcgaatagccgttccttttcagtgtcgaccttacatagacttgaagaatctcatttggtttgagcatcaggaggatatgtatagacggcgttcgacccatccgctttcgaacgaaggcgaacccaacttctacgatgactctgtgtcaccatgatgaaatggcagatatatgcagtcgattgatgaactagagcggggttttcattccttcatctacatacctgtcaaggcgacatctgactaataatcaatagatacatatattataataaattatacgtagtactgagcgttatacttgaataaacacataaagcacaccatgtgtttcattcttcataaattacaaatcaaaacactctcg

SEQ ID NO: 9556 - DNA, 801 bp, Muscodor strobelii
  misc_feature: SGI cDNA ID NO. 562992
  misc_feature: Encodes the peptide sequence at SEQ ID NO 9557
atggcaaaactgcctcggattcgaagagacgccttcatggcacaattaggcgaaggcgtccacggcaagatcgagacgaactgcttccagatgttcgtacatggcgccggtgataggggcaccagtcacttgggctgttaccccgaaattgcgaggatgaatcatgattgccgacctaataacatgacgctcacagccatcgccgctcgagatattgagcctgatgaagagctctctgtcagctacgtcgacgtcttcctccagtctaaagagagaaaagagagaatccgtagatggggatttgaatgcgtgtgttcgttgtgcacaagttcgaagaacgagaccgagacctccgacgctcggctccgccgtattgcccagctacaagcagatctgaataatttcgagcaattgaaagtaacagcagacaccggtgcggaatgtgcgtaccttttattgctatttaagaacaccgggaagggcctaaaaactctagaacataacaattccattccaaaccatcacgaacaagaaaagaggctaacatgttttgatacgctagacgtagcgctcgtggaggaggaaggtctacacgcacatcttggatcagtctatactcgcgctgcattgaactttgcgctgttcggtgacgacgtcagagcacagaagtatgcgcaaaaggctgtagcggccttgagtttggaactggggcctgagtctggtgatgttagagcaatgagaggcttagctgagaatccgagaacgcattggacttgggggaagaggaggaagggattgtaa

SEQ ID NO: 9557 - protein, 266 aa, Muscodor strobelii
  misc_feature: SGI Peptide ID NO. 562992
  misc_feature (1)..(260): NCBI GI: 171695572 Blast Desc: protein product [Podospora anserina] gi|170948028|emb|CAP60192.1| protein product [Podospora anserina]
  misc_feature (18)..(263): NCBI GI: 145601723 Blast Desc: MGG_08614 [Magnaporthe grisea 70-15] gi|145010235|gb|EDJ94891.1| MGG_08614 [Magnaporthe grisea 70-15]
  misc_feature (1)..(263): NCBI GI: 116198689 Blast Desc: CHGG_07500 [Chaetomium globosum CBS 148.51] gi|88178779|gb|EAQ86247.1| CHGG_07500 [Chaetomium globosum CBS 148.51]
  misc_feature (3)..(246): NCBI GI: 116181330 Blast Desc: CHGG_01293 [Chaetomium globosum CBS 148.51] gi|88185590|gb|EAQ93058.1| CHGG_01293 [Chaetomium globosum CBS 148.51]
  misc_feature (3)..(264): NCBI GI: 171686072 Blast Desc: protein product [Podospora anserina] gi|170942997|emb|CAP68650.1| protein product [Podospora anserina]
  misc_feature (4)..(262): NCBI GI: 169619746 Blast Desc: SNOG_13071 [Phaeosphaeria nodorum SN15] gi|160703895|gb|EAT79398.2| SNOG_13071 [Phaeosphaeria nodorum SN15]
  misc_feature (1)..(262): NCBI GI: 189201641 Blast Desc: conserved [Pyrenophora tritici-repentis Pt-1C-BFP] gi|187984256|gb|EDU49744.1| conserved [Pyrenophora tritici-repentis Pt-1C-BFP]
  misc_feature (37)..(259): NCBI GI: 116208610 Blast Desc: CHGG_03598 [Chaetomium globosum CBS 148.51] gi|88184195|gb|EAQ91663.1| CHGG_03598 [Chaetomium globosum CBS 148.51]
  misc_feature (10)..(262): NCBI GI: 39945380 Blast Desc: MGG_04672 [Magnaporthe grisea 70-15] gi|145021407|gb|EDK05536.1| MGG_04672 [Magnaporthe grisea 70-15]
  misc_feature (17)..(265): NCBI GI: 145611492 Blast Desc: MGG_00339 [Magnaporthe grisea 70-15] gi|145018770|gb|EDK03049.1| MGG_00339 [Magnaporthe grisea 70-15]
  misc_feature (51)..(256): SWISSPROT Homolog: EC 2.1.1.43 Histone-lysine N-methyltransferase
MAKLPRIRRDAFMAQLGEGVHGKIETNCFQMFVHGAGDRGTSHLGCYPEIARMNHDCRPNNMTLTAIAARDIEPDEELSVSYVDVFLQSKERKERIRRWGFECVCSLCTSSKNETETSDARLRRIAQLQADLNNFEQLKVTADTGAECAYLLLLFKNTGKGLKTLEHNNSIPNHHEQEKRLTCFDTLDVALVEEEGLHAHLGSVYTRAALNFALFGDDVRAQKYAQKAVAALSLELGPESGDVRAMRGLAENPRTHWTWGKRRKGL

SEQ ID NO: 9558 - DNA, 1060 bp, Muscodor strobelii
  misc_feature: SGI EST ID NO. CUFF.22627.3
  misc_feature: Variant of the nucleotide sequence at SEQ ID NO 9556
cggcaccggaagtagatctactggtagttatgaagcttgacatttacttgcaattttctatcaacactctactctttctctcagctcccatagccgcgaaagcaccacaaacacaaccagacatttgcccttggagccagactcaacgtctcctatatccggcctgtgcgagtcctcagctcctccaaaaactcatcgcacccgagctgcttctcacgcccgacgacccatcaaaatcaggctggacagggcccgagagctgtgtaaatgggacatgcgtgttctcgcacaactcccagaatggtggattatcacttataacgagcccgatgcacgcgaacatcattcaagggtataccgttattccgaatgccggcgcgaaacccacgccgttccgcgaagcgaatatcctcggcaaggggatcgggctgagggcgaataggacgattcggaaaggtgaggtgttgttgaccagaggcccgacgctcgttgcgcaggttgatggattggttgctttggaagagggggacacgggatttgtgtaagtggtctagatcacggctggctcgtgtcgatgcttattgcggtatgagtaccggtcagtatacgacatatcgatggcaaaactgcctcggattcgaagagacgccttcatggcacaattaggcgaaggcgtccacggcaagatcgagacgaactgcttccagatgttcgtacatggcgccggtgataggggcaccagtcacttgggctgttaccccgaaattgcgaggatgaatcatgattgccgacctaatattcactatcgtctcagtaacatgacgctcacagccatcgccgctcgagatattgagcctgatgaagagctctctgtcagctacgtcgacgtcttcctccagtctaaagagagaaaagagagaatccgtagatggggatttgaatgcgtgtgttcgttgtgcacaagttcgaagaacgagaccgagaccgtgaggaattggtccccctttcccagtgtacattcagaacaaataagtaatggaaacgtgcaacacagtccgac

SEQ ID NO: 9559 - DNA, 1293 bp, Muscodor strobelii
  misc_feature: SGI cDNA ID NO. 562993
  misc_feature: Reduced expression when VOC is produced
  misc_feature: Encodes the peptide sequence at SEQ ID NO 9560
atggtcaccgacgagcccgcccgcgtcttcctgcgcaacgtcctcaacaagtccaaggcccagctgggcgacctgcgccgcgacgtcgaccggaggcgccgcgacgtcgacggcctcaagcgcgtcaagcagcgcgtccgcgacggcaccgagaagaaggacgaggttgtcgtcgtcacccagctcttccagatgcaggaggacctgcaccaggtcgaccgcaagcggctgacggccgaggtcgagacgtccaccatcacgaccgccgtgggcgacgtcacgctgggggccaagaaccacaacttcaagtcgcagacgttcaagatccccaccaactgcgatctgtgcggtgagcgcatctggggcctgtccgccaagggcttcgactgccgcgactgcgggtacacgtgtcacagcaagtgcgagatgaaggtgcccgccgagtgcccgggcgagctgtccaaggacgaccgcaagaaacaaaaggcagatcgccaggccgcggcgggatccctactcaaacctaccggcacgcctgaccatgtggccgagctgccggatctcagtcgatccaacaccctgaactctctcagctctggctacgccgccagtgcccacaggtctgtcagcggcgccaccaccatccctcggtcttccgtcgaggacctcacgcctgagccgcctggcccccggcccccggcgaggaaatctcgcgtaatggcaccgccccccacggcgtacgtgagtgaactccctgggagcagtcccaacgggtcgagcgctggaagatcgcacgagcaaaagggcaagatgttatatgcattcgaggccaacggagatggcgaagtgagcgtctcggaaggacaagaagtcactattgtagacgctgacgacggatctgggtggatcaaaattcgcgctgggtataaagaaggaatagtgcccgcttcctatctcgaagtaatggctgctccgatagtcccacaagacacaggttcgacaaccaaccgacctggctctacctattccaactccggctcttccatcggcacagcggcaccagcggtgaagaaaaagggccccgcagtggctccgcgccgtggtgcaaagaagctgaaatacgtagtggcattgtatgattacacggcgcagagcgatacggaacacagcatgacggaaggcgagcgctttgtcctgatcaaagaagaccccggcgatggctgggccgaagtagagaagggtggctcgacgcgaagcgtgccagctagctatgtagagatagccacggagtag

SEQ ID NO: 9560 - protein, 430 aa, Muscodor strobelii
  misc_feature: SGI Peptide ID NO. 562993
  misc_feature (100)..(152): Pfam Id: PF00130 Pfam Desc: Phorbol esters/diacylglycerol binding domain (C1 domain)
  misc_feature (373)..(428): Pfam Id: PF00018 Pfam Desc: SH3 domain
  misc_feature (267)..(322): Pfam Id: PF00018 Pfam Desc: SH3 domain
  misc_feature (268)..(322): Pfam Id: PF07653 Pfam Desc: Variant SH3 domain
  misc_feature (1)..(427): NCBI GI: 39972033 Blast Desc: MGG_07332 [Magnaporthe grisea 70-15] gi|145019843|gb|EDK04071.1| MGG_07332 [Magnaporthe grisea 70-15]
  misc_feature (1)..(426): NCBI GI: 171691963 Blast Desc: protein product [Podospora anserina] gi|170945930|emb|CAP72731.1| protein product [Podospora anserina]
  misc_feature (1)..(426): NCBI GI: 18376256 Blast Desc: conserved [Neurospora crassa]
  misc_feature (1)..(426): NCBI GI: 164426147 Blast Desc: NCU01161 [Neurospora crassa OR74A] gi|157071215|gb|EAA32291.2| NCU01161 [Neurospora crassa OR74A]
  misc_feature (1)..(427): NCBI GI: 156044378 Blast Desc: SS1G_10292 [Sclerotinia sclerotiorum 1980] gi|154694681|gb|EDN94419.1| SS1G_10292 [Sclerotinia sclerotiorum 1980]
  misc_feature (1)..(427): NCBI GI: 116180140 Blast Desc: CHGG_00698 [Chaetomium globosum CBS 148.51] gi|88184995|gb|EAQ92463.1| CHGG_00698 [Chaetomium globosum CBS 148.51]
  misc_feature (1)..(427): NCBI GI: 154301829 Blast Desc: BC1G_10066 [Botryotinia fuckeliana B05.10] gi|150855728|gb|EDN30920.1| BC1G_10066 [Botryotinia fuckeliana B05.10]
  misc_feature (1)..(426): NCBI GI: 46137691 Blast Desc: FG10361.1 [Gibberella zeae PH-1]
  misc_feature (1)..(426): NCBI GI: 256732260 Blast Desc: NECHADRAFT_41749 [Nectria haematococca mpVI 77-13-4]
  misc_feature (1)..(427): NCBI GI: 261351999 Blast Desc: BZZ1 [Verticillium albo-atrum VaMs.102]
  misc_feature: Useful for introducing or modulating the production of volatile compounds
MVTDEPARVFLRNVLNKSKAQLGDLRRDVDRRRRDVDGLKRVKQRVRDGTEKKDEVVVVTQLFQMQEDLHQVDRKRLTAEVETSTITTAVGDVTLGAKNHNFKSQTFKIPTNCDLCGERIWGLSAKGFDCRDCGYTCHSKCEMKVPAECPGELSKDDRKKQKADRQAAAGSLLKPTGTPDHVAELPDLSRSNTLNSLSSGYAASAHRSVSGATTIPRSSVEDLTPEPPGPRPPARKSRVMAPPPTAYVSELPGSSPNGSSAGRSHEQKGKMLYAFEANGDGEVSVSEGQEVTIVDADDGSGWIKIRAGYKEGIVPASYLEVMAAPIVPQDTGSTTNRPGSTYSNSGSSIGTAAPAVKKKGPAVAPRRGAKKLKYVVALYDYTAQSDTEHSMTEGERFVLIKEDPGDGWAEVEKGGSTRSVPASYVEIATE

SEQ ID NO: 9561 - DNA, 1665 bp, Muscodor strobelii
  misc_feature: SGI EST ID NO. CUFF.22634.0
  misc_feature: Variant of the nucleotide sequence at SEQ ID NO 9559
cccccgacaaggccttcgagcccagccccgtctggcacgacgacgacgccatggtcaccgacgagcccgcccgcgtcttcctgcgcaacgtcctcaacaagtccaaggcccagctgggcgacctgcgccgcgacgtcgaccggaggcgccgcgacgtcgacggcctcaagcgcgtcaagcagcgcgtccgcgacggcaccgagaagaaggacgaggttgtcgtcgtcacccagctcttccagatgcaggaggacctgcaccaggtcgaccgcaagcggctgacggccgaggtcgagacgtccaccatcacgaccgccgtgggcgacgtcacgctgggggccaagaaccacaacttcaagtcgcagacgttcaagatccccaccaactgcgatctgtgcggtgagcgcatctggggcctgtccgccaagggcttcgactgccgcgactgcgggtacacgtgtcacagcaagtgcgagatgaaggtgcccgccgagtgcccgggcgagctgtccaaggacgaccgcaagaaacaaaaggcagatcgccaggccgcggcgggatccctactcaaacctaccggcacgcctgaccatgtggccgagctgccggatctcagtcgatccaacaccctgaactctctcagctctggctacgccgccagtgcccacaggtctgtcagcggcgccaccaccatccctcggtcttccgtcgaggacctcacgcctgagccgcctggcccccggcccccggcgaggaaatctcgcgtaatggcaccgccccccacggcgtacgtgagtgaactccctgggagcagtcccaacgggtcgagcgctggaagatcgcacgagcaaaagggcaagatgttatatgcattcgaggccaacggagatggcgaagtgagcgtctcggaaggacaagaagtcactattgtagacgctgacgacggatctgggtggatcaaaattcgcgctgggtataaagaaggaatagtgcccgcttcctatctcgaagtaatggctgctccgatagtcccacaagacacaggttcgacaaccaaccgacctggctctacctattccaactccggctcttccatcggcacagcggcaccagcggtgaagaaaaagggccccgcagtggctccgcgccgtggtgcaaagaagctgaaatacgtagtggcattgtatgattacacggcgcagagcgatacggaacacagcatgacggaaggcgagcgctttgtcctgatcaaagaagaccccggcgatggctgggccgaagtagagaagggtggctcgacgcgaagcgtgccagctagctatgtagagatagccacggagtagtgtgcatcggaccatcgacaagacggtatgagatcttcttggtgttatatatcaatagcttcttatttgcattgggaaccgggacagcgcattgcataggcatcgggttgctaaaatcatgatcacgatgtaggccaagtagaacaagagaattcagatcagtctgtctaccgccttttttttcagtctcgttgttcgtgcccaggtcgcactgtccctcgaatccccaggcttaggattgtgtcaccgttcagcaatggagtcataaatctagtcacctatcattacacaacgtagcgcgtgctgatgccgacaatgactg

SEQ ID NO: 9562 - DNA, 426 bp, Muscodor strobelii
  misc_feature: SGI cDNA ID NO. 562994
  misc_feature: Encodes the peptide sequence at SEQ ID NO 9563
atggacaagagctcgggtgtctttctctggttggctgtagttgtgcattcgctacttcatggtcttcgtgatgacgacagcctcaaagagcttcagatgcgtctagaagagctcccctcggatcttgccgatctttacgcgcacatgcttaataagattcctgaccgttacagagctcaggcatctgacttcttccagacctttctcaagagtcagtccgttgagcaggacacaaacggtcgtccccttctggcggtgcagctgtctttcgttgaagaaagctgggatgacgttcagtctacaccgaccaaggctctgaataaaaaggatgagcggctacgtgtgagcatgagtgagatggaagccgtgccgaccgacctggcaagcgccagtaatccgaagtacgatgccgactcggtcacatga

SEQ ID NO: 9563 - protein, 141 aa, Muscodor strobelii
  misc_feature: SGI Peptide ID NO. 562994
  misc_feature (1)..(115): NCBI GI: 164425886 Blast Desc: NCU08565 [Neurospora crassa OR74A] gi|157071107|gb|EAA33591.2| [Neurospora crassa OR74A]
  misc_feature (1)..(115): NCBI GI: 39979126 Blast Desc: [Neurospora crassa]
  misc_feature (1)..(68): NCBI GI: 256726514 Blast Desc: NECHADRAFT_79534 [Nectria haematococca mpVI 77-13-4]
  misc_feature (1)..(115): NCBI GI: 226293863 Blast Desc: conserved [Paracoccidioides brasiliensis Pb18]
  misc_feature (1)..(115): NCBI GI: 225684243 Blast Desc: conserved [Paracoccidioides brasiliensis Pb03]
  misc_feature (1)..(118): NCBI GI: 256721455 Blast Desc: NECHADRAFT_55084 [Nectria haematococca mpVI 77-13-4]
  misc_feature (1)..(72): NCBI GI: 46133835 Blast Desc: FG09057.1 [Gibberella zeae PH-1]
  misc_feature (1)..(106): NCBI GI: 156048628 Blast Desc: SS1G_09046 [Sclerotinia sclerotiorum 1980] gi|154693442|gb|EDN93180.1| SS1G_09046 [Sclerotinia sclerotiorum 1980]
  misc_feature (3)..(107): NCBI GI: 154298269 Blast Desc: BC1G_11979 [Botryotinia fuckeliana B05.10] gi|150858165|gb|EDN33357.1| BC1G_11979 [Botryotinia fuckeliana B05.10]
  misc_feature (1)..(71): NCBI GI: 145252046 Blast Desc: An16g02230 [Aspergillus niger] gi|134083079|emb|CAL00447.1| protein product [Aspergillus niger]
MDKSSGVFLWLAVVVHSLLHGLRDDDSLKELQMRLEELPSDLADLYAHMLNKIPDRYRAQASDFFQTFLKSQSVEQDTNGRPLLAVQLSFVEESWDDVQSTPTKALNKKDERLRVSMSEMEAVPTDLASASNPKYDADSVT

SEQ ID NO: 9564 - DNA, 1776 bp, Muscodor strobelii
  misc_feature: SGI cDNA ID NO. 562995
  misc_feature: Elevated expression when VOC is produced
  misc_feature: Encodes the peptide sequence at SEQ ID NO 9565
atgatccgctcatcctttctctcgtccctcactatagcgagcggcttcgtgatcggtcttgtagccggggaggattcgctctacagcagtcgcatttcaaagcgtttcatcgatgatgaaggccactacaacatctccttctaccacgtcaatgacatccatgcgcatctggatgaattctcgtcgtctggcacagactgtacttcacccgagaaaggctgctacggtggctactcccgcatcaagcatgtcattgatgagacacgaccgaagcacaatgacagcttgctattaagtgttggcgatgaattccaaggtactcttttctacacttattataagggagaaaagattgcagatgtaatgaatgagctcgagttcgacgcgatgacattgggcaatcatgaattcgatggcggagacgactccctcggagactttctcaagaatctgactttccctgtcttgtcggccaatattcaatccggaaatgacaagctaaattcaacaattaagccttaccatatctttgatgagtatcaacttgctgtcattggagtgacgacggagaccacgaaaggcatcagcagtcctggtcctacgaccaacttcagtgatgccattcaagccgtgcaggatgcagttgatgagattcgaagcaccacgaatatcacccgtatcgcagccatcactcacattggctacgatgtcgacaaggaattagctcagaacacaaccggcctctacctcattctgggcgggcactcacacacccttctcggtggcatggagggtgctgagggcccttacccaaccattgagaagaacagagatggcgatgaggtcttcatcgtcaccgcgtaccgttggggcgagtacctgggttacatcgacgttacttacgacgatgagggtaaggtcttggcttaccacggtgccccaattcacttgacgaataccactacgcaagataaggacttgcaggaagagattgacgaatggagggtacccttcgaggcgtatgcaaaggaggaagttggtaacaccaacgtcgacctcgatcaatcaacctgccaagacaaggaatgcaccctcggtgacgtgatctgcgatgctctcttagagtaccgcaccaacaatacagagagcgaggccgtgtttgcgctcatgaacgccggcgggatacgcgcaacaatctccgagggtcttatcactcgaggccaagtgatcacgtcatttcccttcggcaacgctgctgtagagcttacttacaccggcagggagctaaagaagatcttcgaaggccttgtcagtggcgtgaaccagttcaccggcgatgagttgagcagtttctttcagatcagcactggtacgaaggttgagtacaaccctgatgctgatattggatcccgtcttgtcaaactgactgttggtgacgatgaggtgaatgatgagacgaggtatacgattgtaactattgactttgtcgctaatggtggcgacaacatcctcccgcctctaactggtgagctcgttgtgctagacactcttgatgagatcttggtagagtatctaggagcccatgatcctatcgacatcaagctggatgggcgtatttcaacagttagtggatctgatagcaatagctcagagcctagtcctactcccaccgagggcccaaatagcccgaccacaacacccaattcggctcacagaattggatcgggtgtcgcagctcttgctttggctgccatcgtttccattgtggtttcttag

SEQ ID NO: 9565 - protein, 591 aa, Muscodor strobelii
  misc_feature: SGI Peptide ID NO. 562995
  misc_feature (345)..(508): Pfam Id: PF02872 Pfam Desc: 5'-nucleotidase, C-terminal domain
  misc_feature (45)..(259): Pfam Id: PF00149 Pfam Desc: Calcineurin-like phosphoesterase
  misc_feature (3)..(590): NCBI GI: 189201039 Blast Desc: 5'-nucleotidase precursor [Pyrenophora tritici-repentis Pt-1C-BFP] gi|187983955|gb|EDU49443.1| 5'-nucleotidase precursor [Pyrenophora tritici-repentis
  misc_feature (20)..(543): NCBI GI: 85091076 Blast Desc: NCU09659 [Neurospora crassa OR74A] gi|28920107|gb|EAA29489.1| conserved [Neurospora crassa OR74A]
  misc_feature (2)..(590): NCBI GI: 169618219 Blast Desc: SNOG_12299 [Phaeosphaeria nodorum SN15] gi|111058992|gb|EAT80112.1| SNOG_12299 [Phaeosphaeria nodorum SN15]
  misc_feature (4)..(543): NCBI GI: 145612976 Blast Desc: MGG_12474 [Magnaporthe grisea 70-15] gi|145020058|gb|EDK04286.1| MGG_12474 [Magnaporthe grisea 70-15]
  misc_feature (6)..(543): NCBI GI: 171683712 Blast Desc: protein product [Podospora anserina] gi|170941816|emb|CAP67469.1| protein product [Podospora anserina]
  misc_feature (8)..(539): NCBI GI: 46110375 Blast Desc: FG02069.1 [Gibberella zeae PH-1]
  misc_feature (24)..(543): NCBI GI: 256728593 Blast Desc: [Nectria haematococca mpVI 77-13-4]
  misc_feature (2)..(567): NCBI GI: 261360948 Blast Desc: 5'-nucleotidase [Verticillium albo-atrum VaMs.102]
  misc_feature (19)..(582): NCBI GI: 67539538 Blast Desc: AN5939.2 [Aspergillus nidulans FGSC A4] gi|40738612|gb|EAA57802.1| AN5939.2 [Aspergillus nidulans FGSC A4] gi|259479889|tpe|CBF70526.1| TPA: conserved [Aspergillus FGSC
  misc_feature (13)..(371): NCBI GI: 116191103 Blast Desc: CHGG_05269 [Chaetomium globosum CBS 148.51] gi|88181182|gb|EAQ88650.1| CHGG_05269 [Chaetomium globosum CBS 148.51]
  misc_feature (41)..(539): SWISSPROT Homolog: EC 3.1.3.5 5'-nucleotidase
  misc_feature: Useful for introducing or modulating the production of volatile compounds
MIRSSFLSSLTIASGFVIGLVAGEDSLYSSRISKRFIDDEGHYNISFYHVNDIHAHLDEFSSSGTDCTSPEKGCYGGYSRIKHVIDETRPKHNDSLLLSVGDEFQGTLFYTYYKGEKIADVMNELEFDAMTLGNHEFDGGDDSLGDFLKNLTFPVLSANIQSGNDKLNSTIKPYHIFDEYQLAVIGVTTETTKGISSPGPTTNFSDAIQAVQDAVDEIRSTTNITRIAAITHIGYDVDKELAQNTTGLYLILGGHSHTLLGGMEGAEGPYPTIEKNRDGDEVFIVTAYRWGEYLGYIDVTYDDEGKVLAYHGAPIHLTNTTTQDKDLQEEIDEWRVPFEAYAKEEVGNTNVDLDQSTCQDKECTLGDVICDALLEYRTNNTESEAVFALMNAGGIRATISEGLITRGQVITSFPFGNAAVELTYTGRELKKIFEGLVSGVNQFTGDELSSFFQISTGTKVEYNPDADIGSRLVKLTVGDDEVNDETRYTIVTIDFVANGGDNILPPLTGELVVLDTLDEILVEYLGAHDPIDIKLDGRISTVSGSDSNSSEPSPTPTEGPNSPTTTPNSAHRIGSGVAALALAAIVSIVVS

SEQ ID NO: 9566 - DNA, 3509 bp, Muscodor strobelii
  misc_feature: SGI EST ID NO. CUFF.22605.0
  misc_feature: Variant of the nucleotide sequence at SEQ ID NO 9564
ccgccctaagcccgcctgtcactgactgagagtgcccagagacaacaggctgaccactacatgcagcaagtgaactgaacatgcgtggacgcattctgataaggattcggcagaaacttttgaatgtgacttcatttgcagatggagtgtcacgagcaacccgacctcataattgattggaattcagacatgatattaatctatttcgaaggcagcattaacacgatcgggctctgaggctagcgccgacggtcgcgtcccgaacagtcgggtcgcgatctgtccatgtggaaaaaagaggatccgacaatcttgaacagcacgttgatctgaaatatggaccagcatcatggcatgttctcactgagattaagcttgcctgatgttcctcgcaggcacgaattacgcaactcaactgtttgctcgtcgctcgaggggaggatatcatgtgtatagtggcagcgagaattaggtacccaaacttcaagtaagagatagcgtgattaggcacgtgccaggttacacttcataagaaatggcaatgagacgaaacacaagaataaatgggaacagtagtgagacaatcagagacattcctcatcgtcgtatctcgagtcaaactgtagtagtactgaggctctgtatgaagcccaccatggttgataaacgtggtatcgaaactaattcttctcactcatgttatgttacacccatactgctggcgtcagcgcggtgagggtttggaatctaatgatttcatccagagttatgcaagtgacgctttcaaagagagatcaagagatgaatatggtcaaagctttcaacgtggtatgagattggatttgctcggtcagcataatcggctagagtgttgcgataaccatccttcgcctgtccgccaaggacttccaagaacttcaaccccgttatcccactgcaaaccggccactccggcattttggtccgcgactgtaagattaaaagagaggcaaatctccaacccatgtgagataacgacaagatctagtggcgccaagatgattttctgttgctcgatcgtcgccgttgcacacgtgcatcggtatatcgggactatatcaaggatgttaggaccctgagctgcgcattcgtgcgccctaaactcgaggatagctgtgtgttggttcggcgaccgagaagccaagcagccaccatcgcaaagcgtaaacgagtcacagccctttcaattcaattgagcaaccagcatcacctactgtcacgatgatccgctcatcctttctctcgtccctcactatagcgagcggcttcgtgatcggtcttgtagccggggaggattcgctctacagcagtcgcatttcaaagcgtttcatcgatgatgaaggccactacaacatctccttctaccacgtcaatgacatccatgcgcatctggatgaattctcgtcgtctggcacagactgtacttcacccgagaaaggctgctacggtggctactcccgcatcaagcatgtcattgatgagacacgaccgaagcacaatgacagcttgctattaagtgttggcgatgaattccaaggtactcttttctacacttattataagggagaaaagattgcagatgtaatgaatgagctcgagttcgacgcgatgacattgggcaatcatgaattcgatggcggagacgactccctcggagactttctcaagaatctgactttccctgtcttgtcggccaatattcaatccggaaatgacaagctaaattcaacaattaagccttaccatatctttgatgagtatcaacttgctgtcattggagtgacgacggagaccacgaaaggcatcagcagtcctggtcctacgaccaacttcagtgatgccattcaagccgtgcaggatgcagttgatgagattcgaagcaccacgaatatcacccgtatcgcagccatcactcacattggctacgatgtcgacaaggaattagctcagaacacaaccggcctctacctcattctgggcgggcactcacacacccttctcggtggcatggagggtgctgagggcccttacccaaccattgagaagaacagagatggcgatgaggtcttcatcgtcaccgcgtaccgttggggcgagtacctgggttacatcgacgttacttacgacgatgagggtaaggtcttggcttaccacggtgccccaattcacttgacgaataccactacgcaagataaggacttgcaggaagagattgacgaatggagggtacccttcgaggcgtatgcaaaggaggaagttggtaacaccaacgtcgacctcgatcaatcaacctgccaagacaaggaatgcaccctcggtgacgtgatctgcgatgctctcttagagtaccgcaccaacaatacagagagcgaggccgtgtttgcgctcatgaacgccggcgggatacgcgcaacaatctccgagggtcttatcactcgaggccaagtgatcacgtcatttcccttcggcaacgctgctgtagagcttacttacaccggcagggagctaaagaagatcttcgaaggccttgtcagtggcgtgaaccagttcaccggcgatgagttgagcagtttctttcagatcagcactggtacgaaggttgagtacaaccctgatgctgatattggatcccgtcttgtcaaactgactgttggtgacgatgaggtgaatgatgagacgaggtatacgattgtaactattgactttgtcgctaatggtggcgacaacatcctcccgcctctaactggtgagctcgttgtgctagacactcttgatgagatcttggtagagtatctaggagcccatgatcctatcgacatcaagctggatgggcgtatttcaacagttagtggatctgatagcaatagctcagagcctagtcctactcccaccgagggcccaaatagcccgaccacaacacccaattcggctcacagaattggatcgggtgtcgcagctcttgctttggctgccatcgtttccattgtggtttcttagctcagtcaaccagttgcctctcctacccaagctataataggcaatgcaatcggcagcttgaactctctgaatgagcatctgcaataatatcaacgaattctcgacgaaatgcaagagcacgatgatcttgcggttctgatggggagagatccgcctcaatgaaacatgatccgtgctgatggttggttccataacccatactgccggatattggccaattcaatatgtgatattttaacaaacaacaatttcttaatactactacgtacttatatataggaccgaacttagaactctagtacacgcgaacaccaattgaatccttgtggacagatctggaacactccaattatacgagtgatgcatgcagtgcagggcatatgcacagtcatagtagatgcggcacggctaagctgcacgaatgacatgctgccgctatcgtatagccccggccgaactgcattgcttccgct

SEQ ID NO: 9567 - DNA, 2565 bp, Muscodor strobelii
  misc_feature: SGI cDNA ID NO. 562996
  misc_feature: Encodes the peptide sequence at SEQ ID NO 9568
atggattggaaccaagtatcgcattatataaatgctcttggacatccttcaaagcctaatcatgatgctatagaatatgctcacgcgacctctgacgagatcaagcaatggatgacaaggtttttccaagagcaaggttggcctcctccaaagtttccaacaccacacgaagttcgaagagaagcagaaggtcgatgcagcaacatcttttcctactaccatgagctgcgaagcattgttgagcgtcatgagcagaggatgcgaaaccggtgggagaagaagggtaggacagctcgtgttaccgtcttactacaggcctggcccgatatggcccgcaagcatcggccagatatggccgcttacgagagattcaaagagaactccgagcagttgatgacgacagaagatcgctcatcttttctgtggcctatgataaacttggaagacttaaccgccccgaagactctaccattactgctcaactctcgcggtcgaaaccctccgcacacctttgcagcatcagacggtgcgcagatgcacctgggtatcactgcgtcagctacactgccaatcttcctggcgaaccacgtcatgatgctaaacggcataactggagaggaggagtacggccagcttctctcacggaatgatcgcgacgacgtatttgagttgctaagcacaggcagacaggttcttcccggccatgggctcctcatacttgaagtccaagaacgcttgctcatgtttctcacttcgtgctgcaaggccattcttcatgatatcccatcggacgacttgacgggcggtcgctccgctgttcaacctgagccgccgttgattaaagccgtcgactcgacaggctcctatagttggagcatcatgggtatggaggcccaatatcgacctcctgctgagctgaacttcaaaattatcgagtcgctcctttctgctcagcttgtaagggctgaagaccatctctggtctttgcgtgaggatccgagttacttcgccgaaattttgattgagatgaaagaccatcgcccggaattgttgaaggacattgtaggcaatattcatcctatcttgaagtccaaaaatcaagacatgctttgggctcgagtgactggtcacgtgctcggcgagtcattctttcatcttgagcacttcgcggaaattcgcagtcaagcagctcatctgcacgaactttccatcaagtttgggcccgagctgtccccgcaaaatgatctaccagaagagtatcttgtcgctttgctcaagtttcggtattatctcttcagaatggctaagcgtttgttctatgctataaagaatttaacggtttcatcgccaccctggagggctttttatattcgagaggttcttgtacaaggaaaaccgaatcgtgttatccgatcaagtgcgaaaatgaacgttatcgagcgtcgcctcctctcgttgatcgaatttcctggggaagacgaatatgttttccggatgacaacattcgttgatgagcttgataggttattgggagcggagcccagagcaaagaaacttgtttctccgtacatcgccggcctcattggtgagctttcaatcataggagaatgccttcgtcaacttgaaatgtttcagccatgggcgagtggctttggccacgccttaatcaatagggaagatggtatcggaaagcagttcgatgaaagaatgaaagttctgttccttatgggggatataagcaaaggcgagaactggctccctcttgcgccattggccgatccatccaacggtagatttcgatatcctctcgacaaacgcagaaacatggccaacaccgagattctccggagatccgaagcgaatctggacgagttttggcgggaagcagacaaaatgcttcaccagaacatcgcgaatatcgacgattctgcctggggaaaacccctcctacaatctcgccccctgcagcgcacgtcagaatgggtcgagcccgttgataagaaaaagctaggatcagatcaggaaagagaacaaaaccgcgatcctcataaatacatttcgcctttttcgactatggtcccagaagccaagtcttcatactctgcccgggcgggggatttggcgagtggctcgaaaaaggcgaagatcaagactcgtggagttgggacacaatcaagaagtactggcgagaaccatgatattccgatgcgcccggaaagcccaatccgtaaccaggctactatacaagtagacgcacgggcactcaaagtctttcgcattgttttcttcaatccgattgccaacactactgctggtgagatacactggcgtgactttcgatacgctatggtcgaggcgggcttcgcagctcagaatcagtatggatccgtgtggcacttccagcccacgaatcctgatgctaagcgcagcatccaatttcatgagccacacccagagggcaaaatttccttcttcaaggctcggcgttttggaagaaggctaaatcgagcgtatgactggacttgcgatacttttgttctcgaggacaaacatccgaatccgtag

SEQ ID NO: 9568 - protein, 854 aa, Muscodor strobelii
  misc_feature: SGI Peptide ID NO. 562996
  misc_feature (50)..(850): NCBI GI: 256720869 Blast Desc: NECHADRAFT_50192 [Nectria haematococca mpVI 77-13-4]
  misc_feature (50)..(848): NCBI GI: 85104094 Blast Desc: NCU01053 [Neurospora crassa OR74A] gi|18376176|emb|CAD21293.1| [Neurospora crassa] gi|28923213|gb|EAA32429.1| [Neurospora crassa OR74A]
  misc_feature (46)..(846): NCBI GI: 171677159 Blast Desc: protein product [Podospora anserina] gi|170936647|emb|CAP61306.1| protein product [Podospora anserina]
  misc_feature (49)..(851): NCBI GI: 239614778 Blast Desc: conserved [Ajellomyces dermatitidis ER-3]
  misc_feature (38)..(845): NCBI GI: 189208474 Blast Desc: conserved [Pyrenophora tritici-repentis Pt-1C-BFP] gi|187976663|gb|EDU43289.1| conserved [Pyrenophora tritici-repentis Pt-1C-BFP]
  misc_feature (49)..(851): NCBI GI: 261190512 Blast Desc: conserved [Ajellomyces dermatitidis SLH14081] gi|239591088|gb|EEQ73669.1| conserved [Ajellomyces dermatitidis SLH14081]
  misc_feature (78)..(847): NCBI GI: 119497731 Blast Desc: NFIA_032920 [Neosartorya fischeri NRRL 181] gi|119413787|gb|EAW23726.1| conserved [Neosartorya fischeri NRRL 181]
  misc_feature (49)..(848): NCBI GI: 154292612 Blast Desc: BC1G_14632 [Botryotinia fuckeliana B05.10] gi|150845846|gb|EDN21039.1| BC1G_14632 [Botryotinia fuckeliana B05.10]
  misc_feature (57)..(845): NCBI GI: 261357965 Blast Desc: conserved [Verticillium albo-atrum VaMs.102]
  misc_feature (54)..(774): NCBI GI: 238490652 Blast Desc: conserved [Aspergillus flavus NRRL3357] gi|220696976|gb|EED53317.1| conserved [Aspergillus flavus NRRL3357]
MDWNQVSHYINALGHPSKPNHDAIEYAHATSDEIKQWMTRFFQEQGWPPPKFPTPHEVRREAEGRCSNIFSYYHELRSIVERHEQRMRNRWEKKGRTARVTVLLQAWPDMARKHRPDMAAYERFKENSEQLMTTEDRSSFLWPMINLEDLTAPKTLPLLLNSRGRNPPHTFAASDGAQMHLGITASATLPIFLANHVMMLNGITGEEEYGQLLSRNDRDDVFELLSTGRQVLPGHGLLILEVQERLLMFLTSCCKAILHDIPSDDLTGGRSAVQPEPPLIKAVDSTGSYSWSIMGMEAQYRPPAELNFKIIESLLSAQLVRAEDHLWSLREDPSYFAEILIEMKDHRPELLKDIVGNIHPILKSKNQDMLWARVTGHVLGESFFHLEHFAEIRSQAAHLHELSIKFGPELSPQNDLPEEYLVALLKFRYYLFRMAKRLFYAIKNLTVSSPPWRAFYIREVLVQGKPNRVIRSSAKMNVIERRLLSLIEFPGEDEYVFRMTTFVDELDRLLGAEPRAKKLVSPYIAGLIGELSIIGECLRQLEMFQPWASGFGHALINREDGIGKQFDERMKVLFLMGDISKGENWLPLAPLADPSNGRFRYPLDKRRNMANTEILRRSEANLDEFWREADKMLHQNIANIDDSAWGKPLLQSRPLQRTSEWVEPVDKKKLGSDQEREQNRDPHKYISPFSTMVPEAKSSYSARAGDLASGSKKAKIKTRGVGTQSRSTGENHDIPMRPESPIRNQATIQVDARALKVFRIVFFNPIANTTAGEIHWRDFRYAMVEAGFAAQNQYGSVWHFQPTNPDAKRSIQFHEPHPEGKISFFKARRFGRRLNRAYDWTCDTFVLEDKHPNP

SEQ ID NO: 9569 - DNA, 181 bp, Muscodor strobelii
  misc_feature: SGI EST ID NO. CUFF.22636.0
  misc_feature: Variant of the nucleotide sequence at SEQ ID NO 9567
caagcatcggccagatatggccgcttacgagagattcaaagagaactccgagcagttgatgacgacagaagatcgctcatcttttctgtggcctatgataaacttggaagacttaaccgccccgaagactctaccattactgctcaactctcgcggtcgaaaccctccgcacacctttgca

SEQ ID NO: 9570 - DNA, 960 bp, Muscodor strobelii
  misc_feature: SGI cDNA ID NO. 562997
  misc_feature: Encodes the peptide sequence at SEQ ID NO 9571
atgcatctaatcaacgctcataccctgcgcttgcagaagtttgtcaaggaagagaatgagaagcccatatacaagtatgcaatactgtctcaccgatggctggatcgagaagatgaggtgagcttccaggacatagaatctgcagacaccaatgttgcaacccagcgaaagggatactccaagatatctcagacctgcagcctcgcaaaatctcagaatttggattacatctggatcgatacttgttgcatcaacaagaccgacagttcggagcttcaagaagccgtcaatagcatgtatcgttggtataacaatgccactgtatgctatgtgcacctgagagatacggtttttactgctgatgacagtcatttgtattctgtaatgtaccatgacccatggtttcggagagggtggactttgcaagaacttcttgctccgaaaactctccatttctatgatgcatattggaaattgatcggagacaagaagtcattatctttcgatttggaacgaattactggtatcagtaagcctcttcttgaaggtatcacgcagttgcacgactattccattgctcagcgcatgtcatgggcatgtggtcgttttacgacaaggcctgaagattccgcttatagcctctttggagtattcggaattaatatgcctatgctctatggcgagggccgcgagcgtgcgttcattcgacttcaggaagagatcatcaaattatcggatgaccaatcgatatttgcgtgggaaggtggtgagttcattgactggagacaatttacaatgtccccttcgtcttcggcatacgaggctgagacgttactgatcatgtctcaggaaacgcagagtccggaatgcttgctacaaaccttaacttcttctcgaactgccagtttgttcgtcggctaccgaatgctcggcgctattacggtagaccgtactcgatga

SEQ ID NO: 9571 - protein, 319 aa, Muscodor strobelii
  misc_feature: SGI Peptide ID NO. 562997
  misc_feature (26)..(143): Pfam Id: PF06985 Pfam Desc: Heterokaryon incompatibility protein (HET)
  misc_feature (26)..(113): Pfam Id: PF06985 Pfam Desc: Heterokaryon incompatibility protein (HET)
  misc_feature (133)..(143): Pfam Id: PF06985 Pfam Desc: Heterokaryon incompatibility protein (HET)
  misc_feature (1)..(254): NCBI GI: 256720502 Blast Desc: NECHADRAFT_55867 [Nectria haematococca mpVI 77-13-4]
  misc_feature (1)..(254): NCBI GI: 171689682 Blast Desc: protein product [Podospora anserina] gi|170944803|emb|CAP70915.1| protein product [Podospora anserina]
  misc_feature (1)..(270): NCBI GI: 46107392 Blast Desc: FG00579.1 [Gibberella zeae PH-1]
  misc_feature (1)..(253): NCBI GI: 71001840 Blast Desc: HET domain protein [Aspergillus fumigatus Af293] gi|66853239|gb|EAL93563.1| HET domain protein [Aspergillus fumigatus Af293] gi|159129660|gb|EDP54774.1| HET domain protein
  misc_feature (1)..(257): NCBI GI: 256722255 Blast Desc: NECHADRAFT_52327 [Nectria haematococca mpVI 77-13-4]
  misc_feature (1)..(274): NCBI GI: 46139867 Blast Desc: FG11448.1 [Gibberella zeae PH-1]
  misc_feature (1)..(254): NCBI GI: 121715886 Blast Desc: HET domain protein [Aspergillus clavatus NRRL 1] gi|119403709|gb|EAW14126.1| HET domain protein [Aspergillus clavatus NRRL 1]
  misc_feature (1)..(299): NCBI GI: 256732223 Blast Desc: NECHADRAFT_93752 [Nectria haematococca mpVI 77-13-4]
  misc_feature (1)..(254): NCBI GI: 119481395 Blast Desc: HET domain protein [Neosartorya fischeri NRRL 181] gi|119408880|gb|EAW18829.1| HET domain protein [Neosartorya fischeri NRRL 181]
  misc_feature (1)..(262): NCBI GI: 145608538 Blast Desc: MGG_06555 [Magnaporthe grisea 70-15] gi|145016004|gb|EDK00494.1| MGG_06555 [Magnaporthe grisea 70-15]
MHLINAHTLRLQKFVKEENEKPIYKYAILSHRWLDREDEVSFQDIESADTNVATQRKGYSKISQTCSLAKSQNLDYIWIDTCCINKTDSSELQEAVNSMYRWYNNATVCYVHLRDTVFTADDSHLYSVMYHDPWFRRGWTLQELLAPKTLHFYDAYWKLIGDKKSLSFDLERITGISKPLLEGITQLHDYSIAQRMSWACGRFTTRPEDSAYSLFGVFGINMPMLYGEGRERAFIRLQEEIIKLSDDQSIFAWEGGEFIDWRQFTMSPSSSAYEAETLLIMSQETQSPECLLQTLTSSRTASLFVGYRMLGAITVDRTR

SEQ ID NO: 9572 - DNA, 3054 bp, Muscodor strobelii
  misc_feature: SGI cDNA ID NO. 562998
  misc_feature: Encodes the peptide sequence at SEQ ID NO 9573
atggtgtcgatacggggattatcagcgacaatcttgtcgttgtgttgcgtccaggtctcaggcttagttcttggcgggaggaactatgaggtctcagatattggaccccgaggtgctctcgaaggcctggtaacatgggatgagaaatctctcttcattcgaggagagcgtatcatgtttttctcgggcgaattccacccttggcgtctccctgtacccgacctgtggctcgatgtcttccacaagatcaaagctcttggctataatggggcttcattctatgtcgattgggcactattggagggtgctccaggtcacttctcggctgaaggagtctttgcgtgggagccattcttcgaagcagcagctgaagccggtgtttacctgatcgctcgtccgggaccgtacatcaacgcggaagtttccgggggaggcttccctgggtggctgtcgcgcgagcccgctattctccggactaatgaaacaggctatctggatgcgacgaagaactatgttgcgcatatgggcaaactcatcgcggatgctcagatcacgaatggagggcccgttgttctgttgcaagctgaaaacgaatacgtgtgtagacctcgcaagagctcaaaaacgtacggcgaaccttgggtcaagtggcccgatgtagagtatatggaagccgtctggagactatggcgcgacgcaggcatcgtagtccccggcatcaacaacgaagccgccgacatagggctatttacacccggagacgccggtggacccgatatttacggtcacgatagttatcccatcggctttgactgctcaaaaccgaacaactggaccccaggtagcttaccgacaggatggcgagatcttcatctcgagttcagtcccagcagtccgtacaccattccggagttccagggcggtgctattgatagctggggtactggactgggtcttgagctctgcgcggatttgaccaatgcggaattcgagcgtgtcttctacaaaaacgacttcacattcggcatgactgtgctcagcattacatacggtggaaccaactggggcaatctaggagaatctggaggatatacttcctacgactacggcgccgtgattaaagaggatcgaacaatcactcgcgagaagtatcacgaagcaaagctggtcgcgcaattcatcacctcctctccagcatttttagaagctactcccggagccttgaccaacacgtcctacgtgagcacctcggaactgagcacgactcccattatcagcaacacaacggtcttctacgtgacccgtcattctgcttacgagtctcttgcctccacgccttataccttcacagttcctacgagtaccggaaacgtcacaattccgcagctgggcgggactctcacgctcaacggcagagattccaagatccatgtcactgactacgatgtcggcggtatcaatctcctatactcatcagcagatatctacacgcatggtaaaacaggacaaaagcgagtgctgctgatgtacggcctcgaaggcgagacgcacgagctagcattctcatccgagctaggaaagcccacagtcgaaggcggctcagtcaagatcgagacgaaaggctctgccgtagtcgtgcaatgggaagtaactccaacaaagaaagtcttgcactacggcagcaacctcgacgtatatctcctctggcgcaacgacgcattcaactactggaagctagagctcgaagctccatcaccaatcagcaactacacatcgcaatctaaagacgcagtaatcgccaaagcagggtatctcttacgcaccgcaacaaaatccgggacctcgcttcatctcactggagatctaaacacaaccgcagatctcgagatcgtagcaggcctcccaggatccaacaacatctacttcaacggtgccaaggtacctaacatcaagtcaaccaacggccgcctaaccggaaccctcaaatacacaaccccatcccttagccttccggatctcgaagccctgaactggaagtcaatcaactccctccccgagataacacccacatactccgactcagcatggcccgtcgcagatctcacctacaccaacaacacatcgcgcgactccaacaacgccatcatcaccctccaaactcccacctctctaatatcaagtgactacggcttccacaccggctctctcatctaccgcgggacattcacctcaaccggcaacgaaacaaccctctacctctccacaatcggcggagcagcctacggtcacaccgtctggctcaacagcacctacctcggatccttcccaggaggcgccggctacgtgacctctcacaaccagaccttcactctacctgctctgaagaggggatcgacatacgtcatcacagtcctaatagaccacatgggcatggaaacaaactggacgcccggcctcgaccttatgaagacaccgcgcggaatcctgaactactccctctcaggccacgcacaatcctcgataacctggcgcctgaccggcaatcttggtggtgaatcctggcgcgacactgtccgaggaccgttgaacgagggcgcgatgtgggtagagcggcaaggatatcatctccccgccccaccaactgaagactgggagagtagctcgccagtcactgatgggttaagtgaagcggatgtgatgttctacgcagcgagtttcgaacttgatataccgagtggttatgatgtgccgctaagttttgtgttcaagaacacgacggaagtgagcaattttagggtccagctttatgttaatggatggcagtttggggagtatgtcaacaacctaggacctcaaacaagcttcccagtacccgagggcgttttgaactacagcggcacaaattacctcgcgttgacgctatgggcgcaagacactgagggtgcgaagctcggaggtttaagtctcatggcgaatgcggttatacaatcaggcatgaagaaacctgcgctaacttggaacgatgtgtgggaggagcgcgagggcgcctattaa

SEQ ID NO: 9573 - protein, 1017 aa, Muscodor strobelii
  misc_feature: SGI Peptide ID NO. 562998
  misc_feature (50)..(394): Pfam Id: PF01301 Pfam Desc: Glycosyl hydrolases family 35
  misc_feature (30)..(1017): NCBI GI: 212290197 Blast Desc: beta-galactosidase precursor [Aspergillus niger]
  misc_feature (1)..(1017): NCBI GI: 238914608 Blast Desc: beta-galactosidase [Bispora sp. MEY-1]
  misc_feature (30)..(1017): NCBI GI: 62913951 Blast Desc: beta-galactosidase [Aspergillus phoenicis]
  misc_feature (30)..(1017): NCBI GI: 118582212 Blast Desc: lactase [Aspergillus niger]
  misc_feature (30)..(1017): NCBI GI: 44844271 Blast Desc: beta-galactosidase [Penicillium sp.] gi|56266627|emb|CAA49852.2| beta-galactosidase precursor [Penicillium canescens]
  misc_feature (30)..(1017): NCBI GI: 119495092 Blast Desc: beta-galactosidase, [Neosartorya fischeri NRRL 181] gi|119412501|gb|EAW22442.1| beta-galactosidase, [Neosartorya fischeri NRRL 181]
  misc_feature (40)..(1017): NCBI GI: 56553859 Blast Desc: beta-galactosidase, [Neosartorya fischeri NRRL 181] gi|119412501|gb|EAW22442.1| beta-galactosidase, [Neosartorya fischeri NRRL 181]
  misc_feature (30)..(1017): NCBI GI: 189092779 Blast Desc: beta-galactosidase [Penicillium expansum] gi|189092781|gb|ACD75822.1| beta-galactosidase [Penicillium expansum]
  misc_feature (30)..(1017): NCBI GI: 70996064 Blast Desc: beta-galactosidase [Aspergillus fumigatus Af293] gi|66850422|gb|EAL90749.1| beta-galactosidase, [Aspergillus fumigatus Af293]
  misc_feature (30)..(1017): NCBI GI: 159131541 Blast Desc: beta-galactosidase, [Aspergillus fumigatus A1163]
  misc_feature (30)..(1017): SWISSPROT Homolog: EC 3.2.1.23 Beta-galactosidase
MVSIRGLSATILSLCCVQVSGLVLGGRNYEVSDIGPRGALEGLVTWDEKSLFIRGERIMFFSGEFHPWRLPVPDLWLDVFHKIKALGYNGASFYVDWALLEGAPGHFSAEGVFAWEPFFEAAAEAGVYLIARPGPYINAEVSGGGFPGWLSREPAILRTNETGYLDATKNYVAHMGKLIADAQITNGGPVVLLQAENEYVCRPRKSSKTYGEPWVKWPDVEYMEAVWRLWRDAGIVVPGINNEAADIGLFTPGDAGGPDIYGHDSYPIGFDCSKPNNWTPGSLPTGWRDLHLEFSPSSPYTIPEFQGGAIDSWGTGLGLELCADLTNAEFERVFYKNDFTFGMTVLSITYGGTNWGNLGESGGYTSYDYGAVIKEDRTITREKYHEAKLVAQFITSSPAFLEATPGALTNTSYVSTSELSTTPIISNTTVFYVTRHSAYESLASTPYTFTVPTSTGNVTIPQLGGTLTLNGRDSKIHVTDYDVGGINLLYSSADIYTHGKTGQKRVLLMYGLEGETHELAFSSELGKPTVEGGSVKIETKGSAVVVQWEVTPTKKVLHYGSNLDVYLLWRNDAFNYWKLELEAPSPISNYTSQSKDAVIAKAGYLLRTATKSGTSLHLTGDLNTTADLEIVAGLPGSNNIYFNGAKVPNIKSTNGRLTGTLKYTTPSLSLPDLEALNWKSINSLPEITPTYSDSAWPVADLTYTNNTSRDSNNAIITLQTPTSLISSDYGFHTGSLIYRGTFTSTGNETTLYLSTIGGAAYGHTVWLNSTYLGSFPGGAGYVTSHNQTFTLPALKRGSTYVITVLIDHMGMETNWTPGLDLMKTPRGILNYSLSGHAQSSITWRLTGNLGGESWRDTVRGPLNEGAMWVERQGYHLPAPPTEDWESSSPVTDGLSEADVMFYAASFELDIPSGYDVPLSFVFKNTTEVSNFRVQLYVNGWQFGEYVNNLGPQTSFPVPEGVLNYSGTNYLALTLWAQDTEGAKLGGLSLMANAVIQSGMKKPALTWNDVWEEREGAY

SEQ ID NO: 9574 - DNA, 1887 bp, Muscodor strobelii
  misc_feature: SGI EST ID NO. CUFF.22654.0
  misc_feature: Variant of the nucleotide sequence at SEQ ID NO 9572
ggcgaaccttgggtcaagtggcccgatgtagagtatatggaagccgtctggagactatggcgcgacgcaggcatcgtagtccccggcatcaacaacgaagccgccgacatagggctatttacacccggagacgccggtggacccgatatttacggtcacgatagttatcccatcggctttgactgctcaaaaccgaacaactggaccccaggtagcttaccgacaggatggcgagatcttcatctcgagttcagtcccagcagtccgtacaccattccggagttccagggcggtgctattgatagctggggtactggactgggtcttgagctctgcgcggatttgaccaatgcggaattcgagcgtgtcttctacaaaaacgacttcacattcggcatgactgtgctcagcatttatatggtacttgatgtcacacatataacgccgcataggagatgagctaacaatccgcagacatacggtggaaccaactggggcaatctaggagaatctggaggatatacttcctacgactacggcgccgtgattaaagaggatcgaacaatcactcgcgagaagtatcacgaagcaaagctggtcgcgcaattcatcacctcctctccagcatttttagaagctactcccggagccttgaccaacacgtcctacgtgagcacctcggaactgagcacgactcccattatcagcaacacaacggtcttctacgtgacccgtcattctgcttacgagtctcttgcctccacgccttataccttcacagttcctacgagtaccggaaacgtcacaattccgcagctgggcgggactctcacgctcaacggcagagattccaagatccatgtcactgactacgatgtcggcggtatcaatctcctatactcatcagcagatatctacacgcatggtaaaacaggacaaaagcgagtgctgctgatgtacggcctcgaaggcgagacgcacgagctagcattctcatccgagctaggaaagcccacagtcgaaggcggctcagtcaagatcgagacgaaaggctctgccgtagtcgtgcaatgggaagtaactccaacaaagaaagtcttgcactacggcagcaacctcgacgtatatctcctctggcgcaacgacgcattcaactactggaagctagagctcgaagctccatcaccaatcagcaactacacatcgcaatctaaagacgcagtaatcgccaaagcagggtatctcttacgcaccgcaacaaaatccgggacctcgcttcatctcactggagatctaaacacaaccgcagatctcgagatcgtagcaggcctcccaggatccaacaacatctacttcaacggtgccaaggtacctaacatcaagtcaaccaacggccgcctaaccggaaccctcaaatacacaaccccatcccttagccttccggatctcgaagccctgaactggaagtcaatcaactccctccccgagataacacccacatactccgactcagcatggcccgtcgcagatctcacctacaccaacaacacatcgcgcgactccaacaacgccatcatcaccctccaaactcccacctctctaatatcaagtgactacggcttccacaccggctctctcatctaccgcgggacattcacctcaaccggcaacgaaacaaccctctacctctccacaatcggcggagcagcctacggtcacaccgtctggctcaacagcacctacctcggatccttcccaggaggcgccggctacgtgacctctcacaaccagaccttcactctacctgctctgaagaggggatcgacatacgtcatcacagtcctaatagaccacatgggcatggaaacaaactggacgcccggcctc

SEQ ID NO: 9575 - DNA, 1602 bp, Muscodor strobelii
  misc_feature: SGI cDNA ID NO. 562999
  misc_feature: Encodes the peptide sequence at SEQ ID NO 9576
atgcgcgagatcataaccctgcagctggggcagcagagtaattatgttgcgacacacttctggaatgcccaggaatcgtattttacatacggcgcagatgaagaatcacccgtagaccataatgtgcatttcagacccggtctcggtgcagacggcaccgagacattcatgccaagaaccgtcatctacgatctgaaaggcggattcggaactctcaagaagttaaatgcgctctacgatatcagcgacgatgcagcatcaagtagcctttggcaaggtcaaaccgtggtgcacagacaacagccgatcgaagccagtgcataccagcagagtctcgacacgggcgcaacacgaccggagctcacgacgagcaccgtgaggtactggtcagactttaatcgtgtgttttttcatccgaagtctatcattcagctcaatgaattcgagctgaactcgactcttatgccatttgagaaatggcatatgggcgaggagctattcgctacgctcgataaggaacatgatttgcttgatcgggatatgcgaccgtttgttgaggaggcggatcagatgcaggggattcaaatcatgtctgggatcgatgatgcttggggtgggtttgcggctaagtacgttgagcgtattcgtgatgagtatgggaagacgcctgtttgggtatttggcatgcaggagccgaatagggggctgacgagggagaagaagctacggaagttgattaacaaggcgagggcactggcagagcttagttcacaggcttcgcttgttgtacctctcgcactgcccgagagcccgctgccttcgagcttgcggctagatacgtcgtcgccgtggcatgtatctgcactctttgctgctgcgatcgagagcacgacgctctacactcggcttaagacagcagatcgtgtgaactcgagtaacattggtcatatgactgatctactcaatgtcttcggaagacagacgattgccaacattgagctgagccccgtgcaaccgccaagaccaaaggagaatggtacgaatggcaatgtcacatttgcgaacgggcggggtgagcacttgaacggtcataatcgagataacgatgctagcgaatcagagtcaggctcgcagaagggcactacgaccttggatgttgatctgtcatcaccgcaggatctaaatcttgacccgagggcgaggagaggcaagaagcgacatgttttcagccaagtacaaacatacagaggaccggaaagcggaaaaggcgaagagacagaggaagaactcatgagtcgcctcgccgctagacggcggccgaaagtccataactaccgctcgaaactctcattcccaattctcgatagctatcctaaaatcttcagagacagtaatgggtctgcaattacggagaacatgggcatacgcactgcgttgtctacggatacttcagtcatggataaagtgaaagctctaagaacaggtgtcatcagatctatcggcgtggaagatagggagacgatcgggaatgaccttgcggagctggcagaggggtatagagagggctggtctagtggtagtgatgatgacgacgatgaatga

SEQ ID NO: 9576 - protein, 533 aa, Muscodor strobelii
  misc_feature: SGI Peptide ID NO. 562999
  misc_feature (1)..(521): NCBI GI: 164423115 Blast Desc: NCU11398 [Neurospora crassa OR74A] gi|189031170|sp|Q7S2Y8.2|DML1_NEUCR RecName: Full=Protein dml-1 gi|157069954|gb|EAA29773.2| conserved [Neurospora crassa OR74A]
  misc_feature (1)..(533): NCBI GI: 256729767 Blast Desc: [Nectria haematococca mpVI 77-13-4]
  misc_feature (1)..(521): NCBI GI: 145608930 Blast Desc: MGG_06256 [Magnaporthe grisea 70-15] gi|145016349|gb|EDK00839.1| MGG_06256 [Magnaporthe grisea 70-15]
  misc_feature (1)..(533): NCBI GI: 46122025 Blast Desc: FG05390.1 [Gibberella zeae PH-1] gi|121814463|sp|Q4IBL8.1|DML1_GIBZE RecName: Full=Protein DML1
  misc_feature (1)..(532): NCBI GI: 261201027 Blast Desc: protein DML1 [Ajellomyces dermatitidis SLH14081] gi|239593986|gb|EEQ76567.1| protein DML1 [Ajellomyces dermatitidis SLH14081]
  misc_feature (1)..(532): NCBI GI: 239607138 Blast Desc: protein DML1 [Ajellomyces dermatitidis ER-3]
  misc_feature (1)..(532): NCBI GI: 242778029 Blast Desc: mtDNA inheritance protein Dml1, [Talaromyces stipitatus ATCC 10500] gi|218722772|gb|EED22190.1| mtDNA inheritance protein Dml1, [Talaromyces stipitatus ATCC 10500]
  misc_feature (1)..(532): NCBI GI: 212533403 Blast Desc: mtDNA inheritance protein Dml1, [Penicillium marneffei ATCC 18224] gi|210072222|gb|EEA26311.1| mtDNA inheritance protein Dml1, [Penicillium marneffei ATCC 18224]
  misc_feature (1)..(532): NCBI GI: 225560234 Blast Desc: misato [Ajellomyces capsulatus G186AR]
  misc_feature (1)..(531): NCBI GI: 238484267 Blast Desc: mtDNA inheritance protein Dml1, [Aspergillus flavus NRRL3357] gi|220701422|gb|EED57760.1| mtDNA inheritance protein Dml1, [Aspergillus flavus NRRL3357]
MREIITLQLGQQSNYVATHFWNAQESYFTYGADEESPVDHNVHFRPGLGADGTETFMPRTVIYDLKGGFGTLKKLNALYDISDDAASSSLWQGQTVVHRQQPIEASAYQQSLDTGATRPELTTSTVRYWSDFNRVFFHPKSIIQLNEFELNSTLMPFEKWHMGEELFATLDKEHDLLDRDMRPFVEEADQMQGIQIMSGIDDAWGGFAAKYVERIRDEYGKTPVWVFGMQEPNRGLTREKKLRKLINKARALAELSSQASLVVPLALPESPLPSSLRLDTSSPWHVSALFAAAIESTTLYTRLKTADRVNSSNIGHMTDLLNVFGRQTIANIELSPVQPPRPKENGTNGNVTFANGRGEHLNGHNRDNDASESESGSQKGTTTLDVDLSSPQDLNLDPRARRGKKRHVFSQVQTYRGPESGKGEETEEELMSRLAARRRPKVHNYRSKLSFPILDSYPKIFRDSNGSAITENMGIRTALSTDTSVMDKVKALRTGVIRSIGVEDRETIGNDLAELAEGYREGWSSGSDDDDDE

SEQ ID NO: 9577 - DNA, 2368 bp, Muscodor strobelii
  misc_feature: SGI EST ID NO. CUFF.22712.1
  misc_feature: Variant of the nucleotide sequence at SEQ ID NO 9575
gaagaattcatttctgaaaattcattccttcggatgagcgacatacaagaaatcgtaactcgaccatgcgcgagatcataaccctgcagctggggcagcagagtaattatgttgcgacacacttctggaatgcccaggaatcgtattttacatacggcgcagatgaagaatcacccgtagaccataatgtgcatttcagacccggtctcggtgcagacggcaccgagacattcatgccaagaaccgtcatctacgatctgaaaggcggattcggaactctcaagaagttaaatgcgctctacgatatcagcgacgatgcagcatcaagtagcctttggcaaggtcaaaccgtggtgcacagacaacagccgatcgaagccagtgcataccagcagagtctcgacacgggcgcaacacgaccggagctcacgacgagcaccgtgaggtactggtcagactttaatcgtgtgttttttcatccgaagtctatcattcagctcaatgaattcgagctgaactcgactcttatgccatttgagaaatggcatatgggcgaggagctattcgctacgctcgataaggaacatgatttgcttgatcgggatatgcgaccgtttgttgaggaggcggatcagatgcaggggattcaaatcatgtctgggatcgatgatgcttggggtgggtttgcggctaagtacgttgagcgtattcgtgatgagtatgggaagacgcctgtttgggtatttggcatgcaggagccgaatagggggctgacgagggagaagaagctacggaagttgattaacaaggcgagggcactggcagagcttagttcacaggcttcgcttgttgtacctctcgcactgcccgagagcccgctgccttcgagcttgcggctagatacgtcgtcgccgtggcatgtatctgcactctttgctgctgcgatcgagagcacgacgctctacactcggcttaagacagcagatcgtgtgaactcgagtaacattggtcatatgactgatctactcaatgtcttcggaagacagacgattgccaacattgagctgagccccgtgcaaccgccaagaccaaaggagaatggtacgaatggcaatgtcacatttgcgaacgggcggggtgagcacttgaacggtcataatcgagataacgatgctagcgaatcagagtcaggctcgcagaagggcactacgaccttggatgttgatctgtcatcaccgcaggatctaaatcttgacccgagggcgaggagaggcaagaagcgacatgttttcagccaagtacaaacatacagaggaccggaaagcggaaaaggcgaagagacagaggaagaactcatgagtcgcctcgccgctagacggcggccgaaagtccataactaccgctcgaaactctcattcccaattctcgatagctatcctaaaatcttcagagacagtaatgggtctgcaattacggagaacatgggcatacgcactgcgttgtctacggatacttcagtcatggataaagtgaaagctctaagaacaggtgtcatcagatctatcggcgtggaagatagggagacgatcgggaatgaccttgcggagctggcagaggggtatagagagggctggtctagtggtagtgatgatgacgacgatgaatgaatgaacgaattgtgtgttaaatctgctgtgcgtgtatttcaactcgtcttgtacaaaattgtatttgatgtgcgtgatgcattgacttaataggcgccctcgcgctcctcccacacatcgttccaagttagcgcaggtttcttcatgcctgattgtataaccgcattcgccatgagacttaaacctccgagcttcgcaccctcagtgtcttgcgcccatagcgtcaacgcgaggtaatttgtgccgctgtagttcaaaacgccctcgggtactgggaagcttgtttgaggtcctaggttgttgactacgaggttgtcagcattagagaactgataacagactgcaatattgtcgccgaggaaaagattcgcgtagaaaaaaagggaaaacataccatactccccaaactgccatccattaacataaagctggaccctaaaattgctcacttccgtcgtgttcttgaacacaaaacttagcggcacatcataaccactcggtatatcaagttcgaaactcgctgcgtagaacatcacatccgcttcacttaacccatcagtgactggcgagctactctcccagtcttcagttggtggggcggggagatgatatccttgccgctctacccacatcgcgccctcgttcaacggtcctcggacagtgtcgcgccaggattcaccaccaagattgccggtcaggcg

SEQ ID NO: 9578 - DNA, 621 bp, Muscodor strobelii
  misc_feature: SGI cDNA ID NO. 563000
  misc_feature: Encodes the peptide sequence at SEQ ID NO 9579
atgatgtcattcgcgcaagagctggactctttacgcacaccgcccaagacagacgtcaagcccgtgcctgaagtaggcacgccagcaccaaagcaccccaatctcgagctacccgacgacaaaccaaccatcattgtctttttgcggcattgcggctgtccattcgcagaaaaaaccttcaaagccctgacacgcctctcaacccaacaccccgaaatccacttcatagccgtatcccactcctccagcgaatccaccgagcgctgggtagtcagcgtaggaggaaactgggacgtccacatcctaatcgacgaagagcgggatctctactcactcttcggccttcccacatccacaacctggcatctcctgtcccccgtgtctctctacaacgcgttccaactcggcaagcaagaaggcgtctggaaccgaccgactgagtccggaacccggtggcagaccgccggcgcgttcgcgattgataaagatggcattgtaagatggaaatgggtcgcgaaccgagcggatgatatggcggatttggacaaggctgttacggcactgggctcgacgcccagaccgaaaccgccgccgcctgttgctagtcatgggtttttgtaa

SEQ ID NO: 9579 - protein, 206 aa, Muscodor strobelii
  misc_feature: SGI Peptide ID NO. 563000
  misc_feature (4)..(192): NCBI GI: 46122027 Blast Desc: FG05391.1 [Gibberella zeae PH-1]
  misc_feature (4)..(192): NCBI GI: 256729955 Blast Desc: NECHADRAFT_47175 [Nectria haematococca mpVI 77-13-4]
  misc_feature (2)..(182): NCBI GI: 154289977 Blast Desc: BC1G_15889 [Botryotinia fuckeliana B05.10] gi|150848522|gb|EDN23715.1| BC1G_15889 [Botryotinia fuckeliana B05.10]
  misc_feature (18)..(188): NCBI GI: 85082872 Blast Desc: NCU00015 [Neurospora crassa OR74A] gi|28918085|gb|EAA27766.1| [Neurospora crassa OR74A]
  misc_feature (14)..(189): NCBI GI: 154308221 Blast Desc: BC1G_07856 [Botryotinia fuckeliana B05.10] gi|150852941|gb|EDN28133.1| BC1G_07856 [Botryotinia fuckeliana B05.10]
  misc_feature (14)..(189): NCBI GI: 156058818 Blast Desc: SS1G_03421 [Sclerotinia sclerotiorum 1980] gi|154701208|gb|EDO00947.1| SS1G_03421 [Sclerotinia sclerotiorum 1980]
  misc_feature (2)..(188): NCBI GI: 189211115 Blast Desc: conserved [Pyrenophora tritici-repentis Pt-1C-BFP] gi|187977981|gb|EDU44607.1| conserved [Pyrenophora tritici-repentis Pt-1C-BFP]
  misc_feature (2)..(188): NCBI GI: 169600927 Blast Desc: SNOG_03318 [Phaeosphaeria nodorum SN15] gi|111068929|gb|EAT90049.1| SNOG_03318 [Phaeosphaeria nodorum SN15]
  misc_feature (14)..(189): NCBI GI: 189189832 Blast Desc: conserved [Pyrenophora tritici-repentis Pt-1C-BFP] gi|187972861|gb|EDU40360.1| conserved [Pyrenophora tritici-repentis Pt-1C-BFP]
  misc_feature (2)..(185): NCBI GI: 156051900 Blast Desc: SS1G_07357 [Sclerotinia sclerotiorum 1980] gi|154705135|gb|EDO04874.1| SS1G_07357 [Sclerotinia sclerotiorum 1980]
MMSFAQELDSLRTPPKTDVKPVPEVGTPAPKHPNLELPDDKPTIIVFLRHCGCPFAEKTFKALTRLSTQHPEIHFIAVSHSSSESTERWVVSVGGNWDVHILIDEERDLYSLFGLPTSTTWHLLSPVSLYNAFQLGKQEGVWNRPTESGTRWQTAGAFAIDKDGIVRWKWVANRADDMADLDKAVTALGSTPRPKPPPPVASHGFL

SEQ ID NO: 9580 - DNA, 1144 bp, Muscodor strobelii
  misc_feature: SGI EST ID NO. CUFF.22918.0
  misc_feature: Variant of the nucleotide sequence at SEQ ID NO 9578
ctgggagcatcccaactcaccattgctgaaacaaccaacaaccaacaactccaaataacgactcaaccactattccgtacgatacacaatcagacgatccgaatcatcacataccaacacacagtcaatatacataaacgatcaccatgatgtcattcgcgcaagagctggactctttacgcacaccgcccaagacagacgtcaagcccgtgcctgaagtaggcacgccagcaccaaagcaccccaatctcgagctacccgacgacaaaccaaccatcattgtctttttgcggcattgcggctgtccattcgcagaaaaaaccttcaaagccctgacacgcctctcaacccaacaccccgaaatccacttcatagccgtatcccactcctccagcgaatccaccgagcgctgggtagtcagcgtaggaggaaactgggacgtccacatcctaatcgacgaagagcgggatctctactcactcttcggccttcccacatccacaacctggcatctcctgtcccccgtgtctctctacaacgcgttccaactcggcaagcaagaaggcgtctggaaccgaccgactgagtccggaacccggtggcagaccgccggcgcgttcgcgattgataaagatggcattgtaagatggaaatgggtcgcgaaccgagcggatgatatggcggatttggacaaggctgttacggcactgggctcgacgcccagaccgaaaccgccgccgcctgttgctagtcatgggtttttgtaagggaaagagagggggagagggggacgagaatactcggggacttgcatagcaaatgcactaagcacaaagacgatgctcgtgaccttgacggtctccagccacccttgaagaagactacacagccgaagaagctatttggcgcgaaaacaaattacacgaatatcaacgacacacccatcgtcaaatcatcaaccagccctcatgtaaggcgcaggcgttaggggagcaccagatagttcgtttaagagattaagtacatagtgaagatagacgaggctccatctatgatgattctcccgtacaaatagagcggagaaagatcacgaactttgagacctgactccttacattaaagatgcgacggatctataataaag

SEQ ID NO: 9581 - DNA, 2118 bp, Muscodor strobelii
  misc_feature: SGI cDNA ID NO. 563001
  misc_feature: Encodes the peptide sequence at SEQ ID NO 9582
atgtactcgcaatctgcagcaatggcggcacaagctcctcaaaaaccagagacattcatgttgagcactgaagcccagcaggcattgccacacgatgcgcaagtagcattgcaacaggttgacaacctgaaatacttccttatctccgctcctgtggattggcagccggatcagtacattcggaggtttctgctcccaactggcgaatatgtctcttgtgttctatggaacaacctctttcacatctccgggacagatattgtacgatgcctgtccttccggttccaggcatttggccgtcctgtcaagaactcgaagaaattcgaggagggcatcttctccgacctgcgaaacttgaagtccggaacagatgcttcgctcgaggagccgaagagccccttccttgacttcctctacaagaacaactgcatccggacacagaagaagcagaaggtcttttactggtatagcgtgcctcatgaccgtcttttcctggatgctctggaacgagacttgaaaagggagaagatgggacaagaagctacgaccatggccgtcagcgagccggctttgtccttccagtatgactcgtcacagtcgctgtacgagcagctcacaaaggcacagcaggcaaactcatcgtcttttaatgcccaacaagtttctttttctcagtctcaggctccatccccagtgatgagagccatagactccatgcctccccctcagatgatcccccagtcgctggcccctttagcggaggggatggaggccatggttccgtacacagcgatggccacgatggccccggccatgccccagcaggttcaacaggttcagcaagtagtcaagagggagcctgagtatgcccgtgttcactataaccagaatggtgtgcccatcactcagggccaccaacgccatgcctccatgcctgcttatggtctcgagtactctcctgcaccctcgttcgtctcgtctcactacgaggactacagcaaccgcggtatttccttcgaacccatcacaccacctcagcaagcattgggcatgggcgctgaaccggcttacatcgcaaatgaggagaccgggctgtacactgctattcccgatcatcttgccggtgtgaatggcttgaatggcatgatgcaacttcctccatccaacctcgcaggaccgcaattctcacgtggctacggtactaataacgtctactctgtcattgaaggatcgcccacctacaaacagagaagacgtcggtcctccatccctccatccatgtccgctatcgcagcggccactgcccaggtgcaggctcaagctgcccctcatcgtccatctgacctgaggcgatctgtctcggcatcggtcggacctttggcagagagcgatgaaacacagggcacctcgcccccaggcctggcctacagcaactcagccatctccattgccagccaacagaacagagacttgatcgatatgtcgagacatggtactcctctgtcggccgtcgaaggcagcccggctctcaaccctctgtccctccagagacaagatttcggtatgacgaatgaggatttcatcggcgacggtcacatgggtgagcatagagccatgcaagccggccccagtgttgttcgcagagctcgttccgcaactgtcatggagctgggaccctatcctcagaagtctcactcttgtcccattcctacttgcggccggctcttcaagcgtctcgagcatctcaagcgccatgtgagaacacacacccaagagcgaccctatatctgcccccactgtagcaaggcattctctagatcggacaacctagcacagcacaagcgtacacatgatcgtggagatggtgctgaggccgggcttcccatgtccggcgaggaggaggaggacttctcgggcgaagaccatctaggctcgttagaagaggcgtcgcccaagtctgaaggtgcctacatgccgagctcgctgaatggactcgcatccaactcggctggcggccacgtcatgtcccacatgggcatgtcgcacgcttcatcattcaatccgcttcagacactaagcatgccgatgactatcagcacgcccagcggggtgatgtag

SEQ ID NO: 9582 - protein, 705 aa, Muscodor strobelii
  misc_feature: SGI Peptide ID NO. 563001
  misc_feature (595)..(617): Pfam Id: PF00096 Pfam Desc: Zinc finger, C2H2 type
  misc_feature (565)..(589): Pfam Id: PF00096 Pfam Desc: Zinc finger, C2H2 type
  misc_feature (57)..(166): Pfam Id: PF02200 Pfam Desc: STE like transcription factor
  misc_feature (1)..(670): NCBI GI: 22762042 Blast Desc: Ste12-like transcription factor [Colletotrichum lagenarium]
  misc_feature (1)..(701): NCBI GI: 91980296 Blast Desc: Ste12-like transcription factor CpST12 [Cryphonectria parasitica]
  misc_feature (1)..(704): NCBI GI: 256732758 Blast Desc: [Nectria haematococca mpVI 77-13-4]
  misc_feature (1)..(701): NCBI GI: 50649150 Blast Desc: AF432913_1 Mst12 [Magnaporthe grisea]
  misc_feature (1)..(670): NCBI GI: 46981187 Blast Desc: ste12-like transcription factor [Glomerella lindemuthiana]
  misc_feature (1)..(701): NCBI GI: 145602336 Blast Desc: MGG_12958 [Magnaporthe grisea 70-15] gi|145010763|gb|EDJ95419.1| MGG_12958 [Magnaporthe grisea 70-15]
  misc_feature (1)..(704): NCBI GI: 171685818 Blast Desc: protein product [Podospora anserina] gi|170942870|emb|CAP68523.1| protein product [Podospora anserina]
  misc_feature (1)..(704): NCBI GI: 46125865 Blast Desc: FG07310.1 [Gibberella zeae PH-1]
  misc_feature (1)..(704): NCBI GI: 21070383 Blast Desc: AF509340_1 transcription factor Fst12 [Gibberella zeae]
  misc_feature (1)..(704): NCBI GI: 223049435 Blast Desc: Ste12 [Fusarium oxysporum f. sp. lycopersici]
MYSQSAAMAAQAPQKPETFMLSTEAQQALPHDAQVALQQVDNLKYFLISAPVDWQPDQYIRRFLLPTGEYVSCVLWNNLFHISGTDIVRCLSFRFQAFGRPVKNSKKFEEGIFSDLRNLKSGTDASLEEPKSPFLDFLYKNNCIRTQKKQKVFYWYSVPHDRLFLDALERDLKREKMGQEATTMAVSEPALSFQYDSSQSLYEQLTKAQQANSSSFNAQQVSFSQSQAPSPVMRAIDSMPPPQMIPQSLAPLAEGMEAMVPYTAMATMAPAMPQQVQQVQQVVKREPEYARVHYNQNGVPITQGHQRHASMPAYGLEYSPAPSFVSSHYEDYSNRGISFEPITPPQQALGMGAEPAYIANEETGLYTAIPDHLAGVNGLNGMMQLPPSNLAGPQFSRGYGTNNVYSVIEGSPTYKQRRRRSSIPPSMSAIAAATAQVQAQAAPHRPSDLRRSVSASVGPLAESDETQGTSPPGLAYSNSAISIASQQNRDLIDMSRHGTPLSAVEGSPALNPLSLQRQDFGMTNEDFIGDGHMGEHRAMQAGPSVVRRARSATVMELGPYPQKSHSCPIPTCGRLFKRLEHLKRHVRTHTQERPYICPHCSKAFSRSDNLAQHKRTHDRGDGAEAGLPMSGEEEEDFSGEDHLGSLEEASPKSEGAYMPSSLNGLASNSAGGHVMSHMGMSHASSFNPLQTLSMPMTISTPSGVM

SEQ ID NO: 9583 - DNA, 4022 bp, Muscodor strobelii
  misc_feature: SGI EST ID NO. CUFF.23681.0
  misc_feature: Variant of the nucleotide sequence at SEQ ID NO 9581
tcccaccgtccactccatggaaaatcattaagatcccgagcaccgccatcttcttcccttcccgctcccgtttctttctcttgaactttgctcccccctgattctttcgcgagatcagttctgttcatcagacccctctcttttcccttctcctcccctccccttctcaaccaccgtccaaccttcccccaatcggtgtgtcgcgggccgccaacatctgttcctcactcactctcactctgcacaattcgtttcttccgttacttctctctaataccgcggacgtcgctgcaacgcgcgctaccgacgacaaaaaacccaacgccccgatctgtccggcacaaccgtggtctatcagacaaactccgtcgcacgttgaaccttctgtcaacctttttctgaccttgtcttcagtctgatctcaggtcgtaattgtggtgctgcattaacacgattcgtctttcgtcgcaatacactcaggttaatcgcattctcgattcgtcgagaaggtctggttcaaacgcatttgcagcaggcagcctgcatagagagtgcgagtctctgtttacgtcgatccgtcttcaactgcttgcattgcatcgcatagcatcaccccgacgcacaggtcgcacagtccggacctcagaactgcagtttggaggagcacccaccgatcgtttctgtattatcacgccttgaaggttcgcaccggaactgacgcccacccgttcgcttgaggcaaattgggtgcatctctatcccgggagacagcaaattcaaaaatcactatcatcaattcatcacgggctggactcgacatattcattcggagcaaagttgcaaacaaactaacactacccgcatcaaacacaagactcccgtcggcgggtcactcacacacggaaaggcagcgccttctaactattgcgattagtggtctgtggaaacgggcacacgagatccgtgatacgactcatttctttgaattactcatttctcgctcactacgagctacttatttcacatatcgtcgacattggagaccaacaaggcaccccagcgccattaccaacgcagctgcgtagtacatgatgtactcgcaatctgcagcaatggcggcacaagctcctcaaaaaccagagacattcatgttgagcactgaagcccagcaggcattgccacacgatgcgcaagtagcattgcaacaggttgacaacctgaaatacttccttatctccgctcctgtggattggcagccggatcagtacattcggaggtttctgctcccaactggcgaatatgtctcttgtgttctatggaacaacctctttcacatctccgggacagatattgtacgatgcctgtccttccggttccaggcatttggccgtcctgtcaagaactcgaagaaattcgaggagggcatcttctccgacctgcgaaacttgaagtccggaacagatgcttcgctcgaggagccgaagagccccttccttgacttcctctacaagaacaactgcatccggacacagaagaagcagaaggtcttttactggtatagcgtgcctcatgaccgtcttttcctggatgctctggaacgagacttgaaaagggagaagatgggacaagaagctacgaccatggccgtcagcgagccggctttgtccttccagtatgactcgtcacagtcgctgtacgagcagctcacaaaggcacagcaggcaaactcatcgtcttttaatgcccaacaagtttctttttctcagtctcaggctccatccccagtgatgagagccatagactccatgcctccccctcagatgatcccccagtcgctggcccctttagcggaggggatggaggccatggttccgtacacagcgatggccacgatggccccggccatgccccagcaggttcaacaggttcagcaagtagtcaagagggagcctgagtatgcccgtgttcactataaccagaatggtgtgcccatcactcagggccaccaacgccatgcctccatgcctgcttatggtctcgagtactctcctgcaccctcgttcgtctcgtctcactacgaggactacagcaaccgcggtatttccttcgaacccatcacaccacctcagcaagcattgggcatgggcgctgaaccggcttacatcgcaaatgaggagaccgggctgtacactgctattcccgatcatcttgccggtgtgaatggcttgaatggcatgatgcaacttcctccatccaacctcgcaggaccgcaattctcacgtggctacggtactaataacgtctactctgtcattgaaggatcgcccacctacaaacagagaagacgtcggtcctccatccctccatccatgtccgctatcgcagcggccactgcccaggtgcaggctcaagctgcccctcatcgtccatctgacctgaggcgatctgtctcggcatcggtcggacctttggcagagagcgatgaaacacagggcacctcgcccccaggcctggcctacagcaactcagccatctccattgccagccaacagaacagagacttgatcgatatgtcgagacatggtactcctctgtcggccgtcgaaggcagcccggctctcaaccctctgtccctccagagacaagatttcggtatgacgaatgaggatttcatcggcgacggtcacatgggtgagcatagagccatgcaagccggccccagtgttgttcgcagagctcgttccgcaactgtcatggagctgggaccctatcctcagaagtctcactcttgtcccattcctacttgcggccggctcttcaagcgtctcgagcatctcaagcggtaaggctgaacttgttcatttgtatatgtcatgtgtgcgcgccgctttgtatctgactcattatctagccatgtgagaacacacacccaagagcgaccctatatctgcccccactgtagcaaggcattctctagatcggacaacctagcacagtatgactcctgaatttcttttgtgactttagttagtcaacttgaagatcctgtgatgagcaaagatgtcagtgcctcgagcactccagccgaaagcaacccagtgcgccaaagtcacaacacagaagacaacatacagcatgcatcaactcatcacaacggatcggaaagtttgcgacatagttcgtctggctaacatgagtttcctctaggcacaagcgtacacatgatcgtggagatggtgctgaggccgggcttcccatgtccggcgaggaggaggaggacttctcgggcgaagaccatctaggctcgttagaagaggcgtcgcccaagtctgaaggtgcctacatgccgagctcgctgaatggactcgcatccaactcggctggcggccacgtcatgtcccacatgggcatgtcgcacgcttcatcattcaatccgcttcagacactaagcatgccgatgactatcagcacgcccagcggggtgatgtagacgcgacggcagaagactttcgaacaacatatatgctctcatgatatacattcttatgtgggtctcatgggggggggggggtttccacggtttactagcgttggcgatttgtgtttctatatgacatatgcgattagatctggggacgactagctacctactcctacgggacacggggcgatgacattttgggacattttcatttcttttcacgagggataccataaaacgaaggcatctgatagagagctgcacggtgcgccttaaatgagcagggcaacccattgctaccaggagagggaaaggggcgacacgggggaagacgaccatgcacaaagccaaggccaacctcgtgcatttgtatatatagttcttttattcttatttgtcccaaggtatcgagcggaagttcgataccaggactctcagctggaaatcagcttcgagagccaatacagtaaaacgaaatgaaaaacaagatcacgtcttaaatatttacatcggggttctctgcgggttgatcttctgtgaa

SEQ ID NO: 9584 - DNA, 855 bp, Muscodor strobelii
  misc_feature: SGI cDNA ID NO. 563002
  misc_feature: Encodes the peptide sequence at SEQ ID NO 9585
atgaccctatccatcaacccatctcaccccgtccatttagcgccattagtgacgctcaacacacttctcacgcaagctgtgaatgtagcgtctttgtgtctcacagaaggggaaaatcgggccgcggactactcctcagcagcagctttcttatcctctcagctacgcctcctatcccaagtaatggcagaagcctcatctatcctccgcggcagtgcttcaacagcgcggcccgtatcatccgcatcaacacgtagcttccagcggccctctacagccacaagtcagcaacagccggaaataatcgctccagccggcagcgggagcgactggactcagttctccgcagccacaacatcattcacgcctccgctcgcccccacactatccttccacgtcacgatacaagacgcatctcttgtcctgaccctccgcgccctggaacccgcagatgtcccggtaaatcttggtatcaaattcgctctcgcaatcggcaccgcgcggcgcttggaacacgatgaagcagagaaaatattctcataccagcatcacacaaccgacgtctcatcatcaccgacacacgcagacttacttttgccagaaccatcagagacaaccacaactcctccgtatccgacgtccggaacccgcgcaatggccggtgtgaacaaaggcatgggttccggtggagttggtgatgaggtagagagggtcttcgttcgtgaaaaggtcagagtcgagagcgcggatccgagtctcctgtccatgtccgccaagttgggagccttgagtagtactctggagctcgctagacggaacttggctgctgttatgggagaggattttgacgtgtga

SEQ ID NO: 9585 - protein, 284 aa, Muscodor strobelii
  misc_feature: SGI Peptide ID NO. 563002
  misc_feature (2)..(283): NCBI GI: 116194069 Blast Desc: CHGG_06752 [Chaetomium globosum CBS 148.51] gi|88182665|gb|EAQ90133.1| CHGG_06752 [Chaetomium globosum CBS 148.51]
  misc_feature (2)..(283): NCBI GI: 170940364 Blast Desc: protein product [Podospora anserina]
  misc_feature (2)..(283): NCBI GI: 39970275 Blast Desc: MGG_02604 [Magnaporthe grisea 70-15] gi|149209681|ref|XP_001522215.1| MGCH7_ch7g323 [Magnaporthe grisea 70-15] gi|86196278|gb|EAQ70916.1| MGCH7_ch7g323 grisea
  misc_feature (2)..(281): NCBI GI: 256727073 Blast Desc: [Nectria haematococca mpVI 77-13-4]
  misc_feature (111)..(283): NCBI GI: 261353731 Blast Desc: conserved [Verticillium albo-atrum VaMs.102]
  misc_feature (2)..(281): NCBI GI: 46135825 Blast Desc: FG09428.1 [Gibberella zeae PH-1]
  misc_feature (2)..(179): NCBI GI: 164423442 Blast Desc: NCU08091 [Neurospora crassa OR74A] gi|157070096|gb|EAA35986.2| conserved [Neurospora crassa OR74A]
  misc_feature (2)..(283): NCBI GI: 156046731 Blast Desc: SS1G_09450 [Sclerotinia sclerotiorum 1980] gi|154693845|gb|EDN93583.1| SS1G_09450 [Sclerotinia sclerotiorum 1980]
  misc_feature (13)..(284): NCBI GI: 242785632 Blast Desc: TSTA_034400 [Talaromyces stipitatus ATCC 10500] gi|218720782|gb|EED20201.1| TSTA_034400 [Talaromyces stipitatus ATCC 10500]
  misc_feature (1)..(281): NCBI GI: 189202642 Blast Desc: conserved [Pyrenophora tritici-repentis Pt-1C-BFP] gi|187984756|gb|EDU50244.1| conserved [Pyrenophora tritici-repentis Pt-1C-BFP]
MTLSINPSHPVHLAPLVTLNTLLTQAVNVASLCLTEGENRAADYSSAAAFLSSQLRLLSQVMAEASSILRGSASTARPVSSASTRSFQRPSTATSQQQPEIIAPAGSGSDWTQFSAATTSFTPPLAPTLSFHVTIQDASLVLTLRALEPADVPVNLGIKFALAIGTARRLEHDEAEKIFSYQHHTTDVSSSPTHADLLLPEPSETTTTPPYPTSGTRAMAGVNKGMGSGGVGDEVERVFVREKVRVESADPSLLSMSAKLGALSSTLELARRNLAAVMGEDFDV

SEQ ID NO: 9586 - DNA, 1268 bp, Muscodor strobelii
  misc_feature: SGI EST ID NO. CUFF.22666.0
  misc_feature: Variant of the nucleotide sequence at SEQ ID NO 9584
acccgagtcggcgctcgtctcgtgaaggggactatccacacgaaattacggacaactgtgcccatgaccctatccatcaacccatctcaccccgtccatttagcgccattagtgacgctcaacacacttctcacgcaagctgtgaatgtagcgtctttgtgtctcacagaaggggaaaatcgggccgcggactactcctcagcagcagctttcttatcctctcagctacgcctcctatcccaagtaatggcagaagcctcatctatcctccgcggcagtgcttcaacagcgcggcccgtatcatccgcatcaacacgtagcttccagcggccctctacagccacaagtcagcaacagccggaaataatcgctccagccggcagcgggagcgactggactcagttctccgcagccacaacatcattcacgcctccgctcgcccccacactatccttccacgtcacgatacaagacgcatctcttgtcctgaccctccgcgccctggaacccgcagatgtcccggtaaatcttggtatcaaattcgctctcgcaatcggcaccgcgcggcgcttggaacacgatgaagcagagaaaatattctcataccagcatcacacaaccgacgtctcatcatcaccgacacacgcagacttacttttgccagaaccatcagagacaaccacaactcctccgtatccgacgtccggaacccgcgcaatggccggtgtgaacaaaggcatgggttccggtggagttggtgatgaggtagagagggtcttcgttcgtgaaaaggtcagagtcgagagcgcggatccgagtctcctgtccatgtccgccaagttgggagccttgagtagtactctggagctcgctagacggaacttggctgctgttatgggagaggattttgacgtgtgaatgcaatttatggtcgggacaagtgaggatactagaatatatcacttatactagcagcatgtggcatcgaacaattcccaattcttaggataacgaatgggttttctagcgaaggcaatcatcgttatagtgtttatactattttattccttaactcgaaatgcgtacgccatgtgtgcgcatcctaccctcctcttgtatctaaccagtaacatacaatatgcgtagttggtgttagacagttgagatcgtacagtcaaggcagttatgtttaatttttattagcgacattaatcaccagggctttgaccagaaactgggactttcgttcgtcattttatgtgctgtta

SEQ ID NO: 9587 - DNA, 561 bp, Muscodor strobelii
  misc_feature: SGI cDNA ID NO. 563003
  misc_feature: Encodes the peptide sequence at SEQ ID NO 9588
atgccatttcaggatgcactaggttgccataacttggctctcaaggagcatcggttgctgaacctgctcgatgtccctgacagtgtttccatggagatattcgaagtggtcgttcgcggcagagaatactgccgtgatgttatcatctactggtacgaggatcgattccgctgtaccgacatcgatcacgtctatctgcgaagctgcagtctcgaatttgagactgtggaggacaagaacaacgccgtcattgaggaggatgtcactttcgtatggggtagtgcatcgactgaactggggactatcactcctggggatccccgtttctcgaaattttctcgagtctcctatccgtcgcacacgtatcttctcggtcatgctggcgcttttgaagacgaagacatgccaattgccacttcccaggagcaaggtgccgccatccatggtcccggacaggatgaccgcacgtcggctctcgaggctgccgtcttccgcctacaggagcagatccgccgtctgcaggccgagatcactgaactccgacaacaagtcgacaaatga

SEQ ID NO: 9588 - protein, 186 aa, Muscodor strobelii
  misc_feature: SGI Peptide ID NO. 563003
MPFQDALGCHNLALKEHRLLNLLDVPDSVSMEIFEVVVRGREYCRDVIIYWYEDRFRCTDIDHVYLRSCSLEFETVEDKNNAVIEEDVTFVWGSASTELGTITPGDPRFSKFSRVSYPSHTYLLGHAGAFEDEDMPIATSQEQGAAIHGPGQDDRTSALEAAVFRLQEQIRRLQAEITELRQQVDK

SEQ ID NO: 9589 - DNA, 708 bp, Muscodor strobelii
  misc_feature: SGI cDNA ID NO. 563004
  misc_feature: Encodes the peptide sequence at SEQ ID NO 9590
atgaagtctattctcgctttcgctgcctttctggcacctctcacggaggctcactatattttcaatcgtctcatcgtcaatggtgcatctattggcggcgaatacgcctatacgcgcaagaatagcaactcttacatgcctgcatatactagcgagttgatgaactcgaacgatcttcgatgcaacaaaggcgccaaggcaggaagcaccgccacgtacaccgtaaaggcgggcgacaaactgggattcaaacttttcaacaacgagtttatcgaacacccaggcccaggatttgtctatatctccaaggcaccaggctccgtgaatgactatgacggctccggagattgggttaaagtaatggagactggtttgtgcaacccagcaactcccggcaacgatggatcgtggtgcagctggcaaaaggatcgccttgagtggactgttcagcagaatattcctgccggcgagtatcttgttcgtgtcgagcatatcggtctgcacgaagcgtttcaaggcaaagcgcaattctacatcgagtgctatcaattgaagattgagagctctggcacgggtacacctcagccatccgtcaagttccccggtgcctattccgcctcagacccaggcattgcttttgataagtggaacaaccctaaagccaactcatatgtcatgccaggccccgcagtgtgggatggcaagtaa

SEQ ID NO: 9590 - protein, 235 aa, Muscodor strobelii
  misc_feature: SGI Peptide ID NO. 563004
  misc_feature (147)..(226): Pfam Id: PF03443 Pfam Desc: Glycosyl hydrolase family 61
  misc_feature (1)..(234): NCBI GI: 169615643 Blast Desc: SNOG_10981 [Phaeosphaeria nodorum SN15] gi|111060360|gb|EAT81480.1| SNOG_10981 [Phaeosphaeria nodorum SN15]
  misc_feature (18)..(234): NCBI GI: 171683706 Blast Desc: protein product [Podospora anserina] gi|170941813|emb|CAP67466.1| protein product [Podospora anserina]
  misc_feature (1)..(234): NCBI GI: 189207084 Blast Desc: fungal cellulose binding domain containing protein [Pyrenophora tritici-repentis Pt-1C-BFP] gi|187975969|gb|EDU42595.1| fungal cellulose binding domain
  misc_feature (18)..(232): NCBI GI: 39946206 Blast Desc: MGG_08409 [Magnaporthe grisea 70-15] gi|145019929|gb|EDK04157.1| MGG_08409 [Magnaporthe grisea 70-15]
  misc_feature (18)..(234): NCBI GI: 116197479 Blast Desc: CHGG_06895 [Chaetomium globosum CBS 148.51] gi|88178174|gb|EAQ85642.1| CHGG_06895 [Chaetomium globosum CBS 148.51]
  misc_feature (3)..(234): NCBI GI: 70991989 Blast Desc: endoglucanase [Aspergillus fumigatus Af293] gi|66848476|gb|EAL88805.1| endoglucanase, [Aspergillus fumigatus Af293] gi|159124411|gb|EDP49529.1| endoglucanase, [Aspergillus
  misc_feature (3)..(234): NCBI GI: 119470730 Blast Desc: fungal cellulose binding domain protein [Neosartorya fischeri NRRL 181] gi|119406222|gb|EAW16173.1| fungal cellulose binding domain protein [Neosartorya fischeri NRRL 181]
  misc_feature (5)..(232): NCBI GI: 169784466 Blast Desc: [Aspergillus oryzae RIB40] gi|238508389|ref|XP_002385389.1| endoglucanase, [Aspergillus flavus NRRL3357] gi|83775441|dbj|BAE65561.1| protein product
  misc_feature (1)..(232): NCBI GI: 115397335 Blast Desc: conserved [Aspergillus terreus NIH2624] gi|114192450|gb|EAU34150.1| conserved [Aspergillus terreus NIH2624]
  misc_feature (1)..(232): NCBI GI: 67525177 Blast Desc: AN3046.2 [Aspergillus nidulans FGSC A4] gi|40744441|gb|EAA63617.1| AN3046.2 [Aspergillus nidulans FGSC A4] gi|259486007|tpe|CBF83507.1| TPA: endoglucanase, [Aspergillus
  misc_feature (58)..(234): SWISSPROT Homolog: EC 3.2.1.4 Cellulase
MKSILAFAAFLAPLTEAHYIFNRLIVNGASIGGEYAYTRKNSNSYMPAYTSELMNSNDLRCNKGAKAGSTATYTVKAGDKLGFKLFNNEFIEHPGPGFVYISKAPGSVNDYDGSGDWVKVMETGLCNPATPGNDGSWCSWQKDRLEWTVQQNIPAGEYLVRVEHIGLHEAFQGKAQFYIECYQLKIESSGTGTPQPSVKFPGAYSASDPGIAFDKWNNPKANSYVMPGPAVWDGK

SEQ ID NO: 9591 - DNA, 1518 bp, Muscodor strobelii
  misc_feature: SGI cDNA ID NO. 563005
  misc_feature: Reduced expression when VOC is produced
  misc_feature: Encodes the peptide sequence at SEQ ID NO 9592
atgcgcttaccatatgtgtctgctgcatttgctgcattggccgtcgttgctaccaccaacgctcgttctgagtgtacctctctgacgatcgatgacacacctgttggtacgtctttgatcaacattaccgcgactcccagatataatgttacggtccaaggcacaaatttcaacgctacaggtacggtgtctaacatcagcttttgcgacgtgcaagtctacctgacgcatggtgacgagggagatgaagttcggattgctgtatggcttcctcttagggagtggaatggccgcttcttgggcaccggaggtgccgggttcaacgccggcgtttttgacccggctctagctgaaggcgttgatgatggatttgcggccgctgcgacagatgctggcgtaggtctcaccggtgacccggaaccttgggccaactcaacacagttgaacattaattttgtgtatttgagtgtgcacgagatgacgataatagggaaaaccgtaacagcgaaattctatgatcgggatccgacctatagctatttccatggctgcagtcagggcggacgtcaaggatatgttgaggcagtccgttaccctgaagattacgatggaatttcggctcattccccagcgatcaactgggaccgccttctgccggggtttctatggccctacctgcaacagcttcaaacacctctcgcgtcttgtaagttcatggaaatcactgcagcgtccatctccgcttgtgatttgaacgacgggggcgatgatggactgatcgtctatccaccggactgcaacttcgatgctcagagtactgtcggcatggaggtctctacatgcgacagcaataaaatcatcaccggggaggaggccgacgtgtggaatagtatccgcgcagggccaaaagacaaggaggggaactcgttgtggtatggagtcgagccaggtaccgacatcacctttctcaccctggcgccattcccgtcgggagatcaatggttgaaagacttcattttgaggaatccagaatacgacacttcgagtctcacgtatgaagagtttttgaaagatttcagcgcatcgatgacggagttcgctgatctttgggggacgtctgacgccaacctcttaccgttcatgcaacacggcggaaagttgatcactttccacggttggtcagaccagtcaattcccggtaatagcacaattgaatactggaaccgtgtcagcgcggccatcagttcgcatacgccgaacttagcaacgaacaccgttgacgacttttaccgcctttttatggctcccggggttgggcattgtgctaattttgggtacggaccaggtcctctgaacataatagaaactctcgtcaactgggttgagaatcaacaagcacccgatacattatttgcagctgggtttgggcagacaagaaacttgtgccattatccacagcagttgaagtacagaggcgtcggaaaagtggaaaatgccgaaagttggacatgcgcctag

SEQ ID NO: 9592 - protein, 505 aa, Muscodor strobelii
  misc_feature: SGI Peptide ID NO. 563005
  misc_feature (69)..(505): Pfam Id: PF07519 Pfam Desc: Tannase and feruloyl esterase
  misc_feature (1)..(504): NCBI GI: 212542935 Blast Desc: feruloyl esterase, [Penicillium marneffei ATCC 18224] gi|210066529|gb|EEA20622.1| feruloyl esterase, [Penicillium marneffei ATCC 18224]
  misc_feature (37)..(504): NCBI GI: 261354791 Blast Desc: feruloyl esterase B [Verticillium albo-atrum VaMs.102]
  misc_feature (10)..(505): NCBI GI: 242767670 Blast Desc: feruloyl esterase, [Talaromyces stipitatus ATCC 10500] gi|218724610|gb|EED24027.1| feruloyl esterase, [Talaromyces stipitatus ATCC 10500]
  misc_feature (69)..(504): NCBI GI: 256675066 Blast Desc: Tannase and feruloyl esterase [Streptomyces sp. SPB78]
  misc_feature (3)..(503): NCBI GI: 145254274 Blast Desc: An18g01180 [Aspergillus niger] gi|134084161|emb|CAK47194.1| protein product [Aspergillus niger]
  misc_feature (34)..(504): NCBI GI: 256396237 Blast Desc: Tannase [Catenulispora acidiphila DSM 44928] gi|256362463|gb|ACU75960.1| Tannase [Catenulispora acidiphila DSM 44928]
  misc_feature (62)..(504): NCBI GI: 156045982 Blast Desc: SS1G_09267 [Sclerotinia sclerotiorum 1980] gi|154693663|gb|EDN93401.1| SS1G_09267 [Sclerotinia sclerotiorum 1980]
  misc_feature (2)..(504): NCBI GI: 169773349 Blast Desc: [Aspergillus oryzae RIB40] gi|83769004|dbj|BAE59141.1| protein product [Aspergillus oryzae]
  misc_feature (2)..(504): NCBI GI: 238491318 Blast Desc: conserved [Aspergillus flavus NRRL3357] gi|220697309|gb|EED53650.1| conserved [Aspergillus flavus NRRL3357]
  misc_feature (6)..(505): NCBI GI: 238844363 Blast Desc: feruloyl esterase B [Microsporum canis CBS 113480]
  misc_feature (64)..(504): SWISSPROT Homolog: EC 3.1.1.73 Feruloyl esterase
  misc_feature: Useful for introducing or modulating the production of volatile compounds
MRLPYVSAAFAALAVVATTNARSECTSLTIDDTPVGTSLINITATPRYNVTVQGTNFNATGTVSNISFCDVQVYLTHGDEGDEVRIAVWLPLREWNGRFLGTGGAGFNAGVFDPALAEGVDDGFAAAATDAGVGLTGDPEPWANSTQLNINFVYLSVHEMTIIGKTVTAKFYDRDPTYSYFHGCSQGGRQGYVEAVRYPEDYDGISAHSPAINWDRLLPGFLWPYLQQLQTPLASCKFMEITAASISACDLNDGGDDGLIVYPPDCNFDAQSTVGMEVSTCDSNKIITGEEADVWNSIRAGPKDKEGNSLWYGVEPGTDITFLTLAPFPSGDQWLKDFILRNPEYDTSSLTYEEFLKDFSASMTEFADLWGTSDANLLPFMQHGGKLITFHGWSDQSIPGNSTIEYWNRVSAAISSHTPNLATNTVDDFYRLFMAPGVGHCANFGYGPGPLNIIETLVNWVENQQAPDTLFAAGFGQTRNLCHYPQQLKYRGVGKVENAESWTCA

SEQ ID NO: 9593 - DNA, 2086 bp, Muscodor strobelii
  misc_feature: SGI EST ID NO. CUFF.22693.0
  misc_feature: Variant of the nucleotide sequence at SEQ ID NO 9591
gagttttcctttttgatcaaaacggaatcacatgacccacggaaggattatacgaactatgtgggcggtgccccgcgttacctggttgtgtgagaagttaagagcagttaatggtaagctcggagagtcttatcacactactcatattcgtttctgcctttttgaagccctcgtgagtcttggccggtgcgctggaggtggttggcgccagaccgcgggttagaattatcgcgcgactatactaaagtaagggcatgttataagagaagtctttccccggcgtttgatcatgggattttttatataattcggttaactttacagctgtactaagaaaatgcgcttaccatatgtgtctgctgcatttgctgcattggccgtcgttgctaccaccaacgctcgttctgagtgtacctctctgacgatcgatgacacacctgttggtacgtctttgatcaacattaccgcgactcccagatataatgttacggtccaaggcacaaatttcaacgctacaggtacggtgtctaacatcagcttttgcgacgtgcaagtctacctgacgcatggtgacgagggagatgaagttcggattgctgtatggcttcctcttagggagtggaatggccgcttcttgggcaccggaggtgccgggttcaacgccggcgtttttgacccggctctagctgaaggcgttgatgatggatttgcggccgctgcgacagatgctggcgtaggtctcaccggtgacccggaaccttgggccaactcaacacagttgaacattaattttgtgtatttgagtgtgcacgagatgacgataatagggaaaaccgtaacagcgaaattctatgatcgggatccgacctatagctatttccatggctgcagtcagggcggacgtcaaggatatgttgaggcagtccgttaccctgaagattacgatggaatttcggctcattccccagcgatcaactgggaccgccttctgccggggtttctatggccctacctgcaacagcttcaaacacctctcgcgtcttgtaagttcatggaaatcactgcagcgtccatctccgcttgtgatttgaacgacgggggcgatgatggactgatcgtctatccaccggactgcaacttcgatgctcagagtactgtcggcatggaggtctctacatgcgacagcaataaaatcatcaccggggaggaggccgacgtgtggaatagtatccgcgcagggccaaaagacaaggaggggaactcgttgtggtatggagtcgagccaggtaccgacatcacctttctcaccctggcgccattcccgtcgggagatcaatggttgaaagacttcattttgaggaatccagaatacgacacttcgagtctcacgtatgaagagtttttgaaagatttcagcgcatcgatgacggagttcgctgatctttgggggacgtctgacgccaacctcttaccgttcatgcaacacggcggaaagttgatcactttccacggttggtcagaccagtcaattcccggtaatagcacaattgaatactggaaccgtgtcagcgcggccatcagttcgcatacgccgaacttagcaacgaacaccgttgacgacttttaccgcctttttatggctcccggggttgggcattgtgctaattttgggtacggaccaggtcctctgaacataatagaaactctcgtcaactgggttgagaatcaacaagcacccgatacattatttgcagctgggtttgggcagacaagaaacttgtgccattatccacagcagttgaagtacagaggcgtcggaaaagtggaaaatgccgaaagttggacatgcgcctagtcgctagaattagaccatcgtaggcaaagagactttaagatctacctgttcgccgctgttcgttgatttgaagtgagatcgcaaattcatgatccaatgttgagtaacatgaatgaaagctagtacactgttgaaagtgtaaagggagtgtttgttgaaggagtagttgaaggtatcgtcattgcatgctctcgaaatgaatgactagcagaacgcagttccttttttgtc

SEQ ID NO: 9594 - DNA, 1026 bp, Muscodor strobelii
  misc_feature: SGI cDNA ID NO. 563006
  misc_feature: Encodes the peptide sequence at SEQ ID NO 9595
atggggattttcgatgtcaatatgccattgttgtatggagaagggagaaaagcctttgttcggctgcaggaggaaatactgaagagttcagaggaccacagtcttttcgcctggagatcttcagcagactcagcaattcgttttcaatatcgcgggctctttgctgagtctcctgacgaatttatcggctcggagagctttgaggctttcagaagtttgagcgcaagctcggtgccaatgagtgtaactaatagggggattcctttcacttctacaactgacttactaacgagagaacgaagcaaaggtgacgacaaggtcattcgagttggcctgaactgccgacgacaaggcgacttcaacaatgtcttgagtattgagctgacatcttgtggtggcgaccagtacgtgcgatcggatcccctcaatctagagaacataccatcctcgggtttagtccgaacattctacatcgcaaaagccattcacacaaatttattgcctatccttccttctctagaacgccagcacgccgtacacattgacatagccacgccgagtctcaaagtcgtcggtgtccacgggacaggactacgatattcagatgatttagagttgattgaactgggtccctggacagccgagaaggctggcttggaggttttagttccaggtgctgcaaaaagagtcctcgtgctcatatgggctgattacctatctacgatggggacctggagttacacggtggatggaatggcgtcgttgccagaacataccgcagcaaagttcaaatatgcaaagaaaccgaagacacaacaaagcggaaaatacatctactatgagcagtacagatctgtgcaagcgatcggcagacatggtaagatccaaggcttcgatatgttctgtcttaagctccaggggtgtcaactagcacggcgcttctttcgcgtgggtagcttcgagctcgttgcgcactcgccaaggcatcttgtgagctacctgcgagactcaattctcaatcggtaa

SEQ ID NO: 9595 - protein, 341 aa, Muscodor strobelii
  misc_feature: SGI Peptide ID NO. 563006
  misc_feature (1)..(168): NCBI GI: 238841528 Blast Desc: HET domain-containing protein [Microsporum canis CBS 113480]
  misc_feature (3)..(200): NCBI GI: 169614914 Blast Desc: SNOG_10608 [Phaeosphaeria nodorum SN15] gi|111060882|gb|EAT82002.1| SNOG_10608 [Phaeosphaeria nodorum SN15]
  misc_feature (1)..(87): NCBI GI: 121715886 Blast Desc: HET domain protein [Aspergillus clavatus NRRL 1] gi|119403709|gb|EAW14126.1| HET domain protein [Aspergillus clavatus NRRL 1]
  misc_feature (1)..(143): NCBI GI: 169605897 Blast Desc: SNOG_05981 [Phaeosphaeria nodorum SN15] gi|111065925|gb|EAT87045.1| SNOG_05981 [Phaeosphaeria nodorum SN15]
  misc_feature (1)..(200): NCBI GI: 238493477 Blast Desc: conserved [Aspergillus flavus NRRL3357] gi|220696469|gb|EED52811.1| conserved [Aspergillus flavus NRRL3357]
  misc_feature (1)..(162): NCBI GI: 85089805 Blast Desc: NCU10003 [Neurospora crassa OR74A] gi|28919442|gb|EAA28882.1| [Neurospora crassa OR74A]
  misc_feature (1)..(87): NCBI GI: 169780438 Blast Desc: [Aspergillus oryzae RIB40] gi|83773423|dbj|BAE63550.1| protein product [Aspergillus oryzae]
  misc_feature (1)..(87): NCBI GI: 169621807 Blast Desc: SNOG_14116 [Phaeosphaeria nodorum SN15] gi|111057233|gb|EAT78353.1| SNOG_14116 [Phaeosphaeria nodorum SN15]
  misc_feature (1)..(126): NCBI GI: 238486510 Blast Desc: ankyrin 2,3/unc44, [Aspergillus flavus NRRL3357] gi|220699372|gb|EED55711.1| ankyrin 2,3/unc44, [Aspergillus flavus NRRL3357]
  misc_feature (1)..(87): NCBI GI: 256721662 Blast Desc: NECHADRAFT_18017 [Nectria haematococca mpVI 77-13-4]
MGIFDVNMPLLYGEGRKAFVRLQEEILKSSEDHSLFAWRSSADSAIRFQYRGLFAESPDEFIGSESFEAFRSLSASSVPMSVTNRGIPFTSTTDLLTRERSKGDDKVIRVGLNCRRQGDFNNVLSIELTSCGGDQYVRSDPLNLENIPSSGLVRTFYIAKAIHTNLLPILPSLERQHAVHIDIATPSLKVVGVHGTGLRYSDDLELIELGPWTAEKAGLEVLVPGAAKRVLVLIWADYLSTMGTWSYTVDGMASLPEHTAAKFKYAKKPKTQQSGKYIYYEQYRSVQAIGRHGKIQGFDMFCLKLQGCQLARRFFRVGSFELVAHSPRHLVSYLRDSILNR

SEQ ID NO: 9596 - DNA, 1771 bp, Muscodor strobelii
  misc_feature: SGI EST ID NO. CUFF.22699.0
  misc_feature: Variant of the nucleotide sequence at SEQ ID NO 9594
tgatgttgttaggcgggatagacacgatggatttcgaaagattcaattgacctgcaaccaagctgctatggctgggctcgagtgggcgtgggttgacacgtgctgcatcgataaatcaagtagcgctgagctcagtgaagctataaattcaatgttcgcttggtatcgccaagctgatgtatgcttcgcctaccttgacgattggcctgatggtcctgatgattccgagttgtccactggagaggccttgtcccgctgtcgatggttttctcggggttttactctacaggagctcctcgcacccgagaacgtggaattctacattgacaatggcggacaatggcgaagcattggcacaaagaaggatctcttgacagacttgagcatggtgaccaggattgactggaacacgctcttgttcggtacgatgagcgatgtgaccattgctaaacgaatgtcctgggcagcagggcggaaaacccgcagagtggaggacattgcatactgtctaatggggattttcgatgtcaatatgccattgttgtatggagaagggagaaaagcctttgttcggctgcaggaggaaatactgaagagttcagaggaccacagtcttttcgcctggagatcttcagcagactcagcaattcgttttcaatatcgcgggctctttgctgagtctcctgacgaatttatcggctcggagagctttgaggctttcagaagtttgagcgcaagctcggtgccaatgagtgtaactaatagggggattcctttcacttctacaactgacttactaacgagagaacgaagcaaaggtgacgacaaggtcattcgagttggcctgaactgccgacgacaaggcgacttcaacaatgtcttgagtattgagctgacatcttgtggtggcgaccagtacgtgcgatcggatcccctcaatctagagaacataccatcctcgggtttagtccgaacattctacatcgcaaaagccattcacacaaatttattgcctatccttccttctctagaacgccagcacgccgtacacattgacatagccacgccgagtctcaaagtcgtcggtgtccacgggacaggactacgatattcagatgatttagagttgattgaactgggtccctggacagccgagaaggctggcttggaggttttagttccaggtgctgcaaaaagagtcctcgtgctcatatgggctgattacctatctacgatggggacctggagttacacggtggatggaatggcgtcgttgccagaacataccgcagcaaagttcaaatatgcaaagaaaccgaagacacaacaaagcggaaaatacatctactatgagcagtacagatctgtgcaagcgatcggcagacatggtaagatccaaggcttcgatatgttctgtcttaagctccaggggtgtcaactagcacggcgcttctttcgcgtgggtagcttcgagctcgttgcgcactcgccaaggcatcttgtgagctacctgcgagactcaattctcaatcggtaaacgttacatctttcgaatcacgataccacactggagagtactcatgaagtcgttgcgcagagtccagaacatggtaacagattttgtacagcatcaattgagctccgcccttacgaaattgagaatattggacaaggtcgcactggttggcgcgttcagcctctatttacgaataatgtgaaatgagccaattgattcaggtgccgtattcaaaaaaactcagttgtgtctcaa

SEQ ID NO: 9597 - DNA, 1653 bp, Muscodor strobelii
  misc_feature: SGI cDNA ID NO. 563007
  misc_feature: Encodes the peptide sequence at SEQ ID NO 9598
atgcgcctaatcaatgtccgcacgcttgagctacagcagttcgacgatgctgtccctccgtacgcaattctatcccacacctggaactctgacgaagtcacattcgagaatttccatgatgttgttaggcgggatagacacgatggatttcgaaagattcaattgacctgcaaccaagctgctatggctgggctcgagtgggcgtgggttgacacgtgctgcatcgataaatcaagtagcgctgagctcagtgaagctataaattcaatgttcgcttggtatcgccaagctgatgtatgcttcgcctaccttgacgattggcctgatggtcctgatgattccgagttgtccactggagaggccttgtcccgctgtcgatggttttctcggggttttactctacaggagctcctcgcacccgagaacgtggaattctacattgacaatggcggacaatggcgaagcattggcacaaagaaggatctcttgacagacttgagcatggtgaccaggattgactggaacacgctcttgttcggtacgatgagcgatgtgaccattgctaaacgaatgtcctgggcagcagggcggaaaacccgcagagtggaggacattgcatactgtctaatggggattttcgatgtcaatatgccattgttgtatggagaagggagaaaagcctttgttcggctgcaggaggaaatactgaagagttcagaggaccacagtcttttcgcctggagatcttcagcagactcagcaattcgttttcaatatcgcgggctctttgctgagtctcctgacgaatttatcggctcggagagctttgaggctttcagaagtttgagcgcaagctcggtgccaatgagtgtaactaatagggggattcctttcacttctacaactgacttactaacgagagaacgaagcaaaggtgacgacaaggtcattcgagttggcctgaactgccgacgacaaggcgacttcaacaatgtcttgagtattgagctgacatcttgtggtggcgaccagtacgtgcgatcggatcccctcaatctagagaacataccatcctcgggtttagtccgaacattctacatcgcaaaagccattcacacaaatttattgcctatccttccttctctagaacgccagcacgccgtacacattgacatagccacgccgagtctcaaagtcgtcggtgtccacgggacaggactacgatattcagatgatttagagttgattgaactgggtccctggacagccgagaaggctggcttggaggttttagttccaggtgctgcaaaaagagtcctcgtgctcatatgggctgattacctatctacgatggggacctggagttacacggtggatggaatggcgtcgttgccagaacataccgcagcaaagttcaaatatgcaaagaaaccgaagacacaacaaagcggaaaatacatctactatgagcagtacagatctgtgcaagcgatcggcagacatggtaagatccaaggcttcgatatgttctgtcttaagctccaggggtgtcaactagcacggcgcttctttcgcgtgggtagcttcgagctcgttgcgcactcgccaaggcatcttgtgagctacctgcgagactcaattctcaatcggtaa

SEQ ID NO: 9598 - protein, 550 aa, Muscodor strobelii
  misc_feature: SGI Peptide ID NO. 563007
  misc_feature (21)..(136): Pfam Id: PF06985 Pfam Desc: Heterokaryon incompatibility protein (HET)
  misc_feature (69)..(104): Pfam Id: PF06985 Pfam Desc: Heterokaryon incompatibility protein (HET)
  misc_feature (1)..(270): NCBI GI: 256722053 Blast Desc: NECHADRAFT_16940 [Nectria haematococca mpVI 77-13-4]
  misc_feature (1)..(361): NCBI GI: 46126619 Blast Desc: FG07687.1 [Gibberella zeae PH-1]
  misc_feature (1)..(296): NCBI GI: 169770123 Blast Desc: [Aspergillus oryzae RIB40] gi|83767390|dbj|BAE57529.1| protein product [Aspergillus oryzae]
  misc_feature (1)..(296): NCBI GI: 239611724 Blast Desc: HET domain-containing protein [Ajellomyces dermatitidis ER-3]
  misc_feature (1)..(296): NCBI GI: 169623337 Blast Desc: SNOG_14906 [Phaeosphaeria nodorum SN15] gi|160704965|gb|EAT77758.2| SNOG_14906 [Phaeosphaeria nodorum SN15]
  misc_feature (1)..(353): NCBI GI: 256720984 Blast Desc: NECHADRAFT_82249 [Nectria haematococca mpVI 77-13-4]
  misc_feature (1)..(364): NCBI GI: 169595686 Blast Desc: SNOG_00587 [Phaeosphaeria nodorum SN15] gi|111070962|gb|EAT92082.1| SNOG_00587 [Phaeosphaeria nodorum SN15]
  misc_feature (7)..(366): NCBI GI: 171677823 Blast Desc: protein product [Podospora anserina] gi|170936980|emb|CAP61638.1| protein product [Podospora anserina]
  misc_feature (1)..(270): NCBI GI: 256726184 Blast Desc: NECHADRAFT_94537 [Nectria haematococca mpVI 77-13-4]
  misc_feature (1)..(296): NCBI GI: 261201308 Blast Desc: HET domain-containing protein [Ajellomyces dermatitidis SLH14081] gi|239592113|gb|EEQ74694.1| HET domain-containing protein [Ajellomyces dermatitidis SLH14081]
MRLINVRTLELQQFDDAVPPYAILSHTWNSDEVTFENFHDVVRRDRHDGFRKIQLTCNQAAMAGLEWAWVDTCCIDKSSSAELSEAINSMFAWYRQADVCFAYLDDWPDGPDDSELSTGEALSRCRWFSRGFTLQELLAPENVEFYIDNGGQWRSIGTKKDLLTDLSMVTRIDWNTLLFGTMSDVTIAKRMSWAAGRKTRRVEDIAYCLMGIFDVNMPLLYGEGRKAFVRLQEEILKSSEDHSLFAWRSSADSAIRFQYRGLFAESPDEFIGSESFEAFRSLSASSVPMSVTNRGIPFTSTTDLLTRERSKGDDKVIRVGLNCRRQGDFNNVLSIELTSCGGDQYVRSDPLNLENIPSSGLVRTFYIAKAIHTNLLPILPSLERQHAVHIDIATPSLKVVGVHGTGLRYSDDLELIELGPWTAEKAGLEVLVPGAAKRVLVLIWADYLSTMGTWSYTVDGMASLPEHTAAKFKYAKKPKTQQSGKYIYYEQYRSVQAIGRHGKIQGFDMFCLKLQGCQLARRFFRVGSFELVAHSPRHLVSYLRDSILNR

SEQ ID NO: 9599 - DNA, 1771 bp, Muscodor strobelii; identical to SEQ ID NO: 9596
  misc_feature: SGI EST ID NO. CUFF.22699.0
  misc_feature: Variant of the nucleotide sequence at SEQ ID NO 9597

SEQ ID NO: 9600 - DNA, 2631 bp, Muscodor strobelii
  misc_feature: SGI cDNA ID NO. 563008
  misc_feature: Elevated expression when VOC is produced
  misc_feature: Encodes the peptide sequence at SEQ ID NO 9601
atgcagcctctaacatctgtaatcttggcctcagcttcggctggagcagtggctttagcagcctcaattgaagattgcccaggctatatcgcgtccaatgtggtcgaatcggaaggcaaactcacagcagacttgaccctcgccggaacggcttgcgacgtatacggcaaagaccttacaaatctgactcttctagttgagtatcaaacagatacaagacttcacgtgaagatttacgatccggctcttcaagtgtaccaaattcaagagtctctcttgccgcgaccatcaaacccaggtgtgctagcagcagactcagctatacagttcaatttgacggaagaaccattctctttctatatcagtcgctcggcatccggcgaagtccccggcgccgtcttgttcaataccagtggtagtcagctgattttcgaatcccaatatattaatctcaggactcaactgccgcaggatccaaacatctatggtcttggagagcactcagattcattcagactcccaacaaaggattataagcgtaccttgtggaactctgaatctccgttcatccccgccaacactaatctctatggatcccaccccaactatcttgagcatcgcggtgaaaatggaacacacggagtggctcttttgaacgctaatggcatggatgtcatcatcaatcaaacagagaccggtgatcaatatcttgaatacaatatacttggcggtgtcttcgacttctactttctgtatgggccaaatccttcagacgtcagtaaacaatatgcagaagtcgtcggattgcccgcgatgttctcgtattggacattcggttttcagcaatgcaaatacggctggtgggatgtcaacgagcaagctgaagtggttgggaactactcaactgcgaacattccgcttgaggttatgtgggccgatattgactatgactttacgacggatcccgaacgttttcctctcaaaaagatgagagaacttatcgaagttctacacaatcgaactcaaaaatacgtcatgatgattgatcctggtatccatcgcacagagaactactctacctacgttcggggaagcaaggcaagcgcattcatgaaagccgacgatggttccgattaccgcggtgtccaatgggcgggagaggttgtgtggccggattacttcggcgatacgacccaggattggtggacggacgaaatcattcgttttttcgatcccgagacaggattggacgttgacggtgtttggaacgacgagaacgaagtcggtaacttttgccccgacattacttgcgatcctgctcaatatgcagctgagcatggcaacccgccaataccgaccacgattccgcgcaatgatacgggcaggccaatccccggatttcctagcgatttccaaccgcagccctcggaaacgtcgtcgccttcagtagtgaggcgacagaattctcctggagatatgacaggattgccggatcgggatctcttttacccagcatatgcaatcggcaaccatcttggcaacttgagcaatggagctttgtggacgaacatcacaaatggcgacggaactgttcaatacgatactcataatctttacgggttgactatgatgaccgcaagtcgaaatgcgctcatcgagcgaaaacctcaatcacgtcccttcatcctttcgcgctcaacttttgccggcgctggcaatcgcgctgcccattggttcggcgacaacgcgtctatctgggagcattacagagcgacgatcagacagatgcttgcttttactgcagtccatgccatgccgatggtgggatctgatgtgtgcggattcaatgacgccgccgaagagtttatgtgcgcgcgctgggccatgttgggggcgttccagcccttctacaggaatcatgcggatatctcagcacctaaacaagagttttacatctggcccactgtgacagcagcagcgcagagagctattgatgcgcgatatcgtttacttgactacatctacacgggactgtaccgagcgagtagtgagggtgcggccgggacagccaaccccatgttcttcctatacccaagagatccgaacacgtttgctatccaaacacaatggttttacgggaatgcactgcttatctcccctgttgttgatgataactcaacatctgtcacctactacctacccgaagacatcttttacgacttctggactttcgaaaaggtcgttggcaccggcagtaacgtgacacaggacgacgttagcgcgattgacattcctatacatattcgcggaggcaccgtcctgccattacgtacggcgtcggcaaataccacgactcttgtgcgacaaaatgactttgagctgattgttgctcccggccatgatggtaccgcaaatggcgcgctatatctagatgatggtgatagcttggatgtagggagcgagtattcagatattctcttcacttgggatggcacgaagtttgtgtccaatggcacatttggatacacttccgatgttgcgatcgagagcatcaggttccttggtgatctcaacaccacaatggccggaccgttcagtttgaacgaagcatttcagttcactctcagctaa

SEQ ID NO: 9601 - protein, 876 aa, Muscodor strobelii
  misc_feature: SGI Peptide ID NO. 563008
  misc_feature (249)..(774): Pfam Id: PF01055 Pfam Desc: Glycosyl hydrolases family 31
  misc_feature (23)..(855): NCBI GI: 46115240 Blast Desc: FG03462.1 [Gibberella zeae PH-1]
  misc_feature (23)..(855): NCBI GI: 169781854 Blast Desc: [Aspergillus oryzae RIB40] gi|83774132|dbj|BAE64257.1| protein product [Aspergillus oryzae]
  misc_feature (23)..(855): NCBI GI: 238498682 Blast Desc: lysosomal alpha-glucosidase, [Aspergillus flavus NRRL3357] gi|220693850|gb|EED50195.1| lysosomal alpha-glucosidase, [Aspergillus flavus NRRL3357]
  misc_feature (13)..(855): NCBI GI: 256721674 Blast Desc: glycoside hydrolase family 31 [Nectria haematococca mpVI 77-13-4]
  misc_feature (4)..(855): NCBI GI: 255955263 Blast Desc: Pc21g13670 [Penicillium chrysogenum Wisconsin 54-1255] gi|211590095|emb|CAP96264.1| Pc21g13670 [Penicillium chrysogenum Wisconsin 54-1255]
  misc_feature (23)..(854): NCBI GI: 242217832 Blast Desc: alpha-glucosidase [Postia placenta Mad-698-R] gi|220726130|gb|EED80090.1| alpha-glucosidase [Postia placenta Mad-698-R]
  misc_feature (4)..(855): NCBI GI: 67903932 Blast Desc: AN8953.2 [Aspergillus nidulans FGSC A4] gi|13447612|dbj|BAB39856.1| alpha-glucosidase B [Emericella nidulans] gi|40744592|gb|EAA63748.1| AN8953.2 [Aspergillus FGSC B
  misc_feature (9)..(696): NCBI GI: 240274483 Blast Desc: alpha-glucosidase [Ajellomyces capsulatus H143]
  misc_feature (4)..(855): NCBI GI: 169868926 Blast Desc: CC1G_04876 [Coprinopsis cinerea okayama7#130] gi|116497871|gb|EAU80766.1| CC1G_04876 [Coprinopsis cinerea okayama7#130]
  misc_feature (15)..(855): NCBI GI: 169868898 Blast Desc: CC1G_04862 [Coprinopsis cinerea okayama7#130] gi|116497857|gb|EAU80752.1| CC1G_04862 [Coprinopsis cinerea okayama7#130]
  misc_feature (25)..(828): SWISSPROT Homolog: EC 3.2.1.20 Alpha-glucosidase
  misc_feature: Useful for introducing or modulating the production of volatile compounds
MQPLTSVILASASAGAVALAASIEDCPGYIASNVVESEGKLTADLTLAGTACDVYGKDLTNLTLLVEYQTDTRLHVKIYDPALQVYQIQESLLPRPSNPGVLAADSAIQFNLTEEPFSFYISRSASGEVPGAVLFNTSGSQLIFESQYINLRTQLPQDPNIYGLGEHSDSFRLPTKDYKRTLWNSESPFIPANTNLYGSHPNYLEHRGENGTHGVALLNANGMDVIINQTETGDQYLEYNILGGVFDFYFLYGPNPSDVSKQYAEVVGLPAMFSYWTFGFQQCKYGWWDVNEQAEVVGNYSTANIPLEVMWADIDYDFTTDPERFPLKKMRELIEVLHNRTQKYVMMIDPGIHRTENYSTYVRGSKASAFMKADDGSDYRGVQWAGEVVWPDYFGDTTQDWWTDEIIRFFDPETGLDVDGVWNDENEVGNFCPDITCDPAQYAAEHGNPPIPTTIPRNDTGRPIPGFPSDFQPQPSETSSPSVVRRQNSPGDMTGLPDRDLFYPAYAIGNHLGNLSNGALWTNITNGDGTVQYDTHNLYGLTMMTASRNALIERKPQSRPFILSRSTFAGAGNRAAHWFGDNASIWEHYRATIRQMLAFTAVHAMPMVGSDVCGFNDAAEEFMCARWAMLGAFQPFYRNHADISAPKQEFYIWPTVTAAAQRAIDARYRLLDYIYTGLYRASSEGAAGTANPMFFLYPRDPNTFAIQTQWFYGNALLISPVVDDNSTSVTYYLPEDIFYDFWTFEKVVGTGSNVTQDDVSAIDIPIHIRGGTVLPLRTASANTTTLVRQNDFELIVAPGHDGTANGALYLDDGDSLDVGSEYSDILFTWDGTKFVSNGTFGYTSDVAIESIRFLGDLNTTMAGPFSLNEAFQFTLS

SEQ ID NO: 9602 - DNA, 2741 bp, Muscodor strobelii
  misc_feature: SGI EST ID NO. CUFF.22848.0
  misc_feature: Variant of the nucleotide sequence at SEQ ID NO 9600
gatcctggtatccatcgcacagagaactactctacctacgttcggggaagcaaggcaagcgcattcatgaaagccgacgatggttccgattaccgcggtgtccaatgggcgggagaggttgtgtggccggattacttcggcgatacgacccaggattggtggacggacgaaatcattcgttttttcgatcccgagacaggattggacgttgacggtgtttggaacgacgagaacgaagtcggtaacttttgccccgacattacttgcgatcctgctcaatatgcagctgagcatggcaacccgccaataccgaccacgattccgcgcaatgatacgggcaggccaatccccggatttcctagcgatttccaaccgcagccctcggaaacgtcgtcgccttcagtagtgaggcgacagaattctcctggagatatgacaggattgccggatcgggatctcttttacccagcatatgcaatcggcaaccatcttggcaacttgagcaatggagctttgtggacgaacatcacaaatggcgacggaactgttcaatacgatactcataatctttacgggttgactatgatgaccgcaagtcgaaatgcgctcatcgagcgaaaacctcaatcacgtcccttcatcctttcgcgctcaacttttgccggcgctggcaatcgcgctgcccattggttcggcgacaacgcgtctatctgggagcattacagagcgacgatcagacagatgcttgcttttactgcagtccatgccatgccgatggtgggatctgatgtgtgcggattcaatgacgccgccgaagagtttatgtgcgcgcgctgggccatgttgggggcgttccagcccttctacaggaatcatgcggatatctcagcacctaaacaagagttttacatctggcccactgtgacagcagcagcgcagagagctattgatgcgcgatatcgtttacttgactacatctacacgggactgtaccgagcgagtagtgagggtgcggccgggacagccaaccccatgttcttcctatacccaagagatccgaacacgtttgctatccaaacacaatggttttacgggaatgcactgcttatctcccctgttgttgatgataactcaacatctgtcacctactacctacccgaagacatcttttacgacttctggactttcgaaaaggtcgttggcaccggcagtaacgtgacacaggacgacgttagcgcgattgacattcctatacatattcgcggaggcaccgtcctgccattacgtacggcgtcggcaaataccacgactcttgtgcgacaaaatgactttgagctgattgttgctcccggccatgatggtaccgcaaatggcgcgctatatctagatgatggtgatagcttggatgtagggagcgagtattcagatattctcttcacttgggatggcacgaagtttgtgtccaatggcacatttggatacacttccgatgttgcgatcgagagcatcaggttccttggtgatctcaacaccacaatggccggaccgttcagtttgaacgaagcatttcagttcactctcagctaacggggttgcgtacttctgttgcaggaatttatttcacagaaagaccactcttgtaaatagcaatacaattgcctgaataatttctttgtagcaatgtagtagtgaaaggccgtgtttctccatttaccattccgagatatgtcctgtaagacagaaatattgagaaataaggtagccaacttctatccctgatttgctgcgattcattacccatccgtgtaagtacatccttctaccagatgtggagatcgccctgtatctgcgtatgcagatgaaccgtagacaacaagggctttcaacagtacaaatttcaataaaagcggcctgaaccaataccttgaactctaagaaccatcgactccaatccgtgcaaagttacggcgaagtagtcatccggacagccaaattttcttcctgtctggccatggaaaagggcatgcccttctgctagatcgcgtcaaagatatcgcaacatcaggcaaagatgtctcttgtcagcagtagaaactcttagtacttaatcccgtgaaaaaataatactagcttcagagtctaaagaacagagatcaaacactgatagactaacacatatcttttctaaggagcaggacgatagccttgaggcgcaatattgggtgctcctgactggtctccggggggtaccatgccagattgtggcgaaccaacaggatacgaggttgcgagtccatactgagcggttccgggttgaactgacggtatcataccgggcatatgctggtgcaatgttaccctatgtgcttccgtctggccgtagatgtgagatgtgggatccgctgcgttataggatgcagaagctgtcgggtgaccatatgtagccccagaggggttggaatactgttggggctgctgctgtggaggcacaccgaacatttgaggcgttcgtggtcggggctgataaactgagtagcctccaatgtcggtattggctgctgcataagggtcatgcagaggcgagccacgtatgccaggaccttcagcagctccgaagttatcatcacgttcgctgcgttgctttgctattattgtcgagctaccacccttcgttttgcttagatactgttcgaaatgtgccatagtattctccacaacctgaaactgtctttcgttgagaa

SEQ ID NO: 9603 - DNA, 1146 bp, Muscodor strobelii
  misc_feature: SGI cDNA ID NO. 563009
  misc_feature: Encodes the peptide sequence at SEQ ID NO 9604
atgggcgacacatctgataagccagacaatgtggactcttcgcgcgacaaattcgtggagctacaccaagcacagaacagactcactgacttgggaattgacttgagtacgaaagttgataagttgagccatattgttacgaagcttaaacgtcgatcaagctggtcaagctcttcgtcgggcggttccgactctgaggacgatgaagacgactggaaacttggctacgaggataatgtcatatatgaggtccgaaatgtcgatttcgaacacttcaagaaccgttacagagaagacgatggcaaatattgcatcgaggtcctatacactgcctctgattactttgaagagattcgacgagaattgaaacgacgtggtgaagaagtagacgaggactgggaacccgaggaaaactacgaagattcagatgacgagaaaaatatgcgtgctgtcagaattcaatcgccatccatccttttcttcttgaatcatgttctcaaggacgcacttggtgtacactggagagcatggaaacgtcagactcgcacaactttctacccaccgttcaagtggtttgtttacgcgcatggtcatatgaaagagaaattacatgagctagagcaattccatttgcagacaacagcatcagaccaggaaagacgttcgcagacaattgcggaattggcgtcttcatttcagcaaaacactggagacgaacaaggagaaacaacaactacaacgcctcattctcgagtactttcatttggactttcaactaccaaagatacttctatggaatcggatattagtccttctgccaagctcccagaacgacaaatcttagaacgtgcgcttcttgaaagttaccagagcttgttagcgttgcgttgctacgtgaattttgtcgacgaacggatcatgccacaggtgactagactcaaatctcccgaaatatcgccaaaagaagttagattcgacgatctatatgatatgttcgaactaggagagctcgttgttatcaacagaccccaaggacctatagggtcgcaacaaccaccattgcatatcgcgagactatatcgcaaaaacatcgctgacatagataagcaaccaggacattccggtattgtaagtggtcacttctaa

SEQ ID NO: 9604 - protein, 381 aa, Muscodor strobelii
  misc_feature: SGI Peptide ID NO. 563009
  misc_feature (81)..(340): NCBI GI: 46114954 Blast Desc: FG03319.1 [Gibberella zeae PH-1]
  misc_feature (81)..(340): NCBI GI: 256724231 Blast Desc: [Nectria haematococca mpVI 77-13-4]
  misc_feature (83)..(343): NCBI GI: 119467011 Blast Desc: AAA family ATPase, [Neosartorya fischeri NRRL 181] gi|119405464|gb|EAW15415.1| AAA family ATPase, [Neosartorya fischeri NRRL 181]
  misc_feature (80)..(342): NCBI GI: 116203341 Blast Desc: CHGG_09555 [Chaetomium globosum CBS 148.51] gi|88178073|gb|EAQ85541.1| CHGG_09555 [Chaetomium globosum CBS 148.51]
  misc_feature (63)..(340): NCBI GI: 145237766 Blast Desc: An07g04480 [Aspergillus niger] gi|134076004|emb|CAK48198.1| protein product [Aspergillus niger]
  misc_feature (58)..(351): NCBI GI: 145602967 Blast Desc: MGG_04633 [Magnaporthe grisea 70-15] gi|145011309|gb|EDJ95965.1| MGG_04633 [Magnaporthe grisea 70-15]
  misc_feature (83)..(342): NCBI GI: 256725321 Blast Desc: NECHADRAFT_45867 [Nectria haematococca mpVI 77-13-4]
  misc_feature (57)..(220): NCBI GI: 171681389 Blast Desc: protein product [Podospora anserina] gi|170940653|emb|CAP65881.1| protein product [Podospora anserina]
  misc_feature (286)..(351): NCBI GI: 116201997 Blast Desc: CHGG_08883 [Chaetomium globosum CBS 148.51] gi|88177401|gb|EAQ84869.1| CHGG_08883 [Chaetomium globosum CBS 148.51]
MGDTSDKPDNVDSSRDKFVELHQAQNRLTDLGIDLSTKVDKLSHIVTKLKRRSSWSSSSSGGSDSEDDEDDWKLGYEDNVIYEVRNVDFEHFKNRYREDDGKYCIEVLYTASDYFEEIRRELKRRGEEVDEDWEPEENYEDSDDEKNMRAVRIQSPSILFFLNHVLKDALGVHWRAWKRQTRTTFYPPFKWFVYAHGHMKEKLHELEQFHLQTTASDQERRSQTIAELASSFQQNTGDEQGETTTTTPHSRVLSFGLSTTKDTSMESDISPSAKLPERQILERALLESYQSLLALRCYVNFVDERIMPQVTRLKSPEISPKEVRFDDLYDMFELGELVVINRPQGPIGSQQPPLHIARLYRKNIADIDKQPGHSGIVSGHF

SEQ ID NO: 9605 - DNA, 2525 bp, Muscodor strobelii
  misc_feature: SGI EST ID NO. CUFF.22853.0
  misc_feature: Variant of the nucleotide sequence at SEQ ID NO 9603
gtaacttgccgtctcacgacgagcgttttgggtgacgcgaatcatctccacgaccccgcccagaaatagaagacctgcatgaccaaatgcgtgaaaaataacgaggctgcgaccgtggaaaattaattgtaaccagggctcatgctgacgaagatacagtctccgttggtgcgaacacaaaatttcgaccatagtctcctcgcctttgctacatccgtctgatgattcggctcgcgcaattgatgaagaccattttcgcgtctccttcctgaagtcaccatgggcgacacatctgataagccagacaatgtggactcttcgcgcgacaaattcgtggagctacaccaagcacagaacagactcactgacttgggaattgacttgagtacgaaagttgataagttgagccatattgttacgaagcttaaacgtcgatcaagctggtcaagctcttcgtcgggcggttccgactctgaggacgatgaagacgactggaaacttggctacgaggataatgtcatatatgaggtccgaaatgtcgatttcgaacacttcaagaaccgttacagagaagacgatggcaaatattgcatcgaggtcctatacactgcctctgattactttgaagagattcgacgagaattgaaacgacgtggtgaagaagtagacgaggactgggaacccgaggaaaactacgaagattcagatgacgagaaaaatatgcgtgctgtcagaattcaatcgccatccatccttttcttcttgaatcatgttctcaaggacgcacttggtgtacactggagagcatggaaacgtcagactcgcacaactttctacccaccgttcaagtggtttgtttacgcgcatggtcatatgaaagagaaattacatgagctagagcaattccatttgcagacaacagcatcagaccaggaaagacgttcgcagacaattgcggaattggcgtcttcatttcagcaaaacactggagacgaacaaggagaaacaacaactacaacgcctcattctcgagtactttcatttggactttcaactaccaaagatacttctatggaatcggatattagtccttctgccaagctcccagaacgacaaatcttagaacgtgcgcttcttgaaagttaccagagcttgttagcgttgcgttgctacgtgaattttgtcgacgaacggatcatgccacaggtgactagactcaaatctcccgaaatatcgccaaaagaagttagattcgacgatctatatgatatgttcgaactaggagagctcgttgttatcaacagaccccaaggacctatagggtcgcaacaaccaccattgcatatcgcgagactatatcgcaaaaacatcgctgacatagataagcaaccaggacattccggtattattcaaatttcgaagaagaaaaaggcaagggagccgggtgtgagaaattcatttgtcattgtttgctataagatccatttcaacggccgagcttatgtgcccgttcctcgcgacgttcttttcacgttctatgaaggcaagaaagtcctagaatcgctgcctgcaatcccattgcgatacctcaaggatctggaacagcgataccacctcaactctgaaagctcaattgccaacatgaaagaccacgggcgaaccttcttaaaagctgtgaagcttaagcatgtggtatatcgcgggtggagctgcgtagcacctcctcctccacaacctcaaaccgggccaggacgtccaggacaacacccaccaggcatgcgccctggcggcggtgtgccgctgccatcatatgaaacaaggtatagtgtgccaataggaactgaaggagttaacagcgctgtgaaagtagactatatcgagagcaatgccataatcgatgtctctgagacaattcggacactgccacattggaacatcgaacctggaataactccagcaccactcaacaaggctagcagttggtcttggggtatggattccatggatatcatacactgggcagaccggcatcgtaaagccaaggtatcgagcatccgcgatcgaacactgtccgaagacgggataggccacattgaatcgtctgcatggctggcacaagacaattttactcgcccatgcaaagaccccaacttcgaagacgaagatctcttattgcttccaaatacgatctatgcttatgcactccgggaccgaaagttctttgttggatacacgcaaaacttcggggagattccgacagaggacaatcccttcgacagcttgaaaatcaatcctgaacatatcttgatagtgcaatccgtcgtttcatctcattttcagcgtaaaacaatggagtcattgccagattttcaacctcaaatggaccaggacttaatacgaggaaagggaagaggtctcgtgatgttacttcatggagcaccgggagtcggcaagaccgcgacagcagaggcagtagcgttatggcatcgtaaaccactttttgtcattacatgcggcgatctcgg

SEQ ID NO: 9606 - DNA, 3297 bp, Muscodor strobelii
  misc_feature: SGI cDNA ID NO. 563010
  misc_feature: Encodes the peptide sequence at SEQ ID NO 9607
atgggcgacacatctgataagccagacaatgtggactcttcgcgcgacaaattcgtggagctacaccaagcacagaacagactcactgacttgggaattgacttgagtacgaaagttgataagttgagccatattgttacgaagcttaaacgtcgatcaagctggtcaagctcttcgtcgggcggttccgactctgaggacgatgaagacgactggaaacttggctacgaggataatgtcatatatgaggtccgaaatgtcgatttcgaacacttcaagaaccgttacagagaagacgatggcaaatattgcatcgaggtcctatacactgcctctgattactttgaagagattcgacgagaattgaaacgacgtggtgaagaagtagacgaggactgggaacccgaggaaaactacgaagattcagatgacgagaaaaatatgcgtgctgtcagaattcaatcgccatccatccttttcttcttgaatcatgttctcaaggacgcacttggtgtacactggagagcatggaaacgtcagactcgcacaactttctacccaccgttcaagtggtttgtttacgcgcatggtcatatgaaagagaaattacatgagctagagcaattccatttgcagacaacagcatcagaccaggaaagacgttcgcagacaattgcggaattggcgtcttcatttcagcaaaacactggagacgaacaaggagaaacaacaactacaacgcctcattctcgagtactttcatttggactttcaactaccaaagatacttctatggaatcggatattagtccttctgccaagctcccagaacgacaaatcttagaacgtgcgcttcttgaaagttaccagagcttgttagcgttgcgttgctacgtgaattttgtcgacgaacggatcatgccacaggtgactagactcaaatctcccgaaatatcgccaaaagaagttagattcgacgatctatatgatatgttcgaactaggagagctcgttgttatcaacagaccccaaggacctatagggtcgcaacaaccaccattgcatatcgcgagactatatcgcaaaaacatcgctgacatagataagcaaccaggacattccggtattattcaaatttcgaagaagaaaaaggcaagggagccgggtgtgagaaattcatttgtcattgtttgctataagatccatttcaacggccgagcttatgtgcccgttcctcgcgacgttcttttcacgttctatgaaggcaagaaagtcctagaatcgctgcctgcaatcccattgcgatacctcaaggatctggaacagcgataccacctcaactctgaaagctcaattgccaacatgaaagaccacgggcgaaccttcttaaaagctgtgaagcttaagcatgtggtatatcgcgggtggagctgcgtagcacctcctcctccacaacctcaaaccgggccaggacgtccaggacaacacccaccaggcatgcgccctggcggcggtgtgccgctgccatcatatgaaacaaggtatagtgtgccaataggaactgaaggagttaacagcgctgtgaaagtagactatatcgagagcaatgccataatcgatgtctctgagacaattcggacactgccacattggaacatcgaacctggaataactccagcaccactcaacaaggctagcagttggtcttggggtatggattccatggatatcatacactgggcagaccggcatcgtaaagccaaggtatcgagcatccgcgatcgaacactgtccgaagacgggataggccacattgaatcgtctgcatggctggcacaagacaattttactcgcccatgcaaagaccccaacttcgaagacgaagatctcttattgcttccaaatacgatctatgcttatgcactccgggaccgaaagttctttgttggatacacgcaaaacttcggggagattccgacagaggacaatcccttcgacagcttgaaaatcaatcctgaacatatcttgatagtgcaatccgtcgtttcatctcattttcagcgtaaaacaatggagtcattgccagattttcaacctcaaatggaccaggacttaatacgaggaaagggaagaggtctcgtgatgttacttcatggagcaccgggagtcggcaagaccgcgacagcagaggcagggttcactccggagaaggttgaatcgtccctcggagaaatctttagattagcgcacttatggaactgtatcctgctattagacgaggcagatgtgtttctgtctcagcgagaagcgaatgccttggagcggaatgcgctggtctcggttttcctaagagttctagagtactacaacggcatcctttttcttactacgaaccgtgtcggcactcttgatgaagccttcagatctagagtccatctttctctctattatccggcactcgacaaggagcaaacgaagcaaataatgcagatgaacttgagccggttggctactattgaaaaacacagagctgaactcttgaaccagaaagagatgatcatctacgagaaaaacatttgcgattttgttgtcaagcattggaccaaacatgaaggaaagaaagagggccgatggaatggacggcaaattcgaaatgctgttcagattgcagcctcactcgctctctacgagactcacagccaaattgaccaggttccaggagcccaagaccttcctccgattctcaacgaaagacagtttcaggttgtggagaatactatggcacatttcgaacagtatctaagcaaaacgaagggtggtagctcgacaataatagcaaagcaacgcagcgaacgtgatgataacttcggagctgctgaaggtcctggcatacgtggctcgcctctgcatgacccttatgcagcagccaataccgacattggaggctactcagtttatcagccccgaccacgaacgcctcaaatgttcggtgtgcctccacagcagcagccccaacagtattccaacccctctggggctacatatggtcacccgacagcttctgcatcctataacgcagcggatcccacatctcacatctacggccagacggaagcacatagggtaacattgcaccagcatatgcccggtatgataccgtcagttcaacccggaaccgctcagtatggactcgcaacctcgtatcctgttggttcgccacaatctggcatggtaccccccggagaccagtcaggagcacccaatattgcgcctcaaggctatcgtcctgctccttag

SEQ ID NO: 9607 - protein, 1098 aa, Muscodor strobelii
  misc_feature: SGI Peptide ID NO. 563010
  misc_feature (714)..(865): Pfam Id: PF00004 Pfam Desc: ATPase family associated with various cellular activities (AAA)
  misc_feature (81)..(956): NCBI GI: 46114954 Blast Desc: FG03319.1 [Gibberella zeae PH-1]
  misc_feature (81)..(940): NCBI GI: 256724231 Blast Desc: [Nectria haematococca mpVI 77-13-4]
  misc_feature (83)..(960): NCBI GI: 119467011 Blast Desc: AAA family ATPase, [Neosartorya fischeri NRRL 181] gi|119405464|gb|EAW15415.1| AAA family ATPase, [Neosartorya fischeri NRRL 181]
  misc_feature (63)..(1027): NCBI GI: 145237766 Blast Desc: An07g04480 [Aspergillus niger] gi|134076004|emb|CAK48198.1| protein product [Aspergillus niger]
  misc_feature (291)..(956): NCBI GI: 256726318 Blast Desc: NECHADRAFT_43342 [Nectria haematococca mpVI 77-13-4]
  misc_feature (287)..(1025): NCBI GI: 171681389 Blast Desc: protein product [Podospora anserina] gi|170940653|emb|CAP65881.1| protein product [Podospora anserina]
  misc_feature (83)..(1031): NCBI GI: 256725321 Blast Desc: NECHADRAFT_45867 [Nectria haematococca mpVI 77-13-4]
  misc_feature (286)..(964): NCBI GI: 116201997 Blast Desc: CHGG_08883 [Chaetomium globosum CBS 148.51] gi|88177401|gb|EAQ84869.1| CHGG_08883 [Chaetomium globosum CBS 148.51]
  misc_feature (80)..(1019): NCBI GI: 116203341 Blast Desc: CHGG_09555 [Chaetomium globosum CBS 148.51] gi|88178073|gb|EAQ85541.1| CHGG_09555 [Chaetomium globosum CBS 148.51]
  misc_feature (269)..(938): NCBI GI: 67526315 Blast Desc: AN3615.2 [Aspergillus nidulans FGSC A4] gi|40740633|gb|EAA59823.1| AN3615.2 [Aspergillus nidulans FGSC A4] gi|259481858|tpe|CBF75772.1| TPA: conserved [Aspergillus FGSC
MGDTSDKPDNVDSSRDKFVELHQAQNRLTDLGIDLSTKVDKLSHIVTKLKRRSSWSSSSSGGSDSEDDEDDWKLGYEDNVIYEVRNVDFEHFKNRYREDDGKYCIEVLYTASDYFEEIRRELKRRGEEVDEDWEPEENYEDSDDEKNMRAVRIQSPSILFFLNHVLKDALGVHWRAWKRQTRTTFYPPFKWFVYAHGHMKEKLHELEQFHLQTTASDQERRSQTIAELASSFQQNTGDEQGETTTTTPHSRVLSFGLSTTKDTSMESDISPSAKLPERQILERALLESYQSLLALRCYVNFVDERIMPQVTRLKSPEISPKEVRFDDLYDMFELGELVVINRPQGPIGSQQPPLHIARLYRKNIADIDKQPGHSGIIQISKKKKAREPGVRNSFVIVCYKIHFNGRAYVPVPRDVLFTFYEGKKVLESLPAIPLRYLKDLEQRYHLNSESSIANMKDHGRTFLKAVKLKHVVYRGWSCVAPPPPQPQTGPGRPGQHPPGMRPGGGVPLPSYETRYSVPIGTEGVNSAVKVDYIESNAIIDVSETIRTLPHWNIEPGITPAPLNKASSWSWGMDSMDIIHWADRHRKAKVSSIRDRTLSEDGIGHIESSAWLAQDNFTRPCKDPNFEDEDLLLLPNTIYAYALRDRKFFVGYTQNFGEIPTEDNPFDSLKINPEHILIVQSVVSSHFQRKTMESLPDFQPQMDQDLIRGKGRGLVMLLHGAPGVGKTATAEAGFTPEKVESSLGEIFRLAHLWNCILLLDEADVFLSQREANALERNALVSVFLRVLEYYNGILFLTTNRVGTLDEAFRSRVHLSLYYPALDKEQTKQIMQMNLSRLATIEKHRAELLNQKEMIIYEKNICDFVVKHWTKHEGKKEGRWNGRQIRNAVQIAASLALYETHSQIDQVPGAQDLPPILNERQFQVVENTMAHFEQYLSKTKGGSSTIIAKQRSERDDNFGAAEGPGIRGSPLHDPYAAANTDIGGYSVYQPRPRTPQMFGVPPQQQPQQYSNPSGATYGHPTASASYNAADPTSHIYGQTEAHRVTLHQHMPGMIPSVQPGTAQYGLATSYPVGSPQSGMVPPGDQSGAPNIAPQGYRPAP

SEQ ID NO: 9608 - DNA, 2525 bp, Muscodor strobelii; identical to SEQ ID NO: 9605
  misc_feature: SGI EST ID NO. CUFF.22853.0
  misc_feature: Variant of the nucleotide sequence at SEQ ID NO 9606

SEQ ID NO: 9609 - DNA, 1905 bp, Muscodor strobelii
  misc_feature: SGI cDNA ID NO. 563011
  misc_feature: Elevated expression when VOC is produced
  misc_feature: Encodes the peptide sequence at SEQ ID NO 9610
atggccacagcgaatctgccgcgtcctgcgtttgccacacttgcacgagtcgagcaagtggagaattggttccagtctgaggggggcaatgtgcatccagcctataacgaggaatcgtattggctcaccgaggagcagcgtaaattgaagaaattattggtcttataccaaggacctcaaagtcttgccccgtcgtcgactcgccccacctttgatatatgtgattgttcctgggacgatgttttggctcaacttgagcttgccaaagcaagttgcataaccaacaatggaaaaggaaatcgcaaagccgaccggtttcttgctaaagcggcatcatatagtgagaaatggctcgatcttttacctgacgagtatgggttgtcggttgtgcgtggaggattagcgctagtgttttctactgcaacagcgaagatagagaatcgcgaaaagattgttcaagcatttgaagacattccagatatgattcgtacgattgagaccgcatgtaaaatattccaatctgacgagaatgagaatatctctgcaatcgccaaaggattgtacgacggactatgcactgatatacctgacctgatacacattatagagggaaagggtccaaaatacaaaagatttttgaacagattagctgctggagtcccagagacccaaaagctcgacgacattctggatagagtcaagacacgatcgaaaagactagaaacgagtatcgagcggatcaaaatgaagttagatgcaaaacagagatcagatatattagctattcgtcagagcgccgaggcaacggatgcagcgctcggtgcaattaactacaaagtgtcgcagatccccaatcggagtgactgggaaatgtttgctcaaggaattggacaatactttatgcgagctatgcgccaagaattccaaagcagcatgcaggagatgctaaaagcacaggacaagggcgatctggctgctgaagcaaagacgcaagtcctcgtgatgattcaagaaaatcaacggttacagaccgagaatgctctactcctcgcccaaaatagacaaatcgaatacgatcgctcgcgtcaaccgtccccaatagcaggagtttctctgtcggctttcgacttgatgagaatcctagatatcgatgccaggcactcgattgaggatctagggtttgttctcaaacagtctttccgaatgggacccgaagaaacaggtcgcgcgcgctggctgatgagagtgactcaattccaatcatggattaacgggctgcatcaccacctccttatggcagatggaggaatgagattagagaagatctccccaatgtccatattcaccgccacaatggccacaagcctactcgaggtgccatcggccatcgtcctacatttcttctgcggcaggaacctcgatccagacgcagaagatgagacacctggcccacaaggaatacttcggagtctgatctcacaactcctcttgcacttcacacctccggccccacatctcaccgcaataaatacccccgagttcctgcgcgacctccaaaactgggatttccgcgctctcagcgaagtcctacggatcctcataacacaactctctccttcaactacactctacatcctcctcgatggaatttcctattacgagcaagaccattggctctccgaactacaataccttgtcggactattccgacacctgatgtccagccctaaagggccatatctcaagatcttgataacgaatgctggcagaagtacagaaatcaaagacatgttgaatttggagtgggagtatgtttcgcttgcagctgggaatattgattatatgcctcttgtttcgccttctatcttggaagctttgtcgtctagtcctggtcctcgggtttga

SEQ ID NO: 9610 - protein, 634 aa, Muscodor strobelii
  misc_feature: SGI Peptide ID NO. 563011
  misc_feature (73)..(624): NCBI GI: 256725915 Blast Desc: NECHADRAFT_82103 [Nectria haematococca mpVI 77-13-4]
  misc_feature (119)..(618): NCBI GI: 242816998 Blast Desc: TSTA_052730 [Talaromyces stipitatus ATCC 10500] gi|218713328|gb|EED12752.1| TSTA_052730 [Talaromyces stipitatus ATCC 10500]
  misc_feature (23)..(613): NCBI GI: 145237768 Blast Desc: An07g04490 [Aspergillus niger] gi|134076005|emb|CAK48199.1| protein product [Aspergillus niger]
  misc_feature (21)..(600): NCBI GI: 67522266 Blast Desc: AN1590.2 [Aspergillus nidulans FGSC A4] gi|40745141|gb|EAA64297.1| AN1590.2 [Aspergillus nidulans FGSC A4] gi|259486921|tpe|CBF85173.1| TPA: conserved [Aspergillus FGSC
  misc_feature (78)..(596): NCBI GI: 171681387 Blast Desc: protein product [Podospora anserina] gi|170940652|emb|CAP65880.1| protein product [Podospora anserina]
  misc_feature (70)..(612): NCBI GI: 256725449 Blast Desc: NECHADRAFT_83084 [Nectria haematococca mpVI 77-13-4]
  misc_feature (101)..(591): NCBI GI: 145228711 Blast Desc: An01g02260 [Aspergillus niger] gi|134054756|emb|CAK43596.1| protein product [Aspergillus niger]
  misc_feature (78)..(611): NCBI GI: 116203339 Blast Desc: CHGG_09554 [Chaetomium globosum CBS 148.51] gi|88178072|gb|EAQ85540.1| CHGG_09554 [Chaetomium globosum CBS 148.51]
  misc_feature (55)..(590): NCBI GI: 145602965 Blast Desc: [Magnaporthe grisea 70-15] gi|145011308|gb|EDJ95964.1| [Magnaporthe grisea 70-15]
  misc_feature (390)..(591): NCBI GI: 159122744 Blast Desc: AFUB_097190 [Aspergillus fumigatus A1163]
  misc_feature: Useful for introducing or modulating the production of volatile compounds
MATANLPRPAFATLARVEQVENWFQSEGGNVHPAYNEESYWLTEEQRKLKKLLVLYQGPQSLAPSSTRPTFDICDCSWDDVLAQLELAKASCITNNGKGNRKADRFLAKAASYSEKWLDLLPDEYGLSVVRGGLALVFSTATAKIENREKIVQAFEDIPDMIRTIETACKIFQSDENENISAIAKGLYDGLCTDIPDLIHIIEGKGPKYKRFLNRLAAGVPETQKLDDILDRVKTRSKRLETSIERIKMKLDAKQRSDILAIRQSAEATDAALGAINYKVSQIPNRSDWEMFAQGIGQYFMRAMRQEFQSSMQEMLKAQDKGDLAAEAKTQVLVMIQENQRLQTENALLLAQNRQIEYDRSRQPSPIAGVSLSAFDLMRILDIDARHSIEDLGFVLKQSFRMGPEETGRARWLMRVTQFQSWINGLHHHLLMADGGMRLEKISPMSIFTATMATSLLEVPSAIVLHFFCGRNLDPDAEDETPGPQGILRSLISQLLLHFTPPAPHLTAINTPEFLRDLQNWDFRALSEVLRILITQLSPSTTLYILLDGISYYEQDHWLSELQYLVGLFRHLMSSPKGPYLKILITNAGRSTEIKDMLNLEWEYVSLAAGNIDYMPLVSPSILEALSSSPGPRV

SEQ ID NO: 9611 - DNA, 2276 bp, Muscodor strobelii
  misc_feature: SGI EST ID NO. CUFF.22885.0
  misc_feature: Variant of the nucleotide sequence at SEQ ID NO 9609
gagctgagtcgacgcatttgggggcggaattacctgcataaacatcatgggtcctatccgttgaggggcgggaactacatactctatcccaactcgtcctttcgtctttagcttcgcattattcaaatacatagcacaagaccgcattgcgaaggtccctgatacagtatatcaagcttcagatggccacagcgaatctgccgcgtcctgcgtttgccacacttgcacgagtcgagcaagtggagaattggttccagtctgaggggggcaatgtgcatccagcctataacgaggaatcgtattggctcaccgaggagcagcggtttgcgtcaggacaagagccttcaatacataaattgaagaaattattggtcttataccaaggacctcaaagtcttgccccgtcgtcgactcgccccacctttgatatatgtgattgttcctgggacgatgttttggctcaacttgagcttgccaaagcaagttgcataaccaacaatggaaaaggaaatcgcaaagccgaccggtttcttgctaaagcggcatcatatagtgagaaatggctcgatcttttacctgacgagtatgggttgtcggttgtgcgtggaggattagcgctagtgttttctactgcaacagcgaagatagagaatcgcgaaaagattgttcaagcatttgaagacattccagatatgattcgtacgattgagaccgcatgtaaaatattccaatctgacgagaatgagaatatctctgcaatcgccaaaggattgtacgacggactatgcactgatatacctgacctgatacacattatagagggaaagggtccaaaatacaaaagatttttgaacagattagctgctggagtcccagagacccaaaagctcgacgacattctggatagagtcaagacacgatcgaaaagactagaaacgagtatcgagcggatcaaaatgaagttagatgcaaaacagagatcagatatattagctattcgtcagagcgccgaggcaacggatgcagcgctcggtgcaattaactacaaagtgtcgcagatccccaatcggagtgactgggaaatgtttgctcaaggaattggacaatactttatgcgagctatgcgccaagaattccaaagcagcatgcaggagatgctaaaagcacaggacaagggcgatctggctgctgaagcaaagacgcaagtcctcgtgatgattcaagaaaatcaacggttacagaccgagaatgctctactcctcgcccaaaatagacaaatcgaatacgatcgctcgcgtcaaccgtccccaatagcaggagtttctctgtcggctttcgacttgatgagaatcctagatatcgatgccaggcactcgattgaggatctagggtttgttctcaaacagtctttccgaatgggacccgaagaaacaggtcgcgcgcgctggctgatgagagtgactcaattccaatcatggattaacgggctgcatcaccacctccttatggcagatggaggaatgagattagagaagatctccccaatgtccatattcaccgccacaatggccacaagcctactcgaggtgccatcggccatcgtcctacatttcttctgcggcaggaacctcgatccagacgcagaagatgagacacctggcccacaaggaatacttcggagtctgatctcacaactcctcttgcacttcacacctccggccccacatctcaccgcaataaatacccccgagttcctgcgcgacctccaaaactgggatttccgcgctctcagcgaagtcctacggatcctcataacacaactctctccttcaactacactctacatcctcctcgatggaatttcctattacgagcaagaccattggctctccgaactacaataccttgtcggactattccgacacctgatgtccagccctaaagggccatatctcaagatcttgataacgaatgctggcagaagtacagaaatcaaagacatgttgaatttggagtgggagtatgtttcgcttgcagctgggaatattgattatatgcctcttgtttcgccttctatcttggaagctttgtcgtctagtcctggtcctcgggtttgagggtacgattggttacgagggggcacttgattgactgaagttccactgtgttaggtttacgctaaacacttctcaactagttccataaaccatgtattgacaatgattcggctcttgctactaaatgaggcagtacactcatcgtgcgccacatatacc

SEQ ID NO: 9612 - DNA, 1506 bp, Muscodor strobelii
  misc_feature: SGI cDNA ID NO. 563012
  misc_feature: Encodes the peptide sequence at SEQ ID NO 9613
atgtccgcccctcaccaagacgaaaacgaaatggacgatgcgcccgagctcctcgacgccgacgacgcagccgaggaatacaacgacggcgacggcgacatagcgatggactccgacgacgaagaccaaatagaaatcaacatacaaaacgacagcatcgcctacttcgacgcccacaaagactccatattcgccatcgcccaacaccccacacaaccctctctcatcgcaaccggtggcggcgaaggagaaggagacgatgcgcctggaaagggctatgtcttcgacacaagtcccgtcgtcggtagaccggtgttacccgcgagttataatgcagatcccagcgcttcacaacaacagagtacgcagttacagccgttattcgagattgatgggcatacggactcgattagtgtgctagcgttcacgtacccgaatggagagtttttggtttcgagtggcatggatgggagattgagagcttatcagttatcggtcgatggtcggaataaagcgacttttacatttgttggggaggcgcaggaggtgcccgagatcaactggcttgcgccttgtcctgtcgatgcgagctcgcagatcgctgtaccaaatacggtcgcgctgggtgcttctgatggctctgtatgggtctacacgtttgatgcgagcgataaggcgaatccgctacagattgttcagagctacttcttgcatacggagtcatgtacggccggcgcttggtcaccggatgggaaattcctcgctacggtatcggaagacagtacattgaacgtttgggatgtttggggtgaggctgctgctaagggactcacgaacgataatggccagacggtggtctctctcacacctactgatcagcggttcgcggtcgagggcggtctttactcagtcgcaattgaccccaagacgtccttcgtcgctgttggcggcgcaggaggtgctattaagatcgtcagtctgcctcgattaggcgtcgatagccatgctgctactagcaagcagagcaagtcaaaagcgaagggtgcagatgcaggcggtagccagggaggaacgatcttggcagatctacatacacaagccgacggcatagagactctctctttctcacccagcaacccactcctcgcagccggtagtgtagacggaagtatagcggtctacgacacgtcgcggaggtttgcagtacgacgtcacatcaaagaagctcatttctccgaaagcgagtctttcagtgtcgttaaggtggacttcgtgaaaggtcttggcgatggctggttattaacgagttgtggtacggacggtgttgtccggagatgggatgtccgtggtgccgctggttcaagtacgcagagtatggtgaaagagtggaaaggtcaccgaggtgagggtgagggtggtggcgtgttgggattcgtacagggtagcacgggcgagcggatagtgactgctggtgatgatggtgttgcgttgattttcgaggtttag

SEQ ID NO: 9613 - protein, 501 aa, Muscodor strobelii
  misc_feature: SGI Peptide ID NO. 563012
  misc_feature (229)..(267): Pfam Id: PF00400 Pfam Desc: WD domain, G-beta repeat
  misc_feature (357)..(395): Pfam Id: PF00400 Pfam Desc: WD domain, G-beta repeat
  misc_feature (124)..(163): Pfam Id: PF00400 Pfam Desc: WD domain, G-beta repeat
  misc_feature (5)..(500): NCBI GI: 85116536 Blast Desc: NCU02477 [Neurospora crassa OR74A] gi|28926873|gb|EAA35835.1| NCU02477 [Neurospora crassa OR74A]
  misc_feature (6)..(500): NCBI GI: 256727638 Blast Desc: [Nectria haematococca mpVI 77-13-4]
  misc_feature (2)..(500): NCBI GI: 171683213 Blast Desc: protein product [Podospora anserina] gi|170941566|emb|CAP67218.1| protein product [Podospora anserina]
  misc_feature (4)..(500): NCBI GI: 156040964 Blast Desc: SS1G_11460 [Sclerotinia sclerotiorum 1980] gi|154695844|gb|EDN95582.1| SS1G_11460 [Sclerotinia sclerotiorum 1980]
  misc_feature (4)..(500): NCBI GI: 154305289 Blast Desc: BC1G_08939 [Botryotinia fuckeliana B05.10] gi|150853681|gb|EDN28873.1| BC1G_08939 [Botryotinia fuckeliana B05.10]
  misc_feature (36)..(500): NCBI GI: 46136057 Blast Desc: FG09544.1 [Gibberella zeae PH-1]
  misc_feature (4)..(500): NCBI GI: 39971227 Blast Desc: MGG_03080 [Magnaporthe grisea 70-15] gi|149210821|ref|XP_001522785.1| MGCH7_ch7g883 [Magnaporthe grisea 70-15] gi|86196838|gb|EAQ71476.1| MGCH7_ch7g883 grisea
  misc_feature (5)..(500): NCBI GI: 38567112 Blast Desc: conserved [Neurospora crassa]
  misc_feature (1)..(500): NCBI GI: 239607641 Blast Desc: 60S ribosome biogenesis protein Sqt1 [Ajellomyces dermatitidis ER-3]
  misc_feature (4)..(500): NCBI GI: 115433178 Blast Desc: conserved [Aspergillus terreus NIH2624] gi|114189578|gb|EAU31278.1| conserved [Aspergillus terreus NIH2624]
MSAPHQDENEMDDAPELLDADDAAEEYNDGDGDIAMDSDDEDQIEINIQNDSIAYFDAHKDSIFAIAQHPTQPSLIATGGGEGEGDDAPGKGYVFDTSPVVGRPVLPASYNADPSASQQQSTQLQPLFEIDGHTDSISVLAFTYPNGEFLVSSGMDGRLRAYQLSVDGRNKATFTFVGEAQEVPEINWLAPCPVDASSQIAVPNTVALGASDGSVWVYTFDASDKANPLQIVQSYFLHTESCTAGAWSPDGKFLATVSEDSTLNVWDVWGEAAAKGLTNDNGQTVVSLTPTDQRFAVEGGLYSVAIDPKTSFVAVGGAGGAIKIVSLPRLGVDSHAATSKQSKSKAKGADAGGSQGGTILADLHTQADGIETLSFSPSNPLLAAGSVDGSIAVYDTSRRFAVRRHIKEAHFSESESFSVVKVDFVKGLGDGWLLTSCGTDGVVRRWDVRGAAGSSTQSMVKEWKGHRGEGEGGGVLGFVQGSTGERIVTAGDDGVALIFEV

SEQ ID NO: 9614 - DNA, 1915 bp, Muscodor strobelii
  misc_feature: SGI EST ID NO. CUFF.22888.0
  misc_feature: Variant of the nucleotide sequence at SEQ ID NO 9612
ccgaaaggcaacaaaaaaagttgaggtctgattatcaagcaattgtagcttgccttcgatagccatctacaatacaagtcttacaaattcagggcagtggcgcaagttcataagtcgcaggagcccagagtctaaaatcattgtcttttcccctccatttctttattcctgccgatcaccaaacgattgcatacacgtcacagtcccaagctagaggcaagatgtccgcccctcaccaagacgaaaacgaaatggacgatgcgcccgagctcctcgacgccgacgacgcagccgaggaatacaacgacggcgacggcgacatagcgatggactccgacgacgaagaccaaatagaaatcaacatacaaaacgacagcatcgcctacttcgacgcccacaaagactccatattcgccatcgcccaacaccccacacaaccctctctcatcgcaaccggtggcggcgaaggagaaggagacgatgcgcctggaaagggctatgtcttcgacacaagtcccgtcgtcggtagaccggtgttacccgcgagttataatgcagatcccagcgcttcacaacaacagagtacgcagttacagccgttattcgagattgatgggcatacggactcgattagtgtgctagcgttcacgtacccgaatggagagtttttggtttcgagtggcatggatgggagattgagagcttatcagttatcggtcgatggtcggaataaagcgacttttacatttgttggggaggcgcaggaggtgcccgagatcaactggcttgcgccttgtcctgtcgatgcgagctcgcagatcgctgtaccaaatacggtcgcgctgggtgcttctgatggctctgtatgggtctacacgtttgatgcgagcgataaggcgaatccgctacagattgttcagagctacttcttgcatacggagtcatgtacggccggcgcttggtcaccggatgggaaattcctcgctacggtatcggaagacagtacattgaacgtttgggatgtttggggtgaggctgctgctaagggactcacgaacgataatggccagacggtggtctctctcacacctactgatcagcggttcgcggtcgagggcggtctttactcagtcgcaattgaccccaagacgtccttcgtcgctgttggcggcgcaggaggtgctattaagatcgtcagtctgcctcgattaggcgtcgatagccatgctgctactagcaagcagagcaagtcaaaagcgaagggtgcagatgcaggcggtagccagggaggaacgatcttggcagatctacatacacaagccgacggcatagagactctctctttctcacccagcaacccactcctcgcagccggtagtgtagacggaagtatagcggtctacgacacgtcgcggaggtttgcagtacgacgtcacatcaaagaagctcatttctccgaaagcgagtctttcagtgtcgttaaggtggacttcgtgaaaggtcttggcgatggctggttattaacgagttgtggtacggacggtgttgtccggagatgggatgtccgtggtgccgctggttcaagtacgcagagtatggtgaaagagtggaaaggtcaccgaggtgagggtgagggtggtggcgtgttgggattcgtacagggtagcacgggcgagcggatagtgactgctggtgatgatggtgttgcgttgattttcgaggtttagggagtctagactacaatgcaaatcgaaagatcatcaagagtattgactgtgtttgccgtgaataacgagttcgtattggtgtttttcattgctcgggcttgtttcgcgaactataggaatctgacatgggtggtagtcatggattgtggcatttcgaggcggaacaaactagtatatgttaaagcggc

SEQ ID NO: 9615 - DNA, 1476 bp, Muscodor strobelii
  misc_feature: SGI cDNA ID NO. 563013
  misc_feature: Reduced expression when VOC is produced
  misc_feature: Encodes the peptide sequence at SEQ ID NO 9616
atggacgatgcgcccgagctcctcgacgccgacgacgcagccgaggaatacaacgacggcgacggcgacatagcgatggactccgacgacgaagaccaaatagaaatcaacatacaaaacgacagcatcgcctacttcgacgcccacaaagactccatattcgccatcgcccaacaccccacacaaccctctctcatcgcaaccggtggcggcgaaggagaaggagacgatgcgcctggaaagggctatgtcttcgacacaagtcccgtcgtcggtagaccggtgttacccgcgagttataatgcagatcccagcgcttcacaacaacagagtacgcagttacagccgttattcgagattgatgggcatacggactcgattagtgtgctagcgttcacgtacccgaatggagagtttttggtttcgagtggcatggatgggagattgagagcttatcagttatcggtcgatggtcggaataaagcgacttttacatttgttggggaggcgcaggaggtgcccgagatcaactggcttgcgccttgtcctgtcgatgcgagctcgcagatcgctgtaccaaatacggtcgcgctgggtgcttctgatggctctgtatgggtctacacgtttgatgcgagcgataaggcgaatccgctacagattgttcagagctacttcttgcatacggagtcatgtacggccggcgcttggtcaccggatgggaaattcctcgctacggtatcggaagacagtacattgaacgtttgggatgtttggggtgaggctgctgctaagggactcacgaacgataatggccagacggtggtctctctcacacctactgatcagcggttcgcggtcgagggcggtctttactcagtcgcaattgaccccaagacgtccttcgtcgctgttggcggcgcaggaggtgctattaagatcgtcagtctgcctcgattaggcgtcgatagccatgctgctactagcaagcagagcaagtcaaaagcgaagggtgcagatgcaggcggtagccagggaggaacgatcttggcagatctacatacacaagccgacggcatagagactctctctttctcacccagcaacccactcctcgcagccggtagtgtagacggaagtatagcggtctacgacacgtcgcggaggtttgcagtacgacgtcacatcaaagaagctcatttctccgaaagcgagtctttcagtgtcgttaaggtggacttcgtgaaaggtcttggcgatggctggttattaacgagttgtggtacggacggtgttgtccggagatgggatgtccgtggtgccgctggttcaagtacgcagagtatggtgaaagagtggaaaggtcaccgaggtgagggtgagggtggtggcgtgttgggattcgtacagggtagcacgggcgagcggatagtgactgctggtgatgatggtgttgcgttgattttcgaggtttag

SEQ ID NO: 9616 - protein, 491 aa, Muscodor strobelii
  misc_feature: SGI Peptide ID NO. 563013
  misc_feature (219)..(257): Pfam Id: PF00400 Pfam Desc: WD domain, G-beta repeat
  misc_feature (347)..(385): Pfam Id: PF00400 Pfam Desc: WD domain, G-beta repeat
  misc_feature (114)..(153): Pfam Id: PF00400 Pfam Desc: WD domain, G-beta repeat
  misc_feature (2)..(490): NCBI GI: 85116536 Blast Desc: NCU02477 [Neurospora crassa OR74A] gi|28926873|gb|EAA35835.1| NCU02477 [Neurospora crassa OR74A]
  misc_feature (6)..(490): NCBI GI: 256727638 Blast Desc: [Nectria haematococca mpVI 77-13-4]
  misc_feature (2)..(490): NCBI GI: 171683213 Blast Desc: protein product [Podospora anserina] gi|170941566|emb|CAP67218.1| protein product [Podospora anserina]
  misc_feature (2)..(490): NCBI GI: 156040964 Blast Desc: SS1G_11460 [Sclerotinia sclerotiorum 1980] gi|154695844|gb|EDN95582.1| SS1G_11460 [Sclerotinia sclerotiorum 1980]
  misc_feature (26)..(490): NCBI GI: 46136057 Blast Desc: FG09544.1 [Gibberella zeae PH-1]
  misc_feature (2)..(490): NCBI GI: 154305289 Blast Desc: BC1G_08939 [Botryotinia fuckeliana B05.10] gi|150853681|gb|EDN28873.1| BC1G_08939 [Botryotinia fuckeliana B05.10]
  misc_feature (2)..(490): NCBI GI: 39971227 Blast Desc: MGG_03080 [Magnaporthe grisea 70-15] gi|149210821|ref|XP_001522785.1| MGCH7_ch7g883 [Magnaporthe grisea 70-15] gi|86196838|gb|EAQ71476.1| MGCH7_ch7g883 grisea
  misc_feature (2)..(490): NCBI GI: 38567112 Blast Desc: conserved [Neurospora crassa]
  misc_feature (7)..(490): NCBI GI: 239607641 Blast Desc: 60S ribosome biogenesis protein Sqt1 [Ajellomyces dermatitidis ER-3]
  misc_feature (2)..(490): NCBI GI: 115433178 Blast Desc: conserved [Aspergillus terreus NIH2624] gi|114189578|gb|EAU31278.1| conserved [Aspergillus terreus NIH2624]
  misc_feature: Useful for introducing or modulating the production of volatile compounds
MDDAPELLDADDAAEEYNDGDGDIAMDSDDEDQIEINIQNDSIAYFDAHKDSIFAIAQHPTQPSLIATGGGEGEGDDAPGKGYVFDTSPVVGRPVLPASYNADPSASQQQSTQLQPLFEIDGHTDSISVLAFTYPNGEFLVSSGMDGRLRAYQLSVDGRNKATFTFVGEAQEVPEINWLAPCPVDASSQIAVPNTVALGASDGSVWVYTFDASDKANPLQIVQSYFLHTESCTAGAWSPDGKFLATVSEDSTLNVWDVWGEAAAKGLTNDNGQTVVSLTPTDQRFAVEGGLYSVAIDPKTSFVAVGGAGGAIKIVSLPRLGVDSHAATSKQSKSKAKGADAGGSQGGTILADLHTQADGIETLSFSPSNPLLAAGSVDGSIAVYDTSRRFAVRRHIKEAHFSESESFSVVKVDFVKGLGDGWLLTSCGTDGVVRRWDVRGAAGSSTQSMVKEWKGHRGEGEGGGVLGFVQGSTGERIVTAGDDGVALIFEV

SEQ ID NO: 9617 - DNA, 1915 bp, Muscodor strobelii; identical to SEQ ID NO: 9614
  misc_feature: SGI EST ID NO. CUFF.22888.0
  misc_feature: Variant of the nucleotide sequence at SEQ ID NO 9615

SEQ ID NO: 9618 - DNA, 1416 bp, Muscodor strobelii
  misc_feature: SGI cDNA ID NO. 563014
  misc_feature: Reduced expression when VOC is produced
  misc_feature: Encodes the peptide sequence at SEQ ID NO 9619
atggctgccagcacgaggactgagagcgatgcctttggcgagatccaggtgcccgccgacaagtattggggagcgcagaccgagcgttccctggagaacttccgcatcaaccagcctcaggatcgcatgccccctcccattgttaaggcattcggtattttgaagggagctgccgctactgtgaatatgcgctatggacttgacgagaagatcggcaaggccatccaacaagctgccgctgaggtcgccgagctcaaactcctcgaccactttcccctggttgtctggcagactggttcgggcactcagtccaacatgaacgccaacgaagtcatctccaaccgggccatcgagatcctcggcggcaccatgggctccaagaagcccgtccaccccaacgaccacgtcaaccgctccgcctcctccaacgacaccttccctaccgtcatgcacatcgccgccgtcctcgagatcgaacagtccctcatcccctccctcaagagcctgcgcgacgccctgcagaagaaggtcgacgactttgaggccaagaagatcatcaagatcggccgcacccacttgcaggatgctacacccttgaccctggcgcaagaattctctggctatgttgcgcaattggactttggcatcaagcgcgttgagagctctctccccgatctgagactgttggctcagggtggtaccgccgtcggcaccggtatcaacacattcgagggtttcgctgaggcgatcgccgaggaagtctccaagatgaccggtaccgagttcaagacagcccccaataagttcgaatccctcgccgcccacgacgccatcgtccaggcccacggctccctcaacaccctcgccgcatctcttaccaagattgcacaagacatccgatatctgggcagtggtccccgctgcggtctcggcgagttgaacctccccgagaacgagccaggttccagtatcatgcccggaaaggtcaaccccacgcagtgcgaggccttgactatggtctgcgcccaagtcatgggtaaccacgtcgctaccaccatcggtggcatgaacggtcaattcgaactcaacgtctacaagccccttgtcatccgcaacttgctccacagtgtcagaatactatctgatggcatgcgctccttcgagaagaaccttgtgcagggtcttcaggccaatgaggagaagattgctagcattatgaaagaatctctaatgcttgtaacctgtctcaaccctaagatcggctacgacatggcatccaaggttgccaagaatgcgcacaagaagggccttacgctcaaggacagcgctatggagctcaatgctcttaactccgaagactttgattctttggttaagcctgagcttatgattggtcctagcccgtacaagggttga

SEQ ID NO: 9619 - protein, 471 aa, Muscodor strobelii
  misc_feature: SGI Peptide ID NO. 563014
  misc_feature (13)..(346): Pfam Id: PF00206 Pfam Desc: Lyase
  misc_feature (6)..(464): NCBI GI: 1730118 Blast Desc: FUMH_RHIOR RecName: Full=Fumarate hydratase, mitochondrial; Short=Fumarase; Flags: Precursor gi|469103|emb|CAA55314.1| fumarase [Rhizopus oryzae]
  misc_feature (6)..(467): NCBI GI: 58264722 Blast Desc: fumarate hydratase [Cryptococcus neoformans var. neoformans JEC21] gi|134109905|ref|XP_776338.1| CNBC5560 [Cryptococcus neoformans var. neoformans B-3501A] CNBC5560 var.
  misc_feature (5)..(466): NCBI GI: 190345373 Blast Desc: PGUG_01341 [Pichia guilliermondii ATCC 6260]
  misc_feature (6)..(464): NCBI GI: 268037594 Blast Desc: fumarase [Rhizopus oryzae]
  misc_feature (6)..(468): NCBI GI: 254580013 Blast Desc: ZYRO0C07964p [Zygosaccharomyces rouxii] gi|238938883|emb|CAR27059.1| ZYRO0C07964p [Zygosaccharomyces rouxii]
  misc_feature (3)..(467): NCBI GI: 149238640 Blast Desc: fumarate hydratase, mitochondrial precursor [Lodderomyces elongisporus NRRL YB-4239] gi|146450689|gb|EDK44945.1| fumarate hydratase, mitochondrial
  misc_feature (5)..(466): NCBI GI: 241958588 Blast Desc: fumarase, ; fumarate hydratase, mitochondrial precursor, [Candida dubliniensis CD36] gi|223645358|emb|CAX40014.1| fumarase, ; fumarate hydratase,
  misc_feature (3)..(471): NCBI GI: 46128669 Blast Desc: FG08712.1 [Gibberella zeae PH-1]
  misc_feature (1)..(471): NCBI GI: 171684907 Blast Desc: protein product [Podospora anserina] gi|170942414|emb|CAP68066.1| protein product [Podospora anserina]
  misc_feature (3)..(471): NCBI GI: 256734100 Blast Desc: [Nectria haematococca mpVI 77-13-4]
  misc_feature (6)..(464): SWISSPROT Homolog: EC 4.2.1.2 Fumarate hydratase
  misc_feature: Useful for introducing or modulating the production of volatile compounds
MAASTRTESDAFGEIQVPADKYWGAQTERSLENFRINQPQDRMPPPIVKAFGILKGAAATVNMRYGLDEKIGKAIQQAAAEVAELKLLDHFPLVVWQTGSGTQSNMNANEVISNRAIEILGGTMGSKKPVHPNDHVNRSASSNDTFPTVMHIAAVLEIEQSLIPSLKSLRDALQKKVDDFEAKKIIKIGRTHLQDATPLTLAQEFSGYVAQLDFGIKRVESSLPDLRLLAQGGTAVGTGINTFEGFAEAIAEEVSKMTGTEFKTAPNKFESLAAHDAIVQAHGSLNTLAASLTKIAQDIRYLGSGPRCGLGELNLPENEPGSSIMPGKVNPTQCEALTMVCAQVMGNHVATTIGGMNGQFELNVYKPLVIRNLLHSVRILSDGMRSFEKNLVQGLQANEEKIASIMKESLMLVTCLNPKIGYDMASKVAKNAHKKGLTLKDSAMELNALNSEDFDSLVKPELMIGPSPYKG

SEQ ID NO: 9620 - DNA, 2152 bp, Muscodor strobelii
  misc_feature: SGI EST ID NO. CUFF.22742.0
  misc_feature: Variant of the nucleotide sequence at SEQ ID NO 9618
atttgtcgcattactgtttgattaccgtggttgttgtcgttttttcgcgcaacaccatttccgcgtagatcgcttgtaaaatttgtatattcatagcttcaatcttataaagctaccacctacacccatcgagaccatagctgcggtgtagaagtacccttttcacgccgcaacttcttcaattggcgttagacgttactgccgtttctcacgatccacactatccttccccaaaaaacgcagtcgcacttctggccgcattccagatccagcagccgcaacccgcagccatgtatcgatcggttcgagtttcagccggtgcagcccgaaacgtcgcggggccgaggaccgctgcacgggtgctttgcacatgcaagtactcgaccttctccccctcatcctccacactgtcgtcatatgcaacggttcgagcatcttcaacgcctcgtcacatttcacactcctccagcacaaacctaattcgatcgttccacgccacatctaccagaatggctgccagcacgaggactgagagcgatgcctttggcgagatccaggtgcccgccgacaagtattggggagcgcagaccgagcgttccctggagaacttccgcatcaaccagcctcaggatcgcatgccccctcccattgttaaggcattcggtattttgaagggagctgccgctactgtgaatatgcgctatggacttgacgagaagatcggcaaggccatccaacaagctgccgctgaggtcgccgagctcaaactcctcgaccactttcccctggttgtctggcagactggttcgggcactcagtccaacatgaacgccaacgaagtcatctccaaccgggccatcgagatcctcggcggcaccatgggctccaagaagcccgtccaccccaacgaccacgtcaaccgctccgcctcctccaacgacaccttccctaccgtcatgcacatcgccgccgtcctcgagatcgaacagtccctcatcccctccctcaagagcctgcgcgacgccctgcagaagaaggtcgacgactttgaggccaagaagatcatcaagatcggccgcacccacttgcaggatgctacacccttgaccctggcgcaagaattctctggctatgttgcgcaattggactttggcatcaagcgcgttgagagctctctccccgatctgagactgttggctcagggtggtaccgccgtcggcaccggtatcaacacattcgagggtttcgctgaggcgatcgccgaggaagtctccaagatgaccggtaccgagttcaagacagcccccaataagttcgaatccctcgccgcccacgacgccatcgtccaggcccacggctccctcaacaccctcgccgcatctcttaccaagattgcacaagacatccgatatctgggcagtggtccccgctgcggtctcggcgagttgaacctccccgagaacgagccaggttccagtatcatgcccggaaaggtcaaccccacgcagtgcgaggccttgactatggtctgcgcccaagtcatgggtaaccacgtcgctaccaccatcggtggcatgaacggtcaattcgaactcaacgtctacaagccccttgtcatccgcaacttgctccacagtgtcagaatactatctgatggcatgcgctccttcgagaagaaccttgtgcagggtcttcaggccaatgaggagaagattgctagcattatgaaagaatctctaatgcttgtaacctgtctcaaccctaagatcggctacgacatggcatccaaggttgccaagaatgcgcacaagaagggccttacgctcaaggacagcgctatggagctcaatgctcttaactccgaagactttgattctttggttaagcctgagcttatgattggtcctagcccgtacaagggttgaggatttggagattggcgactttggagattgggaaggaggtgcgagaaaagagtgtgtgaaaaaggttgtttcagcgttgcatatgcatagcatcgaaagagagacgaagaagaacttgaagtgtatacatacctagcttgcatacttagcatgcattaaaattgtagatataataatgttgagcataagttgaatgaagttaattgagttgcattttacatagggcg

SEQ ID NO: 9621 - DNA, 852 bp, Muscodor strobelii
  misc_feature: SGI cDNA ID NO. 563015
  misc_feature: Encodes the peptide sequence at SEQ ID NO 9622
atgagcgagataggcgttgcgcgtccgcgtggcgggctagagttccatgggaacggaattcaaaacacaggttcaatagctgttagcggagatattaatattgccgcaggatccagcgacgatgatattctccaaaagctgcgactgaccgaccctcatgatgataagtcacgaatcgagcaacagaaaggcggcttactttacgactcatacaaatggatactacagcatcaggactttcgcaaatggaatgatggtgaaggaggtcagcttttctggatcagtggagatcctggaaagggcaagacgatgttgctttgcggaatcatcgacgagttgagcaaagcacgcacggagaattacaatgtcgcatactacttctgtcaggctaccgattctaatctcaataaagaaatatctgtgttacgaggactactctattcactgatatcccagcgacaaagtttattggactacgtccgacgagaaatttccgatgcgagcgccaaggcattccaggacatcaacgcatcggttgccctttaccggatatttgatgttctaatccaagaaataaacaagcgacgacaaaagacttacctcattgtcgacgcactagacgagtgtttagagggtcaatcatctttattacagtggatttcccgactgtcgtcatcaaacctgaaagtactcgtatccagtcgcaattgggattctatcaaatatggtctaagcagcgcagcaaataaagtgccactagaacttgagctaaatactgcatctatctctgcggccgttgcttgctatattgattataaggtggctaaacttgcgcaggccaaggtcctttga

SEQ ID NO: 9622 - protein, 283 aa, Muscodor strobelii
  misc_feature: SGI Peptide ID NO. 563015
  misc_feature (90)..(273): Pfam Id: PF05729 Pfam Desc: NACHT domain
  misc_feature (90)..(235): Pfam Id: PF05729 Pfam Desc: NACHT domain
  misc_feature (35)..(281): NCBI GI: 226283410 Blast Desc: conserved [Paracoccidioides brasiliensis Pb01]
  misc_feature (40)..(278): NCBI GI: 17225206 Blast Desc: AF323583_1 beta transducin-like protein HET-E2C*4 [Podospora anserina]
  misc_feature (40)..(278): NCBI GI: 17225204 Blast Desc: AF323582_1 beta transducin-like protein HET-E2C [Podospora anserina]
  misc_feature (40)..(278): NCBI GI: 3023956 Blast Desc: HETE1_PODAN RecName: Full=Vegetative incompatibility protein HET-E-1 gi|607003|gb|AAA85775.1| beta transducin-like protein [Podospora anserina]
  misc_feature (40)..(278): NCBI GI: 17225208 Blast Desc: AF323584_1 beta transducin-like protein HET-E2C*40 [Podospora anserina]
  misc_feature (40)..(278): NCBI GI: 17225202 Blast Desc: AF323581_1 beta transducin-like protein HET-E4s [Podospora anserina]
  misc_feature (40)..(278): NCBI GI: 171677728 Blast Desc: protein product [Podospora anserina] gi|154936838|emb|CAL30215.1| HET-E [Podospora anserina] gi|170936932|emb|CAP61591.1| protein product [Podospora anserina]
  misc_feature (9)..(281): NCBI GI: 242759868 Blast Desc: Pfs, NACHT and WD domain protein [Talaromyces stipitatus ATCC 10500] gi|218723069|gb|EED22486.1| Pfs, NACHT and WD domain protein [Talaromyces stipitatus ATCC 10500]
  misc_feature (25)..(281): NCBI GI: 256724751 Blast Desc: NECHADRAFT_48128 [Nectria haematococca mpVI 77-13-4]
  misc_feature (44)..(278): NCBI GI: 154310124 Blast Desc: BC1G_06982 [Botryotinia fuckeliana B05.10] gi|150851543|gb|EDN26736.1| BC1G_06982 [Botryotinia fuckeliana B05.10]
MSEIGVARPRGGLEFHGNGIQNTGSIAVSGDINIAAGSSDDDILQKLRLTDPHDDKSRIEQQKGGLLYDSYKWILQHQDFRKWNDGEGGQLFWISGDPGKGKTMLLCGIIDELSKARTENYNVAYYFCQATDSNLNKEISVLRGLLYSLISQRQSLLDYVRREISDASAKAFQDINASVALYRIFDVLIQEINKRRQKTYLIVDALDECLEGQSSLLQWISRLSSSNLKVLVSSRNWDSIKYGLSSAANKVPLELELNTASISAAVACYIDYKVAKLAQAKVL

SEQ ID NO: 9623 - DNA, 1053 bp, Muscodor strobelii
  misc_feature: SGI cDNA ID NO. 563016
  misc_feature: Encodes the peptide sequence at SEQ ID NO 9624
atggcaaatgctcagcaagatcttgcaacagaatgcgatgccttggtcgccctcctcggcgctagtaaagtctacctccctgggtctgaatcatacaaggctccgtccggtgtgactattgatctccgcaaacttaacaccgtgggcgtgagtgccgactacaagagtgtttctgtcggggccggcgccacctggggagctgtttacggcaaactcgatactctcgggcttagtgttgctggagggcgtgtcgccgacgttggtgtcggaggcctaactctcggcggcggcatctcttattttgggctgcgcaaaggctggacatgtaatcaagtgatagcatttgaagtcgtgttagctgacggaaacatcgttgagacgaccgagacagagaattccgacctttggtgggcgcttcggggcggatccaataactttggtatcgtcacgcgtattgactaccgcacatttgaacggggtctcttatggtacaatatgactttcaacccgctgtccgtcgtcgaacagcaaatttccatctacgcggccctcatgtccccacaacaatacgatatcaacgcctcctacgtaatgggttgggcgttcgccgccaaacaaggtctcactgtctcactcaaccagctcatctacacgcggcctcatgccaatgacactccagcgtacttccgacgggttcttgccttgccgactataccggttcctggcttcgcggggagcatcgtaacgaacatgtcaacgcttgctgctaagtcagcgacactgcaacctcaccaagcagcacaactcataacgcatagcaacgcgacgctgatacatatggccgtatttggatacatgacggcaacgataacattcgagccaacagaagccatgataaaggagacatacgctaccttcaatgagtcgctcgcagaagtccgaagtataacgggaatttcctgggcactcaatctagagccactgccaccgcaactctacgaagcgcagggcgacgaagcgcagggcggatctagagtcaatgcctcagtctga

SEQ ID NO: 9624 - protein, 350 aa, Muscodor strobelii
  misc_feature: SGI Peptide ID NO. 563016
  misc_feature (2)..(128): Pfam Id: PF01565 Pfam Desc: FAD binding domain
  misc_feature (37)..(128): Pfam Id: PF01565 Pfam Desc: FAD binding domain
  misc_feature (17)..(333): NCBI GI: 212538417 Blast Desc: conserved [Penicillium marneffei ATCC 18224] gi|210069106|gb|EEA23197.1| conserved [Penicillium marneffei ATCC 18224]
  misc_feature (8)..(333): NCBI GI: 242764988 Blast Desc: conserved [Talaromyces stipitatus ATCC 10500] gi|218724079|gb|EED23496.1| conserved [Talaromyces stipitatus ATCC 10500]
  misc_feature (37)..(333): NCBI GI: 154323027 Blast Desc: BC1G_00856 [Botryotinia fuckeliana B05.10] gi|150848190|gb|EDN23383.1| BC1G_00856 [Botryotinia fuckeliana B05.10]
  misc_feature (36)..(333): NCBI GI: 159129835 Blast Desc: oxidoreductase, FAD-binding, [Aspergillus fumigatus A1163]
  misc_feature (36)..(333): NCBI GI: 71002198 Blast Desc: oxidoreductase, FAD-binding [Aspergillus fumigatus Af293] gi|66853418|gb|EAL93742.1| oxidoreductase, FAD-binding, [Aspergillus fumigatus Af293]
  misc_feature (36)..(333): NCBI GI: 119481753 Blast Desc: oxidoreductase, FAD-binding, [Neosartorya fischeri NRRL 181] gi|119409059|gb|EAW19008.1| oxidoreductase, FAD-binding, [Neosartorya fischeri NRRL 181]
  misc_feature (37)..(333): NCBI GI: 121716172 Blast Desc: oxidoreductase, FAD-binding, [Aspergillus clavatus NRRL 1] gi|119403852|gb|EAW14269.1| oxidoreductase, FAD-binding, [Aspergillus clavatus NRRL 1]
  misc_feature (14)..(333): NCBI GI: 242765021 Blast Desc: conserved [Talaromyces stipitatus ATCC 10500] gi|218724086|gb|EED23503.1| conserved [Talaromyces stipitatus ATCC 10500]
  misc_feature (36)..(333): NCBI GI: 238498002 Blast Desc: oxidoreductase, FAD-binding, [Aspergillus flavus NRRL3357] gi|220693510|gb|EED49855.1| oxidoreductase, FAD-binding, [Aspergillus flavus NRRL3357]
  misc_feature (37)..(333): NCBI GI: 242764810 Blast Desc: oxidoreductase, FAD-binding, [Talaromyces stipitatus ATCC 10500] gi|218724043|gb|EED23460.1| oxidoreductase, FAD-binding, [Talaromyces stipitatus ATCC 10500]
MANAQQDLATECDALVALLGASKVYLPGSESYKAPSGVTIDLRKLNTVGVSADYKSVSVGAGATWGAVYGKLDTLGLSVAGGRVADVGVGGLTLGGGISYFGLRKGWTCNQVIAFEVVLADGNIVETTETENSDLWWALRGGSNNFGIVTRIDYRTFERGLLWYNMTFNPLSVVEQQISIYAALMSPQQYDINASYVMGWAFAAKQGLTVSLNQLIYTRPHANDTPAYFRRVLALPTIPVPGFAGSIVTNMSTLAAKSATLQPHQAAQLITHSNATLIHMAVFGYMTATITFEPTEAMIKETYATFNESLAEVRSITGISWALNLEPLPPQLYEAQGDEAQGGSRVNASV

SEQ ID NO: 9625 - DNA, 774 bp, Muscodor strobelii
  misc_feature: SGI cDNA ID NO. 563017
  misc_feature: Elevated expression when VOC is produced
  misc_feature: Encodes the peptide sequence at SEQ ID NO 9626
atgacttattacaaaatggcgccgctccttgtgctcgtgcctggtgcctttgggacagctgagggtttcgagaagatgatcccatacttgggaagcctcgaaacacatccgggttcgtacccaagctgcaacccgccggatccattggtggcgagctgcacaaatgacattgcagtacttcgcggcaccttggtttcacttctcgatcagggacgcgatctcatcatcctcgctcactcctacggaggcgtggtagccggcggcgctgcaaaggggcttgacccacgtagtcgcaaggacgaaggctttgagaatgccgttcttggactaatctatgtagtcggaaatatcacacttgaaggggaatctctttttgaggcagtgggcggcgcataccccccttttatcaaatctcatactccttccgaagggcttgcacttgtcgatccggcaaaggaggtcttctacaatgactgtgagccagatccagcgctcgatatgtccgtgtatccccacgctctgaaagcttttgaaacaaaagcaccggcgcccgcttggaaggatccaggctttgagaaacgtatactctacatccgtacaggcaaggatcaatgcaaccctccgttcttgcagaacatgtggattgaaaagtctggtgttcaatggaagattgtggatattgacacagggcatatgccatttgtcagtcagccagaagagtgcgcgaagcatatcgtccagttcactgaagactcaggggttgcgaatttttga

SEQ ID NO: 9626 - protein, 257 aa, Muscodor strobelii
  misc_feature: SGI Peptide ID NO. 563017
  misc_feature (8)..(250): NCBI GI: 238498698 Blast Desc: conserved [Aspergillus flavus NRRL3357] gi|220693858|gb|EED50203.1| conserved [Aspergillus flavus NRRL3357]
  misc_feature (8)..(257): NCBI GI: 145236932 Blast Desc: An07g00200 [Aspergillus niger] gi|134075578|emb|CAK39244.1| protein product [Aspergillus niger]
  misc_feature (8)..(250): NCBI GI: 154301242 Blast Desc: [Botryotinia fuckeliana B05.10] gi|150856192|gb|EDN31384.1| [Botryotinia fuckeliana B05.10]
  misc_feature (6)..(250): NCBI GI: 238497217 Blast Desc: conserved [Aspergillus flavus NRRL3357] gi|220694724|gb|EED51068.1| conserved [Aspergillus flavus NRRL3357]
  misc_feature (6)..(250): NCBI GI: 169774273 Blast Desc: [Aspergillus oryzae RIB40] gi|83769467|dbj|BAE59602.1| protein product [Aspergillus oryzae]
  misc_feature (8)..(246): NCBI GI: 238840275 Blast Desc: conserved [Microsporum canis CBS 113480]
  misc_feature (8)..(246): NCBI GI: 169626162 Blast Desc: SNOG_16360 [Phaeosphaeria nodorum SN15] gi|111055226|gb|EAT76346.1| SNOG_16360 [Phaeosphaeria nodorum SN15]
  misc_feature (8)..(251): NCBI GI: 238839093 Blast Desc: conserved [Microsporum canis CBS 113480]
  misc_feature (153)..(250): NCBI GI: 169781874 Blast Desc: [Aspergillus oryzae RIB40] gi|83774142|dbj|BAE64267.1| protein product [Aspergillus oryzae]
  misc_feature (10)..(245): NCBI GI: 145231216 Blast Desc: An01g14840 [Aspergillus niger] gi|134056002|emb|CAK44181.1| protein product [Aspergillus niger]
  misc_feature: Useful for introducing or modulating the production of volatile compounds
MTYYKMAPLLVLVPGAFGTAEGFEKMIPYLGSLETHPGSYPSCNPPDPLVASCTNDIAVLRGTLVSLLDQGRDLIILAHSYGGVVAGGAAKGLDPRSRKDEGFENAVLGLIYVVGNITLEGESLFEAVGGAYPPFIKSHTPSEGLALVDPAKEVFYNDCEPDPALDMSVYPHALKAFETKAPAPAWKDPGFEKRILYIRTGKDQCNPPFLQNMWIEKSGVQWKIVDIDTGHMPFVSQPEECAKHIVQFTEDSGVANF

SEQ ID NO: 9627 - DNA, 1660 bp, Muscodor strobelii
  misc_feature: SGI EST ID NO. CUFF.22772.0
  misc_feature: Variant of the nucleotide sequence at SEQ ID NO 9625
gttaactcactggtcaagccagtaggaacgttatggtaggatttttagacgtagatattgcgactcgtcaagttcgtaggaatttgaacgtcagctttacaatgccctgccgtaagtatttaatggtcaataatgcaatgttgtgacatcaacgcacagggaatgaaactacaaaaggaccccgcatccaggcagtcacaaatccctgctcggacttttcacaactgcataacgaatccaaaagtagctctgcttgtaacgctagcgcatacacgcacgtgttgcatctagttcacctgacagagctcggcaccaatctcgtttaggcctcttctttctttccccaacagtctgcaaaatgacttattacaaaatggcgccgctccttgtgctcgtgcctggtgcctttgggacagctgagggtttcgagaagatgatcccatacttgggaagcctcgaaacacatccgggttcgtacccaagctgcaacccgccggatccattggtggcgagctgcacaaatgacattgcagtacttcgcggcaccttggtttcacttctcgatcagggacgcgatctcatcatcctcgctcactcctacggaggcgtggtagccggcggcgctgcaaaggggcttgacccacgtagtcgcaaggacgaaggctttgagaatgccgttcttggactaatctatgtagtcggaaatatcacacttgaaggggaatctctttttgaggcagtgggcggcgcataccccccttttatcaaatctcatactccttccgaagggcttgcacttgtcgatccggcaaaggaggtcttctacaatgactgtgagccagatccagcgctcgatatgtccgtgtatccccacgctctgaaagcttttgaaacaaaagcaccggcgcccgcttggaaggatccaggctttgagaaacgtatactctacatccgtacaggcaaggatcaatgcaaccctccgttcttgcaggtaagtatcatccatagcctctgtatgtatggaaatgatggattctggttacttcgccacatccagaacatgtggattgaaaagtctggtgttcaatggaagattgtggatattgacacagggcatatgccatttgtcagtcagccagaagagtgcgcgaagcatatcgtccagttcactgaagactcaggggttgcgaatttttgagtcttgttatttgattattggactggcatatctctgacagatgaccttggtacatgttttcagactgggtactcagtgacagaaattggccagttgaaatgttaccgcaacatctgaccgttcacacagatccacccttgttatttgatatgaattagaaaggctaagcagttgaagctttccaacgaacgcacgttcgccaaaggtgacttggcgggaatctggtccgtcacccggttttgttcaatgcgctagaaccggcttcagaatcaaaaaaaaaaaaaaagtcaacgttcacgactcgagttgaacctggtatttagagataattgaaatatagtagaccagcctgctgtaagagcacccgtgacaaaagtgggacttgagaaggaattggcgatgtgattggttgcgcgtcattgtaccccacactggtagactctctgattggctgcatccgag

SEQ ID NO: 9628 - DNA, 2004 bp, Muscodor strobelii
  misc_feature: SGI cDNA ID NO. 563018
  misc_feature: Encodes the peptide sequence at SEQ ID NO 9629
atgcctcgtgccccacgaattttgcaaaacgctttgcaccaacttcaggagcgttacctcaatgaagatccaaacccgatccattttagagtccgtggcggcggcgctcgcccatccaaagtcattctggtccatgacgatgaggttgccgccttcagatttgctactcaaattcctcgaaggcatccagcactacccgaatgcaggatagtcatgttcatagatgggtcgtggttggaccccttcggcggattttcagtcctattcgcagtttttggcgttcctggcgtttcatccggttggaggcgtctcattggcggtatacgcggcagcggtagtacaggagcagaattggtcggcttcagcagagcactggacatcctaattgatgagctggccggcatccaggcaaagccacgatgtttcgttttgtcggactatttattcgtacaagaccaaatacaacggtatctggaaggggagccccttattttgatgaagggtatctcaattcaagaggtcagaaaactgctccagccacttgagaagttgaaagcactaggcattttccctgaaatacattggtctcgagcgcatgttgggatctggggaaacgagagagcggacgaatacgcgaaagaggggaggcgccggctggaatcttcgcgtttggctctactagcaccgacacgacgatatcaggtcttcacggagcaagaaatacacgtttccgggcctcgacacggtcagatctcacacaactctcatccgccagacacgaagtcgaagttaatctctactttgagccctatcccgattgcgccttcccactcagcctcaagtcaagataaatctttgcagggggctgtagcaacgagtactggccaacataacgcaccgaggttttccagaagcgtggagaaatcggctttaccctcggaatcatcgctcagtcgttacgaaacttccggcttaaagcaccctctccctctgaagccttcgggtttgtcagacactccactcacacccttgaacacgcaagtgcaagacgagcgtaggacagagactgataatagcatcgatacgctagtacgtcaaaaatggcgatttgatggcgtcaatgggaacattgctgtctatcagctccgcaacgcacacagccgtgctgtgcaagaaattcgatatcaattgataacccaaaacgaagtgaagactcgttacgactctccctatcccgtgactgggtcaaacacaattcctgtctccgcacggaccggccgggagcagtcgatgaaattcgggcccgaacatgaatcagattataatctgattaaaggctcgcaaatgacgcctttttatcacccacaagttagatcaagcctcgggtctgaaagtgacccagatacgacctcaagctcccattcggaacacgaatttaagacttgtcctgaagtagatcagaactctatctcggccctcgactcggtctttgacttagaatccccagttacaggggtcgcaggacccaatggctgtacgtcaccaccccacaaaagacaacgggtgtcacaacaacaagctacggagaacgctgaaggagagaaaaatcgagagaagaagcagcacgaagatacaagcgaagaatactctgccgaagaaaaggctgaggaagctgcacgcaaagaagggaggttcaaggaggctaacaatgatgaagacctcgaagaaggcgaaatcaaagaagacgagactatcgagacctccaacatctctaccagggccaaatgtcccgaacgaataaagactcccgacatagaacactgttcagaagacacagaaactcgcaggaacgcgaaaggccacaagccaattccggatggagcctcagagaacgccaaacttcggagagcagagactgctccacaaacaagatgctctaagcccaaacattggtctcagaatccatacccagctaatcgtctttcgaggggccgaaatcgatag

SEQ ID NO: 9629 - protein, 667 aa, Muscodor strobelii
  misc_feature: SGI Peptide ID NO. 563018
  misc_feature (60)..(215): NCBI GI: 119196745 Blast Desc: CIMG_02747 [Coccidioides immitis RS]
  misc_feature (60)..(213): NCBI GI: 154272351 Blast Desc: [Ajellomyces capsulatus NAm1] gi|150409015|gb|EDN04471.1| [Ajellomyces capsulatus NAm1]
MPRAPRILQNALHQLQERYLNEDPNPIHFRVRGGGARPSKVILVHDDEVAAFRFATQIPRRHPALPECRIVMFIDGSWLDPFGGFSVLFAVFGVPGVSSGWRRLIGGIRGSGSTGAELVGFSRALDILIDELAGIQAKPRCFVLSDYLFVQDQIQRYLEGEPLILMKGISIQEVRKLLQPLEKLKALGIFPEIHWSRAHVGIWGNERADEYAKEGRRRLESSRLALLAPTRRYQVFTEQEIHVSGPRHGQISHNSHPPDTKSKLISTLSPIPIAPSHSASSQDKSLQGAVATSTGQHNAPRFSRSVEKSALPSESSLSRYETSGLKHPLPLKPSGLSDTPLTPLNTQVQDERRTETDNSIDTLVRQKWRFDGVNGNIAVYQLRNAHSRAVQEIRYQLITQNEVKTRYDSPYPVTGSNTIPVSARTGREQSMKFGPEHESDYNLIKGSQMTPFYHPQVRSSLGSESDPDTTSSSHSEHEFKTCPEVDQNSISALDSVFDLESPVTGVAGPNGCTSPPHKRQRVSQQQATENAEGEKNREKKQHEDTSEEYSAEEKAEEAARKEGRFKEANNDEDLEEGEIKEDETIETSNISTRAKCPERIKTPDIEHCSEDTETRRNAKGHKPIPDGASENAKLRRAETAPQTRCSKPKHWSQNPYPANRLSRGRNR

SEQ ID NO: 9630 - DNA, 528 bp, Muscodor strobelii
  misc_feature: SGI cDNA ID NO. 563019
  misc_feature: Encodes the peptide sequence at SEQ ID NO 9631
atgtcaacaacacatcacagccaagccccaacctatgcagactgcgtcacggcgctgcaatcctcactctcatttctcaactcctccgtctcaacactcagcagcggcgtagaagactatccgaggctaatcaccgtcctcaaatcgacacgccactacgaactaatcccccaaaccacgctccaagccgccgaatcctctctccgctccgagctctcccccgctataacgacactcctcgaccgcgccgacacgcacatcgaacgtctcgagctgcgcatctcgaatctgaagtccaaagccgagctccagcagggccgtctcgacgcgaaccactcctcgtctcgcagtgccgcaaaggccggtgacagcggcaagggcaagggaagagctctaggaggttcagagaaattaaaggcccgagttctcaagcagagaagggaagccctgcaatactcggttgaaagactggaattggaagtccagcagaaggagcgcgagttacggaagagacttggtgagacttga

SEQ ID NO: 9631 - protein, 175 aa, Muscodor strobelii
  misc_feature: SGI Peptide ID NO. 563019
  misc_feature (11)..(157): Pfam Id: PF08287 Pfam Desc: Spc19
  misc_feature (11)..(116): Pfam Id: PF08287 Pfam Desc: Spc19
  misc_feature (11)..(172): NCBI GI: 46135837 Blast Desc: FG09434.1 [Gibberella zeae PH-1]
  misc_feature (11)..(174): NCBI GI: 145609612 Blast Desc: MGG_09127 [Magnaporthe grisea 70-15] gi|145017023|gb|EDK01386.1| MGG_09127 [Magnaporthe grisea 70-15]
  misc_feature (11)..(172): NCBI GI: 256727075 Blast Desc: NECHADRAFT_76700 [Nectria haematococca mpVI 77-13-4]
  misc_feature (4)..(172): NCBI GI: 170940357 Blast Desc: protein product [Podospora anserina]
  misc_feature (11)..(172): NCBI GI: 149210913 Blast Desc: MGCH7_ch7g929 [Magnaporthe grisea 70-15] gi|86196884|gb|EAQ71522.1| MGCH7_ch7g929 [Magnaporthe grisea 70-15]
  misc_feature (2)..(172): NCBI GI: 116194123 Blast Desc: CHGG_06779 [Chaetomium globosum CBS 148.51] gi|88182692|gb|EAQ90160.1| CHGG_06779 [Chaetomium globosum CBS 148.51]
  misc_feature (16)..(173): NCBI GI: 169783344 Blast Desc: [Aspergillus oryzae RIB40] gi|238493119|ref|XP_002377796.1| mitotic spindle biogenesis protein Spc19, [Aspergillus flavus NRRL3357] protein product
  misc_feature (16)..(173): NCBI GI: 70989027 Blast Desc: mitotic spindle biogenesis protein Spc19 [Aspergillus fumigatus Af293] gi|66846994|gb|EAL87325.1| mitotic spindle biogenesis protein Spc19, [Aspergillus fumigatus Af293] mitotic
  misc_feature (16)..(173): NCBI GI: 119498075 Blast Desc: mitotic spindle biogenesis protein Spc19, [Neosartorya fischeri NRRL 181] gi|119413959|gb|EAW23898.1| mitotic spindle biogenesis protein Spc19, [Neosartorya fischeri NRRL 181]
  misc_feature (39)..(172): NCBI GI: 85068414 Blast Desc: NCU08068 [Neurospora crassa OR74A] gi|28927004|gb|EAA35963.1| conserved [Neurospora crassa OR74A]
MSTTHHSQAPTYADCVTALQSSLSFLNSSVSTLSSGVEDYPRLITVLKSTRHYELIPQTTLQAAESSLRSELSPAITTLLDRADTHIERLELRISNLKSKAELQQGRLDANHSSSRSAAKAGDSGKGKGRALGGSEKLKARVLKQRREALQYSVERLELEVQQKERELRKRLGET

SEQ ID NO: 9632 - DNA, 4393 bp, Muscodor strobelii
  misc_feature: SGI EST ID NO. CUFF.23022.0
  misc_feature: Variant of the nucleotide sequence at SEQ ID NO 9630
ccagttgccccgcggtcccgtaactcaaacctaccaaaacaaactattaacctctcactttccccgaccttctcgtccgactcgttttagattccttcctgatcccatacaccacagcactcaactagactattgagaacgaaccttaatactcgccatctcaccaactacctcacgtctctcatcccacatcgccaaccaacatgtcaacaacacatcacagccaagccccaacctatgcagactgcgtcacggcgctgcaatcctcactctcatttctcaactcctccgtctcaacactcagcagcggcgtagaagactatccgaggctaatcaccgtcctcaaatcgacacgccactacgaactaatcccccaaaccacgctccaagccgccgaatcctctctccgctccgagctctcccccgctataacgacactcctcgaccgcgccgacacgcacatcgaacgtctcgagctgcgcatctcgaatctgaagtccaaagccgagctccagcagggccgtctcgacgcgaaccactcctcgtctcgcagtgccgcaaaggccggtgacagcggcaagggcaagggaagagctctaggaggttcagagaaattaaaggcccgagttctcaagcagagaagggaagccctgcaatactcggttgaaagactggaattggaagtccagcagaaggagcgcgagttacggaagagacttggtgagacttgaggattgattgtatctttcgccatgtctttcaccgcagtattgccatctgttttggtggatctttggtggttgttaccgtacgacaacaactacgatggccccattcccaagacgcgacagcgctcgaaaggatggatatgatggaccacgacacccgataccacatacccgatgcgctactaccatccgcgggagaaacacgcgatgcatcaccttctatttccacacctcacgacgacacaccagtaactgtccccgcacaaacgagttgtgtcaaacaaaacgatccatgtaccaatacccacgatatccaaccctatcatagacccacacgggttcgcacccgccaccacacactcgacaaaacacgactcgatctcccgacgcgctacaagagttatgacaagttcatgtcaaggcctcagcgcgggatggacggagctagtttgagaataggagaaacaagtcaagtaccgaaaccccaccattttgtcatctgcttagaggaagcacccattggactcagcacaactcgagcaataatgtagaaaaatgtacaatatccaaggcatcgaagtgcgaaatatgcaccacgtacctcctgtatctaacgcagtgtttctccgcgctctacaaacatatcacgtaaatgacacaatcaaaaatcacacacaaatcacacatttccaacccaagtaacgaacttcacaacacctctcattcccctccgttctaaacggcgagagccctagctttgactttgtagtacaccatcaccaccacctatcttactcaagtaatacgttccgtcgtaaatagtcccaatccacccaatcccctttctttcctccctcttattcaccaccccagccctcggctcggtgttcctcgcatggtatatacccccctgtccttccctcccagtttccccttcacggggactgctgctgttcgtgattgttgtacgtacgtatgtcacagcggataatacatacatacacggagtgagagtgcgcaggcgcatgtgtgctgaagaagagaaacaaaacaaaaaagaagaaaagaacacgtttcattccatctcgtgacgaacgaaaggggtgagaagaagaaagaaaaaaaaatccagtttaggggtgccaaggcaagtcaaaaagccccttatcctattccgcgacttggttgcctatgccgatgtcgatgcccaacacgatgtccaagactacggtgcattcgcatacacctctatagtcctatttcaatacaaactccagtctctcactatagtgacgagggagaaggacaagccgggaaggggggcgtcgagcaggctgtcgcggaacaggaatttaaattatccgaaaacgaagacgccgaaagacagaggagaccgatcataacagaatgagataattactgggcgcgatacccgtctcgcccgtctctttcctcgcctgccaccaccgcccactgacgtcgctgacctccaggatctcgtgcttggagaaggaaatctcgttggcgtcttcggggttggcctcgtaactatagatggccttggctcggtacgggtattccgtgggagcctggatctctggttctggggcttgtggtgctgctttaacaccgcctggagcggggaaggcgggtgacgagtttcgtgggccggccccgttcaagccaccgacaggagatgggttttcgaaaccgttcagctgcgccgacgtatacatctggggaggctggatggaggtggaggtttcagggcggccaccatatccattcatcgtttggcggctcatcgttgcctccttttgcagggcaaacgagtcgatgtatgcgcgggcaacgcctgatggcgcagatccaaaatagaagatccacagaatctagctcaatcattagcatctggaatgacagtaatatctctgggcttccagtccgtgggagattgcaatatgataagtgtactaacattgatgatggagagcaggatgaaaccggcagcagcagcttgtcgggagccttcacccgagtaaatcaaagagttgacagatgacgaggtgaggaccagtccagcagccatgtatccagtcagggccacatggtaggtctggacagcattggctgccacgacgcatgccgtacccggaatcaagaagatcatgaataccacagcccaccatacgaaagtgggaaacatgcgatctggatcggtcgggactgaatttacttggccgatgatggagccgatgaaggcaatgacccaggagagctatacaatgtcaataatcagtcactgattgcagtattagagcgtcttggagaggaaggactcagtttgtctctgcaagtgacataccagaccaatggaaatggtggcaagagcaaatgggtcgccgataacgttacccaagctcatgcgctttcgggtgttgctagcccggtagtccattttccgtaacgatggagaccccacggagccgtatgcttgcatgtggaaaggggggagtgcagtcgatgggatgacaatcagacgggcgggattatatcagaaagggaatcccagcccggcgaggcgtggcaaacagatcaaagctgggctcaaagaccgaactcaaaacggggactgaatgaagctgaggagcgggcagctggcgctgaaaggcgataggatgtgggctagcggtcaaggtgtgtcgcaggaatgccgctgatgcaatggccacgcgacaaaggtggtgcagagtcggggtcgacagttacaaatggaaatgtcttgatcgattaaagcggaacagtcgtcggggtatcgtagtctttcaaattaatgcgatcgacggtcagaatcgagacagagtatagtatgcagtcgagacctgttctttttactgaaacgaatatcggggtgattccaattgagccttggccttcctttagggttggacggtatattcagatgaccgcttcgaaccaaattgttcgaggtattgcaatgaagcaacgaccagaggatacaacgacaggtcgtcgccagtcgtgatcgtcttggtcgggtcgacgttggagaaagcctaaaagtgcggtcggtggttgagctaacgcggtggcagccgtagagaacgcaggaataaggttcagcgcttgactcgtagccgtcgttccagttcctcaattcgtccaaaacttgcaccgcagatgactgattagtcctagattcgacgatggcgttcgttagatgtcgattttgatcgcggcttcctgtccttctcttcgttctgcttgcagcctccagaatcctacaatgtcggaccaactcttccgctctcttcttcctcttcctcacaagggcaaaaatgggtaacgaatggttgggagattgctgattgccggcaatgcgcagcgatgtcgaatcgaaaggtgagtaagcgtcgtcagtgaagatgcaattgcgaagggtgagatcgacggcgtgtgggctgggtgctgtgtgtcgagggggcgacggggatgtcgaggaattaagagaaaagataggcagacgacgggcgaggcagcggaaactcagtgtgacagacaacggcagcacaggcgacaggagatgccagagccagcgaaaagagagcagcccgcagcaaatgaacggccacagtccttcccag

SEQ ID NO: 9633 - DNA, 930 bp, Muscodor strobelii
  misc_feature: SGI cDNA ID NO. 563020
  misc_feature: Reduced expression when VOC is produced
  misc_feature: Encodes the peptide sequence at SEQ ID NO 9634
atgcaagcatacggctccgtggggtctccatcgttacggaaaatggactaccgggctagcaacacccgaaagcgcatgagcttgggtaacgttatcggcgacccatttgctcttgccaccatttccattggtctgctctcctgggtcattgccttcatcggctccatcatcggccaagtaaattcagtcccgaccgatccagatcgcatgtttcccactttcgtatggtgggctgtggtattcatgatcttcttgattccgggtacggcatgcgtcgtggcagccaatgctgtccagacctaccatgtggccctgactggatacatggctgctggactggtcctcacctcgtcatctgtcaactctttgatttactcgggtgaaggctcccgacaagctgctgctgccggtttcatcctgctctccatcatcaatattctgtggatcttctattttggatctgcgccatcaggcgttgcccgcgcatacatcgactcgtttgccctgcaaaaggaggcaacgatgagccgccaaacgatgaatggatatggtggccgccctgaaacctccacctccatccagcctccccagatgtatacgtcggcgcagctgaacggtttcgaaaacccatctcctgtcggtggcttgaacggggccggcccacgaaactcgtcacccgccttccccgctccaggcggtgttaaagcagcaccacaagccccagaaccagagatccaggctcccacggaatacccgtaccgagccaaggccatctatagttacgaggccaaccccgaagacgccaacgagatttccttctccaagcacgagatcctggaggtcagcgacgtcagtgggcggtggtggcaggcgaggaaagagacgggcgagacgggtatcgcgcccagtaattatctcattctgttatga

SEQ ID NO: 9634 - protein, 309 aa, Muscodor strobelii
  misc_feature: SGI Peptide ID NO. 563020
  misc_feature (253)..(309): Pfam Id: PF00018 Pfam Desc: SH3 domain
  misc_feature (254)..(309): Pfam Id: PF07653 Pfam Desc: Variant SH3 domain
  misc_feature (1)..(309): NCBI GI: 170940356 Blast Desc: protein product [Podospora anserina]
  misc_feature (23)..(309): NCBI GI: 39956842 Blast Desc: MGG_09125 [Magnaporthe grisea 70-15] gi|149210907|ref|XP_001522828.1| MGCH7_ch7g926 [Magnaporthe grisea 70-15] gi|86196881|gb|EAQ71519.1| MGCH7_ch7g926 grisea
  misc_feature (1)..(309): NCBI GI: 156763632 Blast Desc: osmosensor protein [Metarhizium anisopliae]
  misc_feature (15)..(309): NCBI GI: 116194121 Blast Desc: CHGG_06778 [Chaetomium globosum CBS 148.51] gi|88182691|gb|EAQ90159.1| CHGG_06778 [Chaetomium globosum CBS 148.51]
  misc_feature (23)..(309): NCBI GI: 46135839 Blast Desc: FG09435.1 [Gibberella zeae PH-1]
  misc_feature (23)..(309): NCBI GI: 256727656 Blast Desc: [Nectria haematococca mpVI 77-13-4]
  misc_feature (18)..(309): NCBI GI: 261353790 Blast Desc: osmosensor protein [Verticillium albo-atrum VaMs.102]
  misc_feature (26)..(309): NCBI GI: 189192354 Blast Desc: conserved [Pyrenophora tritici-repentis Pt-1C-BFP] gi|187974122|gb|EDU41621.1| conserved [Pyrenophora tritici-repentis Pt-1C-BFP]
  misc_feature (18)..(309): NCBI GI: 85068412 Blast Desc: NCU08067 [Neurospora crassa OR74A] gi|28927003|gb|EAA35962.1| NCU08067 [Neurospora crassa OR74A]
  misc_feature (16)..(309): NCBI GI: 156040892 Blast Desc: SS1G_11424 [Sclerotinia sclerotiorum 1980] gi|154695808|gb|EDN95546.1| SS1G_11424 [Sclerotinia sclerotiorum 1980]
  misc_feature: Useful for introducing or modulating the production of volatile compounds
MQAYGSVGSPSLRKMDYRASNTRKRMSLGNVIGDPFALATISIGLLSWVIAFIGSIIGQVNSVPTDPDRMFPTFVWWAVVFMIFLIPGTACVVAANAVQTYHVALTGYMAAGLVLTSSSVNSLIYSGEGSRQAAAAGFILLSIINILWIFYFGSAPSGVARAYIDSFALQKEATMSRQTMNGYGGRPETSTSIQPPQMYTSAQLNGFENPSPVGGLNGAGPRNSSPAFPAPGGVKAAPQAPEPEIQAPTEYPYRAKAIYSYEANPEDANEISFSKHEILEVSDVSGRWWQARKETGETGIAPSNYLILL

SEQ ID NO: 9635 - DNA, 4320 bp, Muscodor strobelii
  misc_feature: SGI EST ID NO. CUFF.23023.1
  misc_feature: Variant of the nucleotide sequence at SEQ ID NO 9633
ctgggaaggactgtggccgttcatttgctgcgggctgctctcttttcgctggctctggcatctcctgtcgcctgtgctgccgttgtctgtcacactgagtttccgctgcctcgcccgtcgtctgcctatcttttctcttaattcctcgacatccccgtcgccccctcgacacacagcacccagcccacacgccgtcgatctcacccttcgcaattgcatcttcactgacgacgcttactcacctttcgattcgacatcgctgcgcattgccggcaatcagcaatctcccaaccattcgttacccatttttgcccttgtgaggaagaggaagaagagagcggaagagttggtccgacattgtaggattctggaggctgcaagcagaacgaagagaaggacaggaagccgcgatcaaaatcgacatctaacgaacgccatcgtcgaatctaggactaatcagtcatctgcggtgcaagttttggacgaattgaggaactggaacgacggctacgagtcaagcgctgaaccttattcctgcgttctctacggctgccaccgcgttagctcaaccaccgaccgcacttttaggctttctccaacgtcgacccgaccaagacgatcacgactggcgacgacctgtcgttgtatcctctggtcgttgcttcattgcaatacctcgaacaatttggttcgaagcggtcatctgaatataccgtccaaccctaaaggaaggccaaggctcaattggaatcaccccgatattcgtttcagtaaaaagaacaggtctcgactgcatactatactctgtctcgattctgaccgtcgatcgcattaatttgaaagactacgataccccgacgactgttccgctttaatcgatcaagacatttccatttgtaactgtcgaccccgactctgcaccacctttgtcgcgtggccattgcatcagcggcattcctgcgacacaccttgaccgctagcccacatcctatcgcctttcagcgccagctgcccgctcctcagcttcattcagtccccgttttgagttcggtctttgagcccagctttgatctgtttgccacgcctcgccgggctgggattccctttctgatataatcccgcccgtctgattgtcatcccatcgactgcactcccccctttccacatgcaagcatacggctccgtggggtctccatcgttacggaaaatggactaccgggctagcaacacccgaaagcgcatgagcttgggtaacgttatcggcgacccatttgctcttgccaccatttccattggtctgctctcctgggtcattgccttcatcggctccatcatcggccaagtaaattcagtcccgaccgatccagatcgcatgtttcccactttcgtatggtgggctgtggtattcatgatcttcttgattccgggtacggcatgcgtcgtggcagccaatgctgtccagacctaccatgtggccctgactggatacatggctgctggactggtcctcacctcgtcatctgtcaactctttgatttactcgggtgaaggctcccgacaagctgctgctgccggtttcatcctgctctccatcatcaatattctgtggatcttctattttggatctgcgccatcaggcgttgcccgcgcatacatcgactcgtttgccctgcaaaaggaggcaacgatgagccgccaaacgatgaatggatatggtggccgccctgaaacctccacctccatccagcctccccagatgtatacgtcggcgcagctgaacggtttcgaaaacccatctcctgtcggtggcttgaacggggccggcccacgaaactcgtcacccgccttccccgctccaggcggtgttaaagcagcaccacaagccccagaaccagagatccaggctcccacggaatacccgtaccgagccaaggccatctatagttacgaggccaaccccgaagacgccaacgagatttccttctccaagcacgagatcctggaggtcagcgacgtcagtgggcggtggtggcaggcgaggaaagagacgggcgagacgggtatcgcgcccagtaattatctcattctgttatgatcggtctcctctgtctttcggcgtcttcgttttcggataatttaaattcctgttccgcgacagcctgctcgacgccccccttcccggcttgtccttctccctcgtcactatagtgagagactggagtttgtattgaaataggactatagaggtgtatgcgaatgcaccgtagtcttggacatcgtgttgggcatcgacatcggcataggcaaccaagtcgcggaataggataaggggctttttgacttgccttggcacccctaaactggatttttttttctttcttcttctcacccctttcgttcgtcacgagatggaatgaaacgtgttcttttcttcttttttgttttgtttctcttcttcagcacacatgcgcctgcgcactctcactccgtgtatgtatgtattatccgctgtgacatacgtacgtacaacaatcacgaacagcagcagtccccgtgaaggggaaactgggagggaaggacaggggggtatataccatgcgaggaacaccgagccgagggctggggtggtgaataagagggaggaaagaaaggggattgggtggattgggactatttacgacggaacgtattacttgagtaagataggtggtggtgatggtgtactacaaagtcaaagctagggctctcgccgtttagaacggaggggaatgagaggtgttgtgaagttcgttacttgggttggaaatgtgtgatttgtgtgtgatttttgattgtgtcatttacgtgatatgtttgtagagcgcggagaaacactgcgttagatacaggaggtacgtggtgcatatttcgcacttcgatgccttggatattgtacatttttctacattattgctcgagttgtgctgagtccaatgggtgcttcctctaagcagatgacaaaatggtggggtttcggtacttgacttgtttctcctattctcaaactagctccgtccatcccgcgctgaggccttgacatgaacttgtcataactcttgtagcgcgtcgggagatcgagtcgtgttttgtcgagtgtgtggtggcgggtgcgaacccgtgtgggtctatgatagggttggatatcgtgggtattggtacatggatcgttttgtttgacacaactcgtttgtgcggggacagttactggtgtgtcgtcgtgaggtgtggaaatagaaggtgatgcatcgcgtgtttctcccgcggatggtagtagcgcatcgggtatgtggtatcgggtgtcgtggtccatcatatccatcctttcgagcgctgtcgcgtcttgggaatggggccatcgtagttgttgtcgtacggtaacaaccaccaaagatccaccaaaacagatggcaatactgcggtgaaagacatggcgaaagatacaatcaatcctcaagtctcaccaagtctcttccgtaactcgcgctccttctgctggacttccaattccagtctttcaaccgagtattgcagggcttcccttctctgcttgagaactcgggcctttaatttctctgaacctcctagagctcttcccttgcccttgccgctgtcaccggcctttgcggcactgcgagacgaggagtggttcgcgtcgagacggccctgctggagctcggctttggacttcagattcgagatgcgcagctcgagacgttcgatgtgcgtgtcggcgcggtcgaggagtgtcgttatagcgggggagagctcggagcggagagaggattcggcggcttggagcgtggtttgggggattagttcgtagtgctgttcgggatagtgttagcttgttggggcttggagatagtggggtgggcgagagggtggtgaggatgggagggggagaatacgaggggaagggacttacgcgtgtcgatttgaggacggtgattagcctcggatagtcttctacgccgctgctgagtgttgagacggaggagttgagaaatgagagtgaggattgcagcgccgtgacgcagtctgcataggttggggcttggctgtgatgtgttgttgacatgttggttggcgatgtgggatgagagacgtgaggtagttggtgagatggcgagtattaaggttcgttctcaatagtctagttgagtgctgtggtgtatgggatcaggaaggaatctaaaacgagtcggacgagaaggtcggggaaagtgagaggttaatagtttgttttggtaggtttgagttacgggaccgcggggcaactgg

SEQ ID NO: 9636 - DNA, 594 bp, Muscodor strobelii
  misc_feature: SGI cDNA ID NO. 563021
  misc_feature: Encodes the peptide sequence at SEQ ID NO 9637
atggaatctacactcgacgataccactctctctaccatctccttgctagaagctcgaatcatgcgcatagagcacctactctacggccacgctctcccacagcccaagacttctgccatctggagtgtgcacgaactagagaaccgcttcttcaagcttcttcaacatgtccgagcgtacggcgagctgctcaagctctacaagtcccatcccaccctgttccgctccccggccgcctctgagccaccaccggagctgtccgaagaggctctaagagctatcgttctttctgccgccccctcctatcctgccactgcctctgctctgaccgccatgtccgacacccccatccccgaccctgctcacagtgccaccttggccgccctcacgccgcgcatgaagggaatcgaggccactcagctggcgcaggctgctgaaatagcagagctacgagcccgaagcgaagccgttgtccgacactggtacgagcgcgatgtcatggcctgttcgaccttcgtggctggcgtcgagacgcgcatcgagaaggtcgagcgcgctgtgaggagggccgagaaagcaagggatgagatctga

SEQ ID NO: 9637 - protein, 197 aa, Muscodor strobelii
  misc_feature: SGI Peptide ID NO. 563021
  misc_feature (1)..(197): NCBI GI: 256727657 Blast Desc: NECHADRAFT_102443 [Nectria haematococca mpVI 77-13-4]
  misc_feature (1)..(197): NCBI GI: 46135841 Blast Desc: FG09436.1 [Gibberella zeae PH-1]
  misc_feature (1)..(196): NCBI GI: 116194117 Blast Desc: CHGG_06776 [Chaetomium globosum CBS 148.51] gi|88182689|gb|EAQ90157.1| CHGG_06776 [Chaetomium globosum CBS 148.51]
  misc_feature (1)..(196): NCBI GI: 149210863 Blast Desc: MGCH7_ch7g904 [Magnaporthe grisea 70-15] gi|86196859|gb|EAQ71497.1| MGCH7_ch7g904 [Magnaporthe grisea 70-15]
  misc_feature (3)..(184): NCBI GI: 164423428 Blast Desc: NCU10696 [Neurospora crassa OR74A] gi|2353165|gb|AAB69382.1| RO10 [Neurospora crassa] gi|157070090|gb|EDO64967.1| conserved [Neurospora crassa OR74A]
  misc_feature (1)..(185): NCBI GI: 145609644 Blast Desc: MGG_12516 [Magnaporthe grisea 70-15] gi|145017046|gb|EDK01409.1| MGG_12516 [Magnaporthe grisea 70-15]
  misc_feature (82)..(196): NCBI GI: 170940355 Blast Desc: protein product [Podospora anserina]
  misc_feature (1)..(195): NCBI GI: 119183832 Blast Desc: CIMG_06796 [Coccidioides immitis RS]
  misc_feature (1)..(195): NCBI GI: 212534604 Blast Desc: conserved [Penicillium marneffei ATCC 18224] gi|210069857|gb|EEA23947.1| conserved [Penicillium marneffei ATCC 18224]
  misc_feature (1)..(196): NCBI GI: 240109713 Blast Desc: CPC735_032180 [Coccidioides posadasii C735 delta SOWgp]
MESTLDDTTLSTISLLEARIMRIEHLLYGHALPQPKTSAIWSVHELENRFFKLLQHVRAYGELLKLYKSHPTLFRSPAASEPPPELSEEALRAIVLSAAPSYPATASALTAMSDTPIPDPAHSATLAALTPRMKGIEATQLAQAAEIAELRARSEAVVRHWYERDVMACSTFVAGVETRIEKVERAVRRAEKARDEI

SEQ ID NO: 9638 - DNA, 2937 bp, Muscodor strobelii
  misc_feature: SGI EST ID NO. CUFF.22775.0
  misc_feature: Variant of the nucleotide sequence at SEQ ID NO 9636
atgctggaccaatcaatcgtcgccactgactcaactccactccactgcgcgactgccagaagacgttgcggccagcatcccctgccacgcgcaaggttcacagctctgaggctcgctattctgaaatctggggaacatcgccatctcgtcattttcagccttaccaaaccttcgctacgacatgctcccgcggcagtgaaacggcaatacaaacgtttgtctgagtctgactccaattgaatgaaccttgttcgttctgcaccttttctcagcaaagcatcgctactatacatcacaacattgtgctccgagcagcaacacgaacaatcaaagaagtcaacagtagctacagagtaccgagggacatgacaagatggaatctacactcgacgataccactctctctaccatctccttgctagaagctcgaatcatgcgcatagagcacctactctacggccacgctctcccacagcccaagacttctgccatctggagtgtgcacgaactagagaaccgcttcttcaagcttcttcaacatgtccgagcgtacggcgagctgctcaagctctacaagtcccatcccaccctgttccgctccccggccgcctctgagccaccaccggagctgtccgaagaggctctaagagctatcgttctttctgccgccccctcctatcctgccactgcctctgctctgaccgccatgtccgacacccccatccccgaccctgctcacagtgccaccttggccgccctcacgccgcgcatgaagggaatcgaggccactcagctggcgcaggctgctgaaatagcagagctacgagcccgaagcgaagccgttgtccgacactggtacgagcgcgatgtcatggcctgttcgaccttcgtggctggcgtcgagacgcgcatcgagaaggtcgagcgcgctgtgaggagggccgagaaagcaagggatgagatctgacggaccactcaatatcaatctgctccgaccaagactatctagaaaaggccgtcgacccgagagctatgtagctcatatggcggcactgttatggcgtgcaacagatccggggcagctatgaaactgctagcggcatctcgagcttggacttagacacctcctacattctatgctggccgaacgattccatctatgccgcttttgttttcgccacgaagtattgcgggacatagatcaggaacaagaatatccagatgaggggctatgagctcctaacccgtccgtaatcccttcttcccaggcagaatccaatggcatattgcgacccggaaaatctcaatcggttgtaccatatgtttcactagattgatatcatgtttctcatatcaaggcgcacggattgatgagctgtctatattttgtcgcatgaccagtatcaggttacaatgccttgcggcagggctgagatacttgttttgggcccaagaaccggcatacggctaaagtctacctgcaccaccaaccatccagatcggacgaattctacgtccaactcttgccctgattcgttcacgcaatgcggcagtctgaggaggaggttgcagaaacacgtgatgtttcacgcaatggtcatcacatattctgcacacactctgtgcatgctgttccagccggttgcgattggcacacgggatataaaccaggaattagaaacccacctgtgaggttgaaaccttcaagtcattatcaagtcatcatcccggtgattattcccactgcgcaaatttcatgacaagatgcgatgagttggcatcgtggagccgggtccatcatgatccagcttgtgagaaaattgcgggtcgaccgcgtgtttcagaatctgaagccaaggaaggcggctgatgactgctcacgacaagtcaaccgaaatttgacgacctcatactctctctgcgtatgcaatccaatgtaatgtaaatagacatttaaatgagatttttgagtaactgaaagacaatacggggaatttgttattaaaccaatgtctgtaatgaatcggtggcaatacaactcaccacttaaagctgaagcgggaattcgtgtttacgctgaggacactttgccccgcggtgaagctctgtccttgagtccaaacacaccacgcacctagcgcagttctaactaactccacgcctgcgtacttaaagcagtgttgccagaacaactctaacacgaagaaacatttgtccagtttaatagagagctttactagtccgttagcagccgcatcaccctattgaccttagtagctctgctggttcgtcagcaggcgtatctcattattgtccaatcttgtattgctatatcacaaatggcgattatcactcgcctgtctccaacattctcatctctatccaataataatacaatggtgcctacaaagatgaagaagagctcacgacattgaggagagatgtatgtgaagatacaagacagagatggtacgaaattatttgcgtcgactcgcatgaacaaaactaccggtaaggccgggtgtggctgcttctagcgtagatcccttgtttgatggacgcagagggggaggaaatcggaattgggaaactgtcacaggtgggcttgctcccgatgcggcgacatgatacatttatctgcctctacctgtgcatacctacatacctacagtatgtaggtacatactctttcagcctcccatccatgatgaacaactagtcgcggtgaggctatcacgaggcaagacagctagagcctacggactacagctcacgatggaagatggagggccaatgagttttctgcgtatgtagattctcggtcttggcgcaaatcagataggacgagaggttcgcgatgagaaatggattgtggaggacgaaaacggcgctggttggtttgccgctagacgcctgggttcctgccttagtggcgag

SEQ ID NO: 9639 - DNA, 1632 bp, Muscodor strobelii
  misc_feature: SGI cDNA ID NO. 563022
  misc_feature: Encodes the peptide sequence at SEQ ID NO 9640
atgtcgaattactcgacaatcacgcatgagggctcctccgctcccgccgccgccagcacctctggagatatgacaagaccgagacgatcacgaccacaccagaaagatggcggcgctggcggccaggccaccatgttcagcagcgtcacgaacctgctcaataccatcctcggtgccggtacgctcgccatgccctcggcgctgtcacacttcggaatggtcttgggagtcatagtcattctctggggcggcttcacttccgccttcggcctctatctgcagtcgcgatgcgcccgatacctcgaccgcggatcctcatccttcttcgccctgtcgcagatgacataccccaatgccgccgtcatattcgacgctgccattgcgattaaatgcttcggagtgggcgtttcgtatatgatcatcattggtgacttgatgccgggtgtcgtggaaggattcgacagcagagccgccgccatctcctatctgatggaccgcaacttttggatcaccgtcttcatgctgttcatcatacccttgagctttctccggcggctggactcgctcaagtacaccagcatcattgctctcgtcgccattggctacctcatcatcctcgtagtgtggcattttgcttcggatacgcttgctcccagggacaagatccgcatcatcgaatggggtggcccagtggaagctctggcaagcttgcccgtagtcatctttgcctatacctgtcatcaaaacatgttctccattctcaatgagatcaagaacaatacccccaagagtattctcggtgtcatctccaccagcattggctcagctgctggtgtatatgtgctagtctcggtaactggatatctgacctttggcaacgacattcacggcaatatcgtatctatgtatccgccatcaattgcgtctaccattgcaaaagctgctatcgtcgtccttgtaaccttctctgtgcctctccaggtacatccctgtcgagcatcggtagatgcggtgcttaaatggcgtcccaacgccgtttcccgttcttccggcagacctaattctccgaacaatcgaaatctccttcccaccgtgactcgctcggatcatggtcccgtagcgcccatgtctgatctacgttttgctattctcaccactattctacttgttttggcatataccacagctctaacagtgacctcgctagaaagagtcttggcttatgttggatcgactggtagcactgctatcagcttcattcttcccggtcttttctactacaagatctctgacccagactcaattcaccatcaacgacttgccaaagaggacgacgatgctctgactcctgctgcatccgatgacgatggtgacagtgacgatgtcgataatgacgttgccgatggtctgcttactgcaagtgtcccgagcctccgcagcaatgccagcggttcgagcccaagaaccagagcgtccaaagggccgtggcgctggcgaatgaagtggagatgggatttcgaacatgtcaatcccgcccatctaagaagagcagcgttagctttggccatatacggtttctgcatcatgggtgtatgtttaaccatgaacatggtcggcacgtatgctcattag

SEQ ID NO: 9640 - protein, 543 aa, Muscodor strobelii
  misc_feature: SGI Peptide ID NO. 563022
  misc_feature (41)..(455): Pfam Id: PF01490 Pfam Desc: Transmembrane amino acid transporter protein
  misc_feature (41)..(442): Pfam Id: PF01490 Pfam Desc: Transmembrane amino acid transporter protein
  misc_feature (24)..(529): NCBI GI: 256727076 Blast Desc: NECHADRAFT_91235 [Nectria haematococca mpVI 77-13-4]
  misc_feature (24)..(529): NCBI GI: 46135843 Blast Desc: FG09437.1 [Gibberella zeae PH-1]
  misc_feature (33)..(536): NCBI GI: 149210865 Blast Desc: MGCH7_ch7g905 [Magnaporthe grisea 70-15] gi|86196860|gb|EAQ71498.1| MGCH7_ch7g905 [Magnaporthe grisea 70-15]
  misc_feature (45)..(543): NCBI GI: 170940354 Blast Desc: protein product [Podospora anserina]
  misc_feature (24)..(529): NCBI GI: 164423426 Blast Desc: NCU08066 [Neurospora crassa OR74A] gi|157070089|gb|EAA35961.2| NCU08066 [Neurospora crassa OR74A]
  misc_feature (33)..(536): NCBI GI: 145609642 Blast Desc: MGG_03101 [Magnaporthe grisea 70-15] gi|145017045|gb|EDK01408.1| MGG_03101 [Magnaporthe grisea 70-15]
  misc_feature (64)..(537): NCBI GI: 116194111 Blast Desc: CHGG_06773 [Chaetomium globosum CBS 148.51] gi|88182686|gb|EAQ90154.1| CHGG_06773 [Chaetomium globosum CBS 148.51]
  misc_feature (28)..(488): NCBI GI: 238839604 Blast Desc: vacuolar amino acid transporter 6 [Microsporum canis CBS 113480]
  misc_feature (1)..(536): NCBI GI: 189192350 Blast Desc: PTRG_02181 [Pyrenophora tritici-repentis Pt-1C-BFP] gi|187974120|gb|EDU41619.1| PTRG_02181 [Pyrenophora tritici-repentis Pt-1C-BFP]
  misc_feature (1)..(540): NCBI GI: 154303978 Blast Desc: BC1G_08873 [Botryotinia fuckeliana B05.10] gi|150854457|gb|EDN29649.1| BC1G_08873 [Botryotinia fuckeliana B05.10]
MSNYSTITHEGSSAPAAASTSGDMTRPRRSRPHQKDGGAGGQATMFSSVTNLLNTILGAGTLAMPSALSHFGMVLGVIVILWGGFTSAFGLYLQSRCARYLDRGSSSFFALSQMTYPNAAVIFDAAIAIKCFGVGVSYMIIIGDLMPGVVEGFDSRAAAISYLMDRNFWITVFMLFIIPLSFLRRLDSLKYTSIIALVAIGYLIILVVWHFASDTLAPRDKIRIIEWGGPVEALASLPVVIFAYTCHQNMFSILNEIKNNTPKSILGVISTSIGSAAGVYVLVSVTGYLTFGNDIHGNIVSMYPPSIASTIAKAAIVVLVTFSVPLQVHPCRASVDAVLKWRPNAVSRSSGRPNSPNNRNLLPTVTRSDHGPVAPMSDLRFAILTTILLVLAYTTALTVTSLERVLAYVGSTGSTAISFILPGLFYYKISDPDSIHHQRLAKEDDDALTPAASDDDGDSDDVDNDVADGLLTASVPSLRSNASGSSPRTRASKGPWRWRMKWRWDFEHVNPAHLRRAALALAIYGFCIMGVCLTMNMVGTYAH

SEQ ID NO: 9641 - DNA, 2430 bp, Muscodor strobelii
  misc_feature: SGI EST ID NO. CUFF.22805.0
  misc_feature: Variant of the nucleotide sequence at SEQ ID NO 9639
gtttgacccggggtttactgggcagactcggcagagacaggctctgacgacagctgtcattgctcgtatgcctgcaaaccgacagccagtcgcatgggcgttcgacgtcagtcacgacaagacccgacccatcttcgcaacttccagtctctgctaggaccagttcctcacgacctcctccttgccaactatcggatctttctcctcgcgacataaccacttaatatctgctagtcacaaaaagcatacctccatctcgactctcgcagccaacaattggcccagccgctgcccgcccgtgaaacaaggaaccagcgtcaagggccagtaatcgggcaggcacccaacaaaaaggcccaaccttgaaaggatcggcggttacctctgcagctactagatctcaattcagtgtgtcaccgcctcgccatctcacaagtcgtacccgagacatttctgtgtgctggccagcgaggcgtctgtcatcttggactgcttgctccctgggctatgtcgaattactcgacaatcacgcatgagggctcctccgctcccgccgccgccagcacctctggagatatgacaagaccgagacgatcacgaccacaccagaaagatggcggcgctggcggccaggccaccatgttcagcagcgtcacgaacctgctcaataccatcctcggtgccggtacgctcgccatgccctcggcgctgtcacacttcggaatggtcttgggagtcatagtcattctctggggcggcttcacttccgccttcggcctctatctgcagtcgcgatgcgcccgatacctcgaccgcggatcctcatccttcttcgccctgtcgcagatgacataccccaatgccgccgtcatattcgacgctgccattgcgattaaatgcttcggagtgggcgtttcgtatatgatcatcattggtgacttgatgccgggtgtcgtggaaggattcgacagcagagccgccgccatctcctatctgatggaccgcaacttttggatcaccgtcttcatgctgttcatcatacccttgagctttctccggcggctggactcgctcaagtacaccagcatcattgctctcgtcgccattggctacctcatcatcctcgtagtgtggcattttgcttcggatacgcttgctcccagggacaagatccgcatcatcgaatggggtggcccagtggaagctctggcaagcttgcccgtagtcatctttgcctatacctgtcatcaaaacatgttctccattctcaatgagatcaagaacaatacccccaagagtattctcggtgtcatctccaccagcattggctcagctgctggtgtatatgtgctagtctcggtaactggatatctgacctttggcaacgacattcacggcaatatcgtatctatgtatccgccatcaattgcgtctaccattgcaaaagctgctatcgtcgtccttgtaaccttctctgtgcctctccaggtacatccctgtcgagcatcggtagatgcggtgcttaaatggcgtcccaacgccgtttcccgttcttccggcagacctaattctccgaacaatcgaaatctccttcccaccgtgactcgctcggatcatggtcccgtagcgcccatgtctgatctacgttttgctattctcaccactattctacttgttttggcatataccacagctctaacagtgacctcgctagaaagagtcttggcttatgttggatcgactggtagcactgctatcagcttcattcttcccggtcttttctactacaagatctctgacccagactcaattcaccatcaacgacttgccaaagaggacgacgatgctctgactcctgctgcatccgatgacgatggtgacagtgacgatgtcgataatgacgttgccgatggtctgcttactgcaagtgtcccgagcctccgcagcaatgccagcggttcgagcccaagaaccagagcgtccaaagggccgtggcgctggcgaatgaagtggagatgggatttcgaacatgtcaatcccgcccatctaagaagagcagcgttagctttggccatatacggtttctgcatcatgggtgtatgtttaaccatgaacatggtcggcacgtatgctcattagattaatatcctacccgagctctttgaaaggcatacccagcattggttgcggatttatgatcataagtcttggaatattaatctagcattcagcggagtctggcgtcacttctctgcacttatatatctatatgcttcgcgttcgttcattagcgctgtacataggatcatacatactacttattctacatatcgttacttccgttatcgtgcccataggttaatgctagtgccatacgtgatcgatttggtacgtgagatagatatgctttcatactaaccgcagttaatt

SEQ ID NO: 9642 - DNA, 1578 bp, Muscodor strobelii
  misc_feature: SGI cDNA ID NO. 563023
  misc_feature: Encodes the peptide sequence at SEQ ID NO 9643
atggactcgtctacttcctcctcatcctcatctatattcgatgagaaggctctcactcattctacgctcaccgccgctacattccctgagaaggcgttgtctcctattccttcttcgcaaaaaccctatcatgtcttcactcaaagggaaaaatggatcctcgtgttcatcatcggcgctgcagggctcttttctggcttatcgtccaacatttacttcccagcagagaatcaaatcgccaaggatcttagcattagtttgagtctcgtctcgttgaccatcacctcctatttgatcatccaagggatctcgccagttttctggggttcgctcgcggattctatcggacggcggccgatatacattgcctcattttcagtttacatcatatccaatattggcctaagtttctcgcccaattttgctgtgctgttattgttccgaggtctgcaatcagcaggcagtgcctccaccgttagcatcggaaatggagtgattcaagatattgctttaccatccgagagaggaggatatatcagcttgtaccaagccatacgtaacttcagcattgctgtaggccctgtcttgggtggtgctttatcaaactctagggggtttcgatcaatctttgtgtttctattgattgtctcgtccctggtgttaagcatgattgttttgatcttgccggagacactgcgaaccatcgccggcgatggttcttataggcttagcggtgtgtataagccgctcgtcaactacttgaaaaagggatcggattacatccaagaccctcctcctggtcttgtccgaaagaagatcactctttgcacattcacagctcctctaaagctgttgatcgaaaaggacatactgttgcacttggttttcggaggtgtcatctacacaatctggagcatggtgacagctacgacgagcgggttgctccgggcggctttcagcctcaacgagctcctcattggtctttgtttcttatccaatggatttgggacaattgtcgggtctgcgattattggtaaactcatgcagcgggatttcaggcacgctgagacagcttataaaagtgccaatcgactcccggcagattacaaaataccacccaaggagttgccagtcgacttcagcatagagcgtgctcgtctccggcatctaccgtggattaccgtccttttcatagtatcaacgggcatatacggcttcacgatcgcaccatcatcagtgacctcacggccaggctggatagcagtaccgctcttgctacaattcctcatcgcagcaacaagcaatgctgtgtttgcaatgaatcagactatcgtttccgatttgtgtcctggtaagggagcaagttcgacagctatcaacaacctcgtacgatgtgagctgggcgcgatcggtgttgctgtcgtccagcacatcgtcgacagattcggtcccgggccaaccttcttaggtctttctctttttactgtagcctgcatacccatagcattgctcaactgggtttacggccaaagatggagagccgcgagaactatgcggcaagagaagttgagcgggtag

SEQ ID NO: 9643 - protein, 525 aa, Muscodor strobelii
  misc_feature: SGI Peptide ID NO. 563023
  misc_feature (58)..(472): Pfam Id: PF07690 Pfam Desc: Major Facilitator Superfamily
  misc_feature (58)..(350): Pfam Id: PF07690 Pfam Desc: Major Facilitator Superfamily
  misc_feature (9)..(522): NCBI GI: 156064615 Blast Desc: SS1G_00315 [Sclerotinia sclerotiorum 1980] gi|154691177|gb|EDN90915.1| SS1G_00315 [Sclerotinia sclerotiorum 1980]
  misc_feature (38)..(522): NCBI GI: 255931921 Blast Desc: Pc12g06790 [Penicillium chrysogenum Wisconsin 54-1255] gi|211582136|emb|CAP80306.1| Pc12g06790 [Penicillium chrysogenum Wisconsin 54-1255]
  misc_feature (9)..(513): NCBI GI: 154322963 Blast Desc: BC1G_00824 [Botryotinia fuckeliana B05.10] gi|150848158|gb|EDN23351.1| BC1G_00824 [Botryotinia fuckeliana B05.10]
  misc_feature (29)..(522): NCBI GI: 169772747 Blast Desc: [Aspergillus oryzae RIB40] gi|83768703|dbj|BAE58840.1| protein product [Aspergillus oryzae]
  misc_feature (23)..(525): NCBI GI: 171694568 Blast Desc: protein product [Podospora anserina] gi|170947526|emb|CAP59687.1| protein product [Podospora anserina]
  misc_feature (29)..(519): NCBI GI: 145253775 Blast Desc: An17g01710 [Aspergillus niger] gi|134083972|emb|CAK43067.1| protein product [Aspergillus niger]
  misc_feature (40)..(509): NCBI GI: 85090908 Blast Desc: NCU09876 [Neurospora crassa OR74A] gi|28920021|gb|EAA29407.1| conserved [Neurospora crassa OR74A]
  misc_feature (39)..(333): NCBI GI: 169618665 Blast Desc: SNOG_12526 [Phaeosphaeria nodorum SN15] gi|111059219|gb|EAT80339.1| SNOG_12526 [Phaeosphaeria nodorum SN15]
  misc_feature (30)..(519): NCBI GI: 169765195 Blast Desc: [Aspergillus oryzae RIB40] gi|83764923|dbj|BAE55067.1| protein product [Aspergillus oryzae]
  misc_feature (10)..(522): NCBI GI: 116182948 Blast Desc: CHGG_02102 [Chaetomium globosum CBS 148.51] gi|88186399|gb|EAQ93867.1| CHGG_02102 [Chaetomium globosum CBS 148.51]
MDSSTSSSSSSIFDEKALTHSTLTAATFPEKALSPIPSSQKPYHVFTQREKWILVFIIGAAGLFSGLSSNIYFPAENQIAKDLSISLSLVSLTITSYLIIQGISPVFWGSLADSIGRRPIYIASFSVYIISNIGLSFSPNFAVLLLFRGLQSAGSASTVSIGNGVIQDIALPSERGGYISLYQAIRNFSIAVGPVLGGALSNSRGFRSIFVFLLIVSSLVLSMIVLILPETLRTIAGDGSYRLSGVYKPLVNYLKKGSDYIQDPPPGLVRKKITLCTFTAPLKLLIEKDILLHLVFGGVIYTIWSMVTATTSGLLRAAFSLNELLIGLCFLSNGFGTIVGSAIIGKLMQRDFRHAETAYKSANRLPADYKIPPKELPVDFSIERARLRHLPWITVLFIVSTGIYGFTIAPSSVTSRPGWIAVPLLLQFLIAATSNAVFAMNQTIVSDLCPGKGASSTAINNLVRCELGAIGVAVVQHIVDRFGPGPTFLGLSLFTVACIPIALLNWVYGQRWRAARTMRQEKLSG

SEQ ID NO: 9644 - DNA, 3058 bp, Muscodor strobelii
  misc_feature: SGI EST ID NO. CUFF.22937.2
  misc_feature: Variant of the nucleotide sequence at SEQ ID NO 9642
gactaaccatagttcagacacttctctatctccagtacctgctcttggtacactatcatttcttcgtttcaacatgctcgtgtgttcgtttgagatctactatggcccaacctgcctccggtattgaagtcgaaacacgctacaactcgacgaggaaccgctggtgatagtctcactcttcgacaacatgtcttggacggcccacctgctcttgcacgttattacagttgtacatacgggtaatactaccttccacctctgcagagctttctgcgggtttgtttttattttctctacatgtgctcgcttactgtgggaatcccaactcgctagcaaatttgcccccattatactaccttccgacttgacacgcgcctcgtgtcattggcctctgggacttattatgaagatatagagtccaccagtgataccgatccgaatacggctccgcctcacacaagtagagcattcaagaaattaagcgcatgagtacgacgatcggtggagttgctcactttagactaatatctcgtcgtggatgattatggcctgtgcgccggcggctctgataacaggagaaatccaccttcacctttcgctgtcatagtatttgacttcgacagaacctgagggagtataaggggaacgatgaccctcaagatggcgtttctggtctgaggctgaaaccttagtgctgacgaagaagcgagcttccaaggtataacggacggctatctaccttgttttccatgattgtaggaaggataccaaattttcaacacgcttcccaagacacaaggagaatggactcgtctacttcctcctcatcctcatctatattcgatgagaaggctctcactcattctacgctcaccgccgctacattccctgagaaggcgttgtctcctattccttcttcgcaaaaaccctatcatgtcttcactcaaagggaaaaatggatcctcgtgttcatcatcggcgctgcagggctcttttctggcttatcgtccaacatttacttcccagcagagaatcaaatcgccaaggatcttagcattagtttgagtctcgtctcgttgaccatcacctcctatttgatcatccaagggatctcgccagttttctggggttcgctcgcggattctatcggacggcggccgatatacattgcctcattttcagtttacatcatatccaatattggcctaagtttctcgcccaattttgctgtgctgttattgttccgaggtctgcaatcagcaggcagtgcctccaccgttagcatcggaaatggagtgattcaagatattgctttaccatccgagagaggaggatatatcagcttgtaccaagccatacgtaacttcagcattgctgtaggccctgtcttgggtggtgctttatcaaactctagggggtttcgatcaatctttgtgtttctattgattgtctcgtccctggtgttaagcatgattgttttgatcttgccggagacactgcgaaccatcgccggcgatggttcttataggcttagcggtgtgtataagccgctcgtcaactacttgaaaaagggatcggattacatccaagaccctcctcctggtcttgtccgaaagaagatcactctttgcacattcacagctcctctaaagctgttgatcgaaaaggacatactgttgcacttggttttcggaggtgtcatctacacaatctggagcatggtgacagctacgacgagcgggttgctccgggcggctttcagcctcaacgagctcctcattggtctttgtttcttatccaatggatttgggacaattgtcgggtctgcgattattggtaaactcatgcagcgggatttcaggcacgctgagacagcttataaaagtgccaatcgactcccggcagattacaaaataccacccaaggagttgccagtcgacttcagcatagagcgtgctcgtctccggcatctaccgtggattaccgtccttttcatagtatcaacgggcatatacggcttcacgatcgcaccatcatcagtgacctcacggccaggctggatagcagtaccgctcttgctacaattcctcatcgcagcaacaagcaatgctgtgtttgcaatgaatcagactatcgtttccgatttgtgtcctggtaagggagcaagttcgacagctatcaacaacctcgtacgatgtgagctgggcgcgatcggtgttgctgtcgtccagcacatcgtcgacagattcggtcccgggccaaccttcttaggtctttctctttttactgtagcctgcatacccatagcattgctcaactgggtttacggccaaagatggagagccgcgagaactatgcggcaagagaagttgagcgggtagacgagcaagttttcctcagtgcgacgcattttcttggcgcgattatgccatacgtacaacaacatggtatacttaggctggagcgagcgagcgcgctttttcagatttcatggatagaaggctcaagagcaggctggatttgcatcatggtgcaaaagcatggatggagttgggacacgatcttcaagacaatagagcaagctggacgatgctgttatacagcttggtgcttccttgctatagatagaatttccaagatcataggtagcaggatgactttaacttacagaccactagtgcaggcgggctatggtacttgatttaccagcaagaacgtgcctaacctgaatcaaaattaagctacttcttcttggatattcaccgctataaagtatatgtactatatgtagttatgactttgtagttaaacaaatatggcgagatgccttattttccgagccaacatcaaaattgtggactttaaggtattgaaaattctacaaccttcgatggcgctgtccgtgtatagcgttcccagtaggccgcgtagattattttgttacaatgcgtttgggttgacctttgcgccataaaacaaaagttttgacaatggcccgaacttggtcgttgcttctcaattctatattatacatgcggccctaccatctgcaacccta

SEQ ID NO: 9645 - DNA, 2445 bp, Muscodor strobelii
  misc_feature: SGI cDNA ID NO. 563026
  misc_feature: Reduced expression when VOC is produced
  misc_feature: Encodes the peptide sequence at SEQ ID NO 9646
atgaacggcatgcacagcccgtttgggcagcccagcccgtggcaggagttcaagagccccgacgggcgcgtctactactacaaccccgtcaccaaagtcacgcaatggaccaagcccgacgagatgatgaccccggccgagcgggccctcgcccaccagccgtggaaggagtacacggccgaaggtggccgcaaatactggtacaacaccgagaccaagcagagctcctgggagatgcccgacgcctaccgcaaggcactgggccaagacgcgaaccagcccaccaccccggccactcccttcggtggccccgctgcctcgttcccgccctccggctacgaccaccactcccgcgaccaccgtgatccgctgcccgagtcgcgtcagctgggctatggcaacgacccccgcctgcccgcgttcgtgcccgccaccaacgaacccgagtatctgaatgccgaggaggccgaagccgccttcaccaagctcctgcgtcgcagcggcgtgcagcccgactggtcgtgggaccaggccatccgcgccaccatcaaggacccccagtaccgtgccatcaaggaccccaaggacaggaaggccgccttcgagaagtactgcgatgacatgatcatccaggacaaggagcgtgcaaaggacaggctcgccaagctccgcgccgacttcgccaccatgctcaagagccaccccgagattaagcactacacccgctggaagacagcccgtcccatcatcgagggtgagaccatcttccgctccacgaacaacgaggaagagcggcagcagcttttcgaggactacattgtcgagctgaagaagactcatctcgagaacgaggccaatgtccggaaggacgccctcgacgggctcaatgctctgctccccaagctgagcctggagccctacacgcgatggtccgaggcacaaggaatcctgaaggccactgctcccttccagaacgatgacaagtacaaatcgctctccgacaccgacgtcctcactgcgttccaaaaccacataaaatctcttgagcgggttttcaacgaatcgcgtcaggcccagaagaacaagaagttccgcatcgagcgcagaaatcgcgatgcttttgttgacctgctccaagaactacgcaaagccggtaagatcaaggccggcacgaaatggagccagctgtttccgcagatcgagaacgacgagagattcagggctatctgtgggcaacctggctctactccgctggacctgttttgggatgtagtcgaggaagaggagcgagctcttcgcggtatcaggaacgacatcttagatgtgttagaagacaatcgctttgagtttacccccaagacaacgttcgaagacttcattgccgtcttgaaaaatgatcgacgcagcgctaacattgaccgcgatatactaacgctaatctttgaacgactccaagagaagaggtctaaactatcttccgacgatgacaagtatgccgagcggcaacagcgtagagctgtggacgatcttcgctcctacattaaacatttagaacccccgatcgcggccagtgatacctgggagaaagttcgaccccgtcttgcccgagctaccgagtttcaggccgtcacgtcagaagaagctcgcagaggcgcattcgaaaaagtccttcgccgcgcgagagaccgagaagacgaggagcgagagcgtcacaagcgccgagaccgatctcctgaccggagcgccattagggagcgagagaagggtgatcggtcccaccgaagtgatcgcgttcggtctagtcgccatagtcggagccctgagcctgatgcgtatgaagcagatcgtcgaaaagctatcgctgaacgcgagaagaatttccgtaagtcaagcatggctgaaagttttctgtctgatacccgcccctcggagccttatcgagagcgtgacatccgagaacgcgacagggatcgtgatcgtgaccgagaacgagaacgagaacgagaacgcgatagagaacgcgaccgggatagagagcgagatcgagacaggcatcgtgagcgggaaagagaacgagacagggagtatgctccccgatccagacgagacgaagctcctagccattacgatagagagaggcgggaccgggaagaagagcgcgagagatcataccgtcgtcgagtggataaagctcctgtggaagaacttccgtacggcgatgagcggccaagttcatcgaggcgtcgcaaggctgataccgaagtcgatgatcgtcgagattcgagagattctaagagactgaagagagagaggactcctcgtgagcgttccccccatcgtgagagccgccataagaccaagacgccacctgcagctcgaataccagtcaaggaagatcctggagttcactccggcagcgaagaaggggaaatcgaagagaactag

SEQ ID NO: 9646 - protein, 814 aa, Muscodor strobelii
  misc_feature: SGI Peptide ID NO. 563026
  misc_feature (222)..(272): Pfam Id: PF01846 Pfam Desc: FF domain
  misc_feature (155)..(204): Pfam Id: PF01846 Pfam Desc: FF domain
  misc_feature (369)..(424): Pfam Id: PF01846 Pfam Desc: FF domain
  misc_feature (10)..(39): Pfam Id: PF00397 Pfam Desc: WW domain
  misc_feature (51)..(80): Pfam Id: PF00397 Pfam Desc: WW domain
  misc_feature (14)..(631): NCBI GI: 255940118 Blast Desc: Pc16g04770 [Penicillium chrysogenum Wisconsin 54-1255] gi|211585451|emb|CAP93147.1| Pc16g04770 [Penicillium chrysogenum Wisconsin 54-1255]
  misc_feature (1)..(631): NCBI GI: 225682814 Blast Desc: formin binding protein (FNB3) [Paracoccidioides brasiliensis Pb03]
  misc_feature (1)..(631): NCBI GI: 226290258 Blast Desc: conserved [Paracoccidioides brasiliensis Pb18]
  misc_feature (1)..(631): NCBI GI: 115491359 Blast Desc: ATEG_00221 [Aspergillus terreus NIH2624] gi|114197167|gb|EAU38867.1| ATEG_00221 [Aspergillus terreus NIH2624]
  misc_feature (1)..(641): NCBI GI: 46125445 Blast Desc: FG07100.1 [Gibberella zeae PH-1]
  misc_feature (1)..(641): NCBI GI: 256732624 Blast Desc: NECHADRAFT_37667 [Nectria haematococca mpVI 77-13-4]
  misc_feature (1)..(638): NCBI GI: 39945240 Blast Desc: MGG_04602 [Magnaporthe grisea 70-15] gi|145021457|gb|EDK05586.1| MGG_04602 [Magnaporthe grisea 70-15]
  misc_feature (1)..(641): NCBI GI: 85111298 Blast Desc: NCU03062 [Neurospora crassa OR74A] gi|28925614|gb|EAA34634.1| NCU03062 [Neurospora crassa OR74A]
  misc_feature (1)..(803): NCBI GI: 156052897 Blast Desc: SS1G_06616 [Sclerotinia sclerotiorum 1980] gi|154704394|gb|EDO04133.1| SS1G_06616 [Sclerotinia sclerotiorum 1980]
  misc_feature (1)..(641): NCBI GI: 116180356 Blast Desc: CHGG_00806 [Chaetomium globosum CBS 148.51] gi|88185103|gb|EAQ92571.1| CHGG_00806 [Chaetomium globosum CBS 148.51]
  misc_feature: Useful for introducing or modulating the production of volatile compounds
MNGMHSPFGQPSPWQEFKSPDGRVYYYNPVTKVTQWTKPDEMMTPAERALAHQPWKEYTAEGGRKYWYNTETKQSSWEMPDAYRKALGQDANQPTTPATPFGGPAASFPPSGYDHHSRDHRDPLPESRQLGYGNDPRLPAFVPATNEPEYLNAEEAEAAFTKLLRRSGVQPDWSWDQAIRATIKDPQYRAIKDPKDRKAAFEKYCDDMIIQDKERAKDRLAKLRADFATMLKSHPEIKHYTRWKTARPIIEGETIFRSTNNEEERQQLFEDYIVELKKTHLENEANVRKDALDGLNALLPKLSLEPYTRWSEAQGILKATAPFQNDDKYKSLSDTDVLTAFQNHIKSLERVFNESRQAQKNKKFRIERRNRDAFVDLLQELRKAGKIKAGTKWSQLFPQIENDERFRAICGQPGSTPLDLFWDVVEEEERALRGIRNDILDVLEDNRFEFTPKTTFEDFIAVLKNDRRSANIDRDILTLIFERLQEKRSKLSSDDDKYAERQQRRAVDDLRSYIKHLEPPIAASDTWEKVRPRLARATEFQAVTSEEARRGAFEKVLRRARDREDEERERHKRRDRSPDRSAIREREKGDRSHRSDRVRSSRHSRSPEPDAYEADRRKAIAEREKNFRKSSMAESFLSDTRPSEPYRERDIRERDRDRDRDRERERERERDRERDRDRERDRDRHRERERERDREYAPRSRRDEAPSHYDRERRDREEERERSYRRRVDKAPVEELPYGDERPSSSRRRKADTEVDDRRDSRDSKRLKRERTPRERSPHRESRHKTKTPPAARIPVKEDPGVHSGSEEGEIEEN

SEQ ID NO: 9647 - DNA, 3430 bp, Muscodor strobelii
  misc_feature: SGI EST ID NO. CUFF.22823.0
  misc_feature: Variant of the nucleotide sequence at SEQ ID NO 9645
cgggactcaaccacattccttttgcggtggggctgggaggtacataatgtaccattccacaaacaacattgaaactgaggctactacatgccgtactgagacatgatgtacctatgtacctaagctagtggctggtaaggattctagaatcgacctccaacaaatttcggccagtcttgtcgcatcgcatcgcagcaccgtcgcaccgccaacgtcttcccacactggcttgtcgctgccaactgacgactaacacacgacgacagagctgccatcgacagcggccatcaccatgaacggcatgcacagcccgtttgggcagcccagcccgtggcaggagttcaagagccccgacgggcgcgtctactactacaaccccgtcaccaaagtcacgcaatggaccaagcccgacgagatgatgaccccggccgagcgggccctcgcccaccagccgtggaaggagtacacggccgaaggtggccgcaaatactggtacaacaccgagaccaagcagagctcctgggagatgcccgacgcctaccgcaaggcactgggccaagacgcgaaccagcccaccaccccggccactcccttcggtggccccgctgcctcgttcccgccctccggctacgaccaccactcccgcgaccaccgtgatccgctgcccgagtcgcgtcagctgggctatggcaacgacccccgcctgcccgcgttcgtgcccgccaccaacgaacccgagtatctgaatgccgaggaggccgaagccgccttcaccaagctcctgcgtcgcagcggcgtgcagcccgactggtcgtgggaccaggccatccgcgccaccatcaaggacccccagtaccgtgccatcaaggaccccaaggacaggaaggccgccttcgagaagtactgcgatgacatgatcatccaggacaaggagcgtgcaaaggacaggctcgccaagctccgcgccgacttcgccaccatgctcaagagccaccccgagattaagcactacacccgctggaagacagcccgtcccatcatcgagggtgagaccatcttccgctccacgaacaacgaggaagagcggcagcagcttttcgaggactacattgtcgagctgaagaagactcatctcgagaacgaggccaatgtccggaaggacgccctcgacgggctcaatgctctgctccccaagctgagcctggagccctacacgcgatggtccgaggcacaaggaatcctgaaggccactgctcccttccagaacgatgacaagtacaaatcgctctccgacaccgacgtcctcactgcgttccaaaaccacataaaatctcttgagcgggttttcaacgaatcgcgtcaggcccagaagaacaagaagttccgcatcgagcgcagaaatcgcgatgcttttgttgacctgctccaagaactacgcaaagccggtaagatcaaggccggcacgaaatggagccagctgtttccgcagatcgagaacgacgagagattcagggctatctgtgggcaacctggctctactccgctggacctgttttgggatgtagtcgaggaagaggagcgagctcttcgcggtatcaggaacgacatcttagatgtgttagaagacaatcgctttgagtttacccccaagacaacgttcgaagacttcattgccgtcttgaaaaatgatcgacgcagcgctaacattgaccgcgatatactaacgctaatctttgaacgactccaagagaagaggtctaaactatcttccgacgatgacaagtatgccgagcggcaacagcgtagagctgtggacgatcttcgctcctacattaaacatttagaacccccgatcgcggccagtgatacctgggagaaagttcgaccccgtcttgcccgagctaccgagtttcaggccgtcacgtcagaagaagctcgcagaggcgcattcgaaaaagtccttcgccgcgcgagagaccgagaagacgaggagcgagagcgtcacaagcgccgagaccgatctcctgaccggagcgccattagggagcgagagaagggtgatcggtcccaccgaagtgatcgcgttcggtctagtcgccatagtcggagccctgagcctgatgcgtatgaagcagatcgtcgaaaagctatcgctgaacgcgagaagaatttccgtaagtcaagcatggctgaaagttttctgtctgatacccgcccctcggagccttatcgagagcgtgacatccgagaacgcgacagggatcgtgatcgtgaccgagaacgagaacgagaacgagaacgcgatagagaacgcgaccgggatagagagcgagatcgagacaggcatcgtgagcgggaaagagaacgagacagggagtatgctccccgatccagacgagacgaagctcctagccattacgatagagagaggcgggaccgggaagaagagcgcgagagatcataccgtcgtcgagtggataaagctcctgtggaagaacttccgtacggcgatgagcggccaagttcatcgaggcgtcgcaaggctgataccgaagtcgatgatcgtcgagattcgagagattctaagagactgaagagagagaggactcctcgtgagcgttccccccatcgtgagagccgccataagaccaagacgccacctgcagctcgaataccagtcaaggaagatcctggagttcactccggcagcgaagaaggggaaatcgaagagaactagtgacacaggatgcaacctccgaactaggacgaacacatttgcgtcgcaccattaagagaacggcatattaatacaagatgggcgctaagcactattctatctttttcgacggactccccgcccctttttgcgttttgcgctcaccgtactactatttgacttctcatgatacggaatggatacggaatgagaacagcagctacatcaatttgtctcggctacgggctcgggaactctaccgttatttgcaagtacgtgcgtaatatctgagagcgcccttgacatttgggagtttgatgactcgacttgcaccatgcagttcggctatcctctcggcgaatcgaaccgcctcgagcaagagacctcttcatgccggatttccttcgtacgtgtggcacgttcatccgcaatcctgctgggtaagggtatctcactctttatagaaagacagccccacaacaacctgacaagcctttccttctcgttctttgcggccttattgccaatcggctgaggcggaaattagctaaagggggaggatcacatgaattcgtaggcatctactgaaatactcggtgtgtatcaacctttcttatcttccgattctcccttgagcgacaaaagagtcgtttgaatttgatcaactgtagtacatagcccatagccttaaatttgaagaaaattgaagctata

SEQ ID NO: 9648 - DNA, 3480 bp, Muscodor strobelii
  misc_feature: SGI cDNA ID NO. 563027
  misc_feature: Reduced expression when VOC is produced
  misc_feature: Encodes the peptide sequence at SEQ ID NO 9649
atggcggccgtgcaagcgcaagagtctgtcaaagacatgtccatgtctcctttgtctcccgcctctgcggaccagtctgcagcctctccgggaccccaagcaggcacatcccaccaacgccaccaacaccgcgctcaccacactcacccctcgctttccgccctttctgagacttcccgtgcttcatctgatgtgtcctcccacaccccgttcccctccctcgccgactactcgccctcgctcagctcctttcccacccctctgtcgtctgtttcgagcccgcgaaacgccaaagggctcgcgctgaacaaccgggccaccttctcggctgcccagccgattcgacgcaagccgctgtcctcgaccgcctcgtccattgccacgcggtattcctcgggcgagtatctggccagcgccaccagcgacaccagcgacctgccgcggccggaccagagatacgaccgctccttctccttggacagcccgaccgtctacgacttcccccaggcacaggtcgagcctatgtctcgcgccggccctcgggaatccgccacgacgaagccaccaggcgcgactgacgcagtggctccagaccaccaagaccaccacagcaagaaatctcccgagcacaggcaccaatcgccgcttgtttctgtttctgcttctgtttccgctcctcttcccgctgctgcagacgctgcagacgctgctccggctgtcagaccgggtcaaggcagacgcccagacctgcgggacggcaaccctgcacatcttcaaacaacaaccgcatctgactcgtcgcagcccgacgagcacacgctgtatgacgcactattggccgacgacgacgacgatccccccagcgacaacatcctcgacggctaccaatccgactcgtccgacagtgtcacccacagccctgctcatcagaatatgtctctgcacatctcccgcaaacccataccacagcacttgaatctgcaatccgtcgaaccgactctggtccgcaccaacagcaacgaactcaagacacccaacaccgacaagcctctgcccaaatccccgagttcttccaaaatcggctccttcttcgcctgggcttcgtcaccgcccatcccggactcgcccgagaagacatactcccccttaccttcgccctacaattttcccaagccgcctggcgcaccagatgcatcccctatcacagcagcaggaccacaatcactactcgacgccccaaaggcgcagtttggctcgcccaactctagggaatactgcgaatcctacctggttactcccaccgctgggtcaatagacccggcagagattgacgagatggaagacgaactcaaggccatctccgctgagctggccgcgtccatccggcgtgagatggacctcgaagaccttgtggacaggctgcaggcagagaaggagaaccccacaacagctggaaataagaggactagtgactacttttcagactcgggctacagctcggccaaattcagcgagtatgaacaatcgagagaggagatagaaaagattcagcggagatcagagcaggaaaaggcccaactccgactcgagctgacaaacaaactccaagacgaacgactaagaagacagcagatggacgaccagatccgtgaactgtcagctaaggcgtcacaaatcgatcttgttgcggttgctgatgctgatgccggaggccgcgtcaaagagctggaggctacctgcggaaacttgcgacggaagctttctgacgaacgacaagttaaggacaacttcgaagacttgctgtctgcgctccgcggtgagcttcgggatgcttcaaatgagcgggacaatctccgtgacgagattgtgccccaacttcgcgcacgtgtcgaaggcctcgaaagccaggctgcagaacttgaaaaaatgacatatgaatctaccaagatgcagcaggaacttctgagcctgaaaaccgaaaacaccaatctgaaacagaatcagatggacagcattactgaggaaggcgacgtagtccgatcctcgctctctcgttcagcctcgctttcgcgttccaactctgtagggggctcgtcattcagactccagcgaccaccgtctggtctctcgagatccaagacaatcaaaagctccgagtcccgtgaacagttatcagagcgtctcaaagacgtcgaggagcagcgtgatgcgctgcaccgggccttgaagaatctactcgagagacaggaacatcaaaatcgcgagaatcaaaagaaaatacggttcctagaaacagagcgggagcgtatcttgacagcctcgccgcaaaaggccggattccagcgagaagtcactaacctccggactgagataactgtgctgcgacgacgagctgaagaggctctggaccaaaaatggcaggtcgagaagggcctcgccggtctcaaaatggacctcgaccgtgccgaacaagaagtagcatccctacagaagctgctcggggagaaggatatactcattcccccggctctgcaccggtcgagtagtggaagcgatgaactcgcctttccggtgacttcagattccctcatgacagcatatcaggatctccaggcagcttatgctgattccattgaacgcatcagaaacctcgaggctggaaccgttagcgatgagaaaactcaggtcgccatcgagaaactggaagatgcattgtcttccgctgtttcagaacgtgacctggctaggaatgaaattgtttcctaccaggagcaactgcaattcctcagggccggcgagcagacgtatttgcaatcagagaaagagctcgccgatgagttgcaagagtcagcacgccgcatcgaagagctggccatacaggttcaacagcaactctctacaaatcagcagttgcgccagcgaatcgcaactatcgtagcacggggcgaagccgaccagaaggccaacgtggagcagatcacaaacatgcaggcacgtctacgtagtctggaagagaagcttgaggtagcacaggcagcgacggaggacagagtcgcccgacatgaagaagagatgtctgtgctcaaggaaagccataatgctcaactcacacgactccgtgatggtctgcgctcgccacgtaccttcccgggcaagtctcctctttcgccattgtttacggcgccaggtgcacgatctccccgtctatccgggacgcgggcaggaccggcgatgaatgtatccgaggaaacgcaggttgataacctcagagctcgagtggccgaactggagaacgcgctgatggatgccgactcggagatgcagcaggtggtcgggcgcatgaacactgcgcagatcgaggtacttgaattgcaagaagaacgtgaagcagccatcaaccaaacacgaaagctcgaacgagaattgcaggctgagagggtaaaggccttcgaagagcgtttcaagacgctccaggcgtag

SEQ ID NO: 9649 - protein, 1159 aa, Muscodor strobelii
  misc_feature: SGI Peptide ID NO. 563027
  misc_feature (76)..(1157): NCBI GI: 116180774 Blast Desc: CHGG_01015 [Chaetomium globosum CBS 148.51] gi|88185312|gb|EAQ92780.1| CHGG_01015 [Chaetomium globosum CBS 148.51]
  misc_feature (39)..(1157): NCBI GI: 171687423 Blast Desc: protein product [Podospora anserina] gi|170943673|emb|CAP69325.1| protein product [Podospora anserina]
  misc_feature (296)..(1157): NCBI GI: 46107470 Blast Desc: FG00618.1 [Gibberella zeae PH-1]
  misc_feature (319)..(1157): NCBI GI: 256735195 Blast Desc: NECHADRAFT_74786 [Nectria haematococca mpVI 77-13-4]
  misc_feature (346)..(1159): NCBI GI: 145614564 Blast Desc: MGG_04575 [Magnaporthe grisea 70-15] gi|145021471|gb|EDK05600.1| MGG_04575 [Magnaporthe grisea 70-15]
  misc_feature (352)..(1159): NCBI GI: 156052851 Blast Desc: SS1G_06593 [Sclerotinia sclerotiorum 1980] gi|154704371|gb|EDO04110.1| SS1G_06593 [Sclerotinia sclerotiorum 1980]
  misc_feature (505)..(1111): NCBI GI: 261357498 Blast Desc: conserved [Verticillium albo-atrum VaMs.102]
  misc_feature (70)..(1157): NCBI GI: 85114277 Blast Desc: NCU02049 [Neurospora crassa OR74A] gi|28926461|gb|EAA35435.1| [Neurospora crassa OR74A] gi|38566905|emb|CAE76209.1| related to intracellular protein
  misc_feature (352)..(1128): NCBI GI: 169608309 Blast Desc: SNOG_07225 [Phaeosphaeria nodorum SN15] gi|160701618|gb|EAT85876.2| SNOG_07225 [Phaeosphaeria nodorum SN15]
  misc_feature (352)..(1128): NCBI GI: 189189342 Blast Desc: conserved [Pyrenophora tritici-repentis Pt-1C-BFP] gi|187972616|gb|EDU40115.1| conserved [Pyrenophora tritici-repentis Pt-1C-BFP]
  misc_feature: Useful for introducing or modulating the production of volatile compounds
MAAVQAQESVKDMSMSPLSPASADQSAASPGPQAGTSHQRHQHRAHHTHPSLSALSETSRASSDVSSHTPFPSLADYSPSLSSFPTPLSSVSSPRNAKGLALNNRATFSAAQPIRRKPLSSTASSIATRYSSGEYLASATSDTSDLPRPDQRYDRSFSLDSPTVYDFPQAQVEPMSRAGPRESATTKPPGATDAVAPDHQDHHSKKSPEHRHQSPLVSVSASVSAPLPAAADAADAAPAVRPGQGRRPDLRDGNPAHLQTTTASDSSQPDEHTLYDALLADDDDDPPSDNILDGYQSDSSDSVTHSPAHQNMSLHISRKPIPQHLNLQSVEPTLVRTNSNELKTPNTDKPLPKSPSSSKIGSFFAWASSPPIPDSPEKTYSPLPSPYNFPKPPGAPDASPITAAGPQSLLDAPKAQFGSPNSREYCESYLVTPTAGSIDPAEIDEMEDELKAISAELAASIRREMDLEDLVDRLQAEKENPTTAGNKRTSDYFSDSGYSSAKFSEYEQSREEIEKIQRRSEQEKAQLRLELTNKLQDERLRRQQMDDQIRELSAKASQIDLVAVADADAGGRVKELEATCGNLRRKLSDERQVKDNFEDLLSALRGELRDASNERDNLRDEIVPQLRARVEGLESQAAELEKMTYESTKMQQELLSLKTENTNLKQNQMDSITEEGDVVRSSLSRSASLSRSNSVGGSSFRLQRPPSGLSRSKTIKSSESREQLSERLKDVEEQRDALHRALKNLLERQEHQNRENQKKIRFLETERERILTASPQKAGFQREVTNLRTEITVLRRRAEEALDQKWQVEKGLAGLKMDLDRAEQEVASLQKLLGEKDILIPPALHRSSSGSDELAFPVTSDSLMTAYQDLQAAYADSIERIRNLEAGTVSDEKTQVAIEKLEDALSSAVSERDLARNEIVSYQEQLQFLRAGEQTYLQSEKELADELQESARRIEELAIQVQQQLSTNQQLRQRIATIVARGEADQKANVEQITNMQARLRSLEEKLEVAQAATEDRVARHEEEMSVLKESHNAQLTRLRDGLRSPRTFPGKSPLSPLFTAPGARSPRLSGTRAGPAMNVSEETQVDNLRARVAELENALMDADSEMQQVVGRMNTAQIEVLELQEEREAAINQTRKLERELQAERVKAFEERFKTLQA

SEQ ID NO: 9650 - DNA, 4429 bp, Muscodor strobelii
  misc_feature: SGI EST ID NO. CUFF.22856.0
  misc_feature: Variant of the nucleotide sequence at SEQ ID NO 9648
ctggtagaggcctggggggagggcttgaagtttcccccccttttgcacatttacacgcgcgctcttcacctcgaatccagctctcgaagtgctcatttgtggctagctatcacaggtgacgagaaacgggagatctcatttcccttgcagtcgtagccttggacctggcgggccccttggcgcggtacagacatcgcactcttgagcacgagacgttgcagatctgagcaaggcatgcgagcagagcggcaaacgtgggtgtcgtttgatgaagagcgagaagcgtaccggtaattaattacagtacagcgggcgtgaccaacatggcggccgtgcaagcgcaagagtctgtcaaagacatgtccatgtctcctttgtctcccgcctctgcggaccagtctgcagcctctccgggaccccaagcaggcacatcccaccaacgccaccaacaccgcgctcaccacactcacccctcgctttccgccctttctgagacttcccgtgcttcatctgatgtgtcctcccacaccccgttcccctccctcgccgactactcgccctcgctcagctcctttcccacccctctgtcgtctgtttcgagcccgcgaaacgccaaagggctcgcgctgaacaaccgggccaccttctcggctgcccagccgattcgacgcaagccgctgtcctcgaccgcctcgtccattgccacgcggtattcctcgggcgagtatctggccagcgccaccagcgacaccagcgacctgccgcggccggaccagagatacgaccgctccttctccttggacagcccgaccgtctacgacttcccccaggcacaggtcgagcctatgtctcgcgccggccctcgggaatccgccacgacgaagccaccaggcgcgactgacgcagtggctccagaccaccaagaccaccacagcaagaaatctcccgagcacaggcaccaatcgccgcttgtttctgtttctgcttctgtttccgctcctcttcccgctgctgcagacgctgcagacgctgctccggctgtcagaccgggtcaaggcagacgcccagacctgcgggacggcaaccctgcacatcttcaaacaacaaccgcatctgactcgtcgcagcccgacgagcacacgctgtatgacgcactattggccgacgacgacgacgatccccccagcgacaacatcctcgacggctaccaatccgactcgtccgacagtgtcacccacagccctgctcatcagaatatgtctctgcacatctcccgcaaacccataccacagcacttgaatctgcaatccgtcgaaccgactctggtccgcaccaacagcaacgaactcaagacacccaacaccgacaagcctctgcccaaatccccgagttcttccaaaatcggctccttcttcgcctgggcttcgtcaccgcccatcccggactcgcccgagaagacatactcccccttaccttcgccctacaattttcccaagccgcctggcgcaccagatgcatcccctatcacagcagcaggaccacaatcactactcgacgccccaaaggcgcagtttggctcgcccaactctagggaatactgcgaatcctacctggttactcccaccgctgggtcaatagacccggcagagattgacgagatggaagacgaactcaaggccatctccgctgagctggccgcgtccatccggcgtgagatggacctcgaagaccttgtggacaggctgcaggcagagaaggagaaccccacaacagctggaaataagaggactagtgactacttttcagactcgggctacagctcggccaaattcagcgagtatgaacaatcgagagaggagatagaaaagattcagcggagatcagagcaggaaaaggcccaactccgactcgagctgacaaacaaactccaagacgaacgactaagaagacagcagatggacgaccagatccgtgaactgtcagctaaggcgtcacaaatcgatcttgttgcggttgctgatgctgatgccggaggccgcgtcaaagagctggaggctacctgcggaaacttgcgacggaagctttctgacgaacgacaagttaaggacaacttcgaagacttgctgtctgcgctccgcggtgagcttcgggatgcttcaaatgagcgggacaatctccgtgacgagattgtgccccaacttcgcgcacgtgtcgaaggcctcgaaagccaggctgcagaacttgaaaaaatgacatatgaatctaccaagatgcagcaggaacttctgagcctgaaaaccgaaaacaccaatctgaaacagaatcagatggacagcattactgaggaaggcgacgtagtccgatcctcgctctctcgttcagcctcgctttcgcgttccaactctgtagggggctcgtcattcagactccagcgaccaccgtctggtctctcgagatccaagacaatcaaaagctccgagtcccgtgaacagttatcagagcgtctcaaagacgtcgaggagcagcgtgatgcgctgcaccgggccttgaagaatctactcgagagacaggaacatcaaaatcgcgagaatcaaaagaaaatacggttcctagaaacagagcgggagcgtatcttgacagcctcgccgcaaaaggccggattccagcgagaagtcactaacctccggactgagataactgtgctgcgacgacgagctgaagaggctctggaccaaaaatggcaggtcgagaagggcctcgccggtctcaaaatggacctcgaccgtgccgaacaagaagtagcatccctacagaagctgctcggggagaaggatatactcattcccccggctctgcaccggtcgagtagtggaagcgatgaactcgcctttccggtgacttcagattccctcatgacagcatatcaggatctccaggcagcttatgctgattccattgaacgcatcagaaacctcgaggctggaaccgttagcgatgagaaaactcaggtcgccatcgagaaactggaagatgcattgtcttccgctgtttcagaacgtgacctggctaggaatgaaattgtttcctaccaggagcaactgcaattcctcagggccggcgagcagacgtatttgcaatcagagaaagagctcgccgatgagttgcaagagtcagcacgccgcatcgaagagctggccatacaggttcaacagcaactctctacaaatcagcagttgcgccagcgaatcgcaactatcgtagcacggggcgaagccgaccagaaggccaacgtggagcagatcacaaacatgcaggcacgtctacgtagtctggaagagaagcttgaggtagcacaggcagcgacggaggacagagtcgcccgacatgaagaagagatgtctgtgctcaaggaaagccataatgctcaactcacacgactccgtgatggtctgcgctcgccacgtaccttcccgggcaagtctcctctttcgccattgtttacggcgccaggtgcacgatctccccgtctatccgggacgcgggcaggaccggcgatgaatgtatccgaggaaacgcaggttgataacctcagagctcgagtggccgaactggagaacgcgctgatggatgccgactcggagatgcagcaggtggtcgggcgcatgaacactgcgcagatcgaggtacttgaattgcaagaagaacgtgaagcagccatcaaccaaacacgaaagctcgaacgagaattgcaggctgagagggtaaaggccttcgaagagcgtttcaagacgctccaggcgtagaatgaagtctggacctgacgagcatgaattccaccaaggttccaaaagtttggcatatttctattgggtattaatgagcatttggacagcgagcctgttttttattgttttgggcttgattcatcgacactgcctccaaatggcattctctcgatcgacattttagcgaccattgagtgggggtttttcatgatccaactacgaagatatcagctacggctaccgtataatgcctcggttcataacacgaaggagatgtattaagcttaaatgcctaatgtttgtatcttagtacttatgtgtatttatattgggacaggctgtgggatgcaggcctgaaggggaaagtgtacatatattcagcggtggcaacatattagttcaagacagatgaacatgtacaactcacccattagtagttcgctttctcttttttgagtttgcaaagatggtgaggtctcagaagtcaggtactcttgaagaccattcccctcaagactctggcttgagtcggatgaagatttatggcaaggacccgatcagattaatgtcgtgtcagctaatgcataggtcattggcaacatctgcaagtcgataggaaccattatttcgggctgcaataggac

SEQ ID NO: 9651 - DNA, 1002 bp, Muscodor strobelii
  misc_feature: SGI cDNA ID NO. 563028
  misc_feature: Reduced expression when VOC is produced
  misc_feature: Encodes the peptide sequence at SEQ ID NO 9652
atggcagtcgtaggtggtccttcacttggccctattgtctcgtctgcagttactgcccagccttggctaggctggcgatggacacaataccttactgggattctgcaagctttcgttctgcttattgctgtcatcttcattgacgaaacttatccacccgctcttctggtaaggaaggctcgccgcttgcgacacgagacaggaaactgggctcttcacgcaaagttcgaggagtgggatgttagtatcgcggagctttgccgcaagttcttggtacggccgattcaacttctctgcacgccaatctgtttcttggtggccttatacgcttctttctgttacggtgtcctatggtacgtattgaatcagagcgtctcatcattcaacctgttatctgtgagaatagcatatgctgacatgtttcacaacatgcagctcggttccatacctttcatcttccataaggcccggggatggggtactgtcgtctccgaattacccttcattgccgtctttctaggcgcagttgttggcgccgggattaatgttgcgaatcagctattctataatgtagggtgtcgcgcgattcccgaaaagcgtctgccacccatgatgcttggagctgtcctgtttgcatcaggacagttcatcacggcttggacggctgaacctgagaacgcgccgtggatcgcgccggtgcttggtttgttccttgttggatgcggattcttcacaatatttcaggcagctttgaactatttggtcgatacctttacgatgtacgctgcgagcgctatcgccgcgaacacattcctgcgttcaggtttcgccactgcattcccactcatcatcatgccaatctataataatattggcattgggcccggggcttcgatattcgcagcattctccaccattttgctgccggtcccttttgtattttacatttatggtcgcaggatcagggctagtagtaaatggagtaaggcgagcgtattctag

SEQ ID NO: 9652 - protein, 333 aa, Muscodor strobelii
  misc_feature: SGI Peptide ID NO. 563028
  misc_feature (1)..(333): NCBI GI: 46114382 Blast Desc: FG03033.1 [Gibberella zeae PH-1]
  misc_feature (1)..(332): NCBI GI: 261355341 Blast Desc: polyamine transporter 1 [Verticillium albo-atrum VaMs.102]
  misc_feature (1)..(332): NCBI GI: 116206232 Blast Desc: CHGG_02409 [Chaetomium globosum CBS 148.51] gi|88183006|gb|EAQ90474.1| CHGG_02409 [Chaetomium globosum CBS 148.51]
  misc_feature (1)..(333): NCBI GI: 256721315 Blast Desc: [Nectria haematococca mpVI 77-13-4]
  misc_feature (3)..(333): NCBI GI: 189207262 Blast Desc: MSF membrane transporter [Pyrenophora tritici-repentis Pt-1C-BFP] gi|187976058|gb|EDU42684.1| MSF membrane transporter [Pyrenophora tritici-repentis Pt-1C-BFP]
  misc_feature (1)..(333): NCBI GI: 164422981 Blast Desc: NCU09580 [Neurospora crassa OR74A] gi|157069897|gb|EAA30455.2| NCU09580 [Neurospora crassa OR74A]
  misc_feature (1)..(333): NCBI GI: 169619343 Blast Desc: SNOG_12867 [Phaeosphaeria nodorum SN15] gi|160703799|gb|EAT79667.2| SNOG_12867 [Phaeosphaeria nodorum SN15]
  misc_feature (1)..(333): NCBI GI: 212542823 Blast Desc: MFS multidrug transporter, [Penicillium marneffei ATCC 18224] gi|210066473|gb|EEA20566.1| MFS multidrug transporter, [Penicillium marneffei ATCC 18224]
  misc_feature (1)..(332): NCBI GI: 255940104 Blast Desc: Pc16g04700 [Penicillium chrysogenum Wisconsin 54-1255] gi|211585444|emb|CAP93140.1| Pc16g04700 [Penicillium chrysogenum Wisconsin 54-1255]
  misc_feature (1)..(333): NCBI GI: 242767946 Blast Desc: MFS multidrug transporter, [Talaromyces stipitatus ATCC 10500] gi|218724666|gb|EED24083.1| MFS multidrug transporter, [Talaromyces stipitatus ATCC 10500]
  misc_feature: Useful for introducing or modulating the production of volatile compounds
MAVVGGPSLGPIVSSAVTAQPWLGWRWTQYLTGILQAFVLLIAVIFIDETYPPALLVRKARRLRHETGNWALHAKFEEWDVSIAELCRKFLVRPIQLLCTPICFLVALYASFCYGVLWYVLNQSVSSFNLLSVRIAYADMFHNMQLGSIPFIFHKARGWGTVVSELPFIAVFLGAVVGAGINVANQLFYNVGCRAIPEKRLPPMMLGAVLFASGQFITAWTAEPENAPWIAPVLGLFLVGCGFFTIFQAALNYLVDTFTMYAASAIAANTFLRSGFATAFPLIIMPIYNNIGIGPGASIFAAFSTILLPVPFVFYIYGRRIRASSKWSKASVF

SEQ ID NO: 9653 - DNA, 4495 bp, Muscodor strobelii
  misc_feature: SGI EST ID NO. CUFF.22846.0
  misc_feature: Variant of the nucleotide sequence at SEQ ID NO 9651
gctcagttacttgtactcgtgactgaatccagattgagaaatggaaacgaagctcagcctgacgtgcataaaacgaaactcagctcgtctgtgtaactgactggatagtcgagggtcacacatggtgcctcgtcaccgggtggccgggacagcgatggcatcaaccacgtggggaacgaacgatagaaggttgcagccatggaacccctgctctataacacatgtttctcaatttagctctttatctctagctgtggcgtctcttggactctggtctttcgtacgcacgctacatttatatgagtagacgtgttccgctcagatcaattgcgtcaattgcgattgcgaaagcaaatcgtttctctttgtatgcctactgcggaacagagatagatagaccttattccacctaagcctgcttttccgcgtgtgccatctcttggttcgaaacttcgagatgcgcttcgcaactaacctcaaggcactagtgggtgtgctggtataccaagcagctactgccgaaacaccctattcaatatggatggcaaagggtatcatgtctcgtaatcagggcgtgtggactggtacatctggatcctcagaggccttgcaagccggtttcgtccagaaggcttttaccgcacttgtcaagcagtatcccgaacatgacacgaaaaagattcagcaatacattcgcaccagcgcggcctcatcggtgccgttcctgtcaaacgcaaccgaggacgcactcaccctgccgctggaccgtctatctaacggcaatgcactcctcactcttccttctagcgataacacatcatctcttctcaacacagcagaagccctacgagaaagcatcgatctcaaccgtctcacgccagaaggcggtctatggtactacgtctatcctcaatggagctatctggacggcatgtattcgctcgcaccgttctacacactctacacactcaccaccacggcgtctgggagcgacggtgcgaaaagtgccctcgacgacatggtattccagatcgatcttctttggaaccacacttttcatgccccactgggactgctcaaccatggatacgatgcatcgcgcactgctgtgtgggcaaacaatatcactggctccagtcctcatgtctggggtcgaagcttgggttggtacgcaatggcgcttgtggatacgatcgagattctcgcagaagcgccgtgcaagtacaggaaacagttactgaagaaattcaatgccttgatgcccgcaattatcaactctgtagactctcaatcaggaggttggtggcaggttatggacaagccaggtcgaaagggcaactatattgaatcaagtggcaccgctatgttcgcttacgcactgctcaagggtgcacgcctcggatatctgccacaggatatcgcaccccatgcgtcaagtgttgctgtccgagctcagagctacttgacaaacaattttgtggtcagggaagcaaatggcactttgagttacaacggaactgtagccgtctgcagtctcaactcgactgcaacttacgactactacattggccagccaatcttgtataacagtgttctagggtccgctgcctatatcttagcctcgctcgaggcagaggctctacggtcatcatgaacagacattatcctttcggcacataccatggtcagcatcaggtatggatttaagggtagatccgtgagattaggtcgatcaatcccagagatccgacgggccaaaagtataccataactgacgggcttgggcaagacttgtgatttcatccaatttccgaacacggttgacacgtgtaagccggctccaaagctcggcatatcagttgaccttggtagatagagccaagtcataatggccgctgcttggtgagaaacatgaagtccagtatttgagtttaggtgcttcgccgcactcaggctgaaacagcttataacgacagagggcttatcaacacaatgatctcaacaggcttgaaatcctctagcctttctgccaatgtctctctcgccttgcagtagataattcaaatcattgttaataaagccatttcaagtatcacaatcaatactcatcgcggcccgcacttttgtgtgtcgcgactatctagcatgtctccgtaaggtagttgtttgtacgagtggccttaaaaaaggggggtgtctccattcgaaatacagggcaaatgcaattttcacataaaagtcgacaacgacagtagtgttcggcatgacgtaaatatagtccatcaaccgtcagtgtttctagaacccccgtgagcgtccccagaaacaccaattgaactagggggactgctggcaggcttggcaggcacatatctagactttgggttggagaagaagcttacctaatacagactactcgtcaccattttcattcgccgtaccgccgagcacagttcaaagtctcttgctgttacagctcaagactacacaaaatgatccattcctacttcttcatgtattcggaattaactcggatcaggccctcggatcaatcggctatgttatattgtaccatccctagtacagtaatcagtgttatcatgttatgataagttatttatgtatgtgtgcatcaccgacgtcagtgacagtttcgttctgggcttagtcacttcgcgcttcggggtttcgacgaaagggcatttggagcaacttgtcgcttcctcgataggccgatggatggacctcaaaacttcatcgatgatggcatcacataaatttcatttttatctgccacttttcaattcgaacatgttggtagcagaaaacgcaacgagcgaaagtcttctccttcaattagagtaattgtacattatgtcccaactacagaatccacaccttgacgatgaaaaagcgaacgcccctcccatgggggacaacagtagctccacaggcacgccatcctcatgttgcgcagatgatgatgaaagggaacatgatggccatcgaccttgcggtagggaaatgagccgtgtgtctagtcatgctagccgtgtaagtggccggcaagcacccgcagaatctctcacaccagcactctcaagaagggatacgacgttatcccgcatacgatctcgcccacttgtgcctgcgtttactcatccactggctcatgcgaaaacgaaagaagatgtcctggtagatttcgagggtcctgacgatccctatcgtcccattaattggccaacaaagaaaaaagtgatcaccaccgtcatatatgggttggtgacggggacagctacttgggcgtcttcgtcatattccgcgggcaacgcgcaggtagcagacgagtatcacgttagtgaagaggtcgctatcttaggcacatccctatttctagttggatttggtctcggtccccttctctgggctcccctaagtgaggtttatgggaggcggacggccgtattaaccccgatgtttgtcgcacttgtgttttctttcgccacagcaacagcgaaagacctacagacagtcttgatcacgaggttcttcggcgcgttcttcgcttccgctccagttacgaacacaggtggcgttatgggagacttgtggcacgtataaaaagatcccgcgcgagttattttttgaccgtgcttctaagacatcctgctaacttttttatagtaagtgatctgaattatcagatattaaaaaccagccctttgttttaagccccgcggccctgcaaaaagtcgtgaaaaataactaacctgatacctttctggctgccagataccgcagaataccgtgggatcgcgatagcgggttacgcgatggcagtcgtaggtggtccttcacttggccctattgtctcgtctgcagttactgcccagccttggctaggctggcgatggacacaataccttactgggattctgcaagctttcgttctgcttattgctgtcatcttcattgacgaaacttatccacccgctcttctggtaaggaaggctcgccgcttgcgacacgagacaggaaactgggctcttcacgcaaagttcgaggagtgggatgttagtatcgcggagctttgccgcaagttcttggtacggccgattcaacttctctgcacgccaatctgtttcttggtggccttatacgcttctttctgttacggtgtcctatgtgagtgatcatctgttcgaagaaatgcgccggctatgccgggaatatgctgcagcgtgatggctgaagaaatgtactaatacgatacaatgcaccagacatgcagctcggttccatacctttcatcttccataaggcccggggatggggtactgtcgtctccgaattacccttcattgccgtctttctaggcgcagttgttggcgccgggattaatgttgcgaatcagctattctataatggtatgtgtgaaatcgtccggcctcgactcttcctcattttctccttctttcgcccttcctctttg

SEQ ID NO: 9654 - DNA, 1197 bp, Muscodor strobelii
  misc_feature: SGI cDNA ID NO. 563029
  misc_feature: Encodes the peptide sequence at SEQ ID NO 9655
atgcgcttcgcaactaacctcaaggcactagtgggtgtgctggtataccaagcagctactgccgaaacaccctattcaatatggatggcaaagggtatcatgtctcgtaatcagggcgtgtggactggtacatctggatcctcagaggccttgcaagccggtttcgtccagaaggcttttaccgcacttgtcaagcagtatcccgaacatgacacgaaaaagattcagcaatacattcgcaccagcgcggcctcatcggtgccgttcctgtcaaacgcaaccgaggacgcactcaccctgccgctggaccgtctatctaacggcaatgcactcctcactcttccttctagcgataacacatcatctcttctcaacacagcagaagccctacgagaaagcatcgatctcaaccgtctcacgccagaaggcggtctatggtactacgtctatcctcaatggagctatctggacggcatgtattcgctcgcaccgttctacacactctacacactcaccaccacggcgtctgggagcgacggtgcgaaaagtgccctcgacgacatggtattccagatcgatcttctttggaaccacacttttcatgccccactgggactgctcaaccatggatacgatgcatcgcgcactgctgtgtgggcaaacaatatcactggctccagtcctcatgtctggggtcgaagcttgggttggtacgcaatggcgcttgtggatacgatcgagattctcgcagaagcgccgtgcaagtacaggaaacagttactgaagaaattcaatgccttgatgcccgcaattatcaactctgtagactctcaatcaggaggttggtggcaggttatggacaagccaggtcgaaagggcaactatattgaatcaagtggcaccgctatgttcgcttacgcactgctcaagggtgcacgcctcggatatctgccacaggatatcgcaccccatgcgtcaagtgttgctgtccgagctcagagctacttgacaaacaattttgtggtcagggaagcaaatggcactttgagttacaacggaactgtagccgtctgcagtctcaactcgactgcaacttacgactactacattggccagccaatcttgtataacagtgttctagggtccgctgcctatatcttagcctcgctcgaggcagaggctctacggtcatcatga

SEQ ID NO: 9655 - protein, 398 aa, Muscodor strobelii
  misc_feature: SGI Peptide ID NO. 563029
  misc_feature (25)..(395): Pfam Id: PF07470 Pfam Desc: Glycosyl Hydrolase Family 88
  misc_feature (185)..(395): Pfam Id: PF07470 Pfam Desc: Glycosyl Hydrolase Family 88
  misc_feature (25)..(395): NCBI GI: 169598828 Blast Desc: SNOG_02220 [Phaeosphaeria nodorum SN15] gi|111069312|gb|EAT90432.1| SNOG_02220 [Phaeosphaeria nodorum SN15]
  misc_feature (34)..(395): NCBI GI: 189209305 Blast Desc: PTRG_10654 [Pyrenophora tritici-repentis Pt-1C-BFP] gi|187977078|gb|EDU43704.1| PTRG_10654 [Pyrenophora tritici-repentis Pt-1C-BFP]
  misc_feature (21)..(393): NCBI GI: 242791782 Blast Desc: cell wall glycosyl hydrolase YteR, [Talaromyces stipitatus ATCC 10500] gi|218718411|gb|EED17831.1| cell wall glycosyl hydrolase YteR, [Talaromyces stipitatus ATCC 10500]
  misc_feature (24)..(393): NCBI GI: 169779727 Blast Desc: [Aspergillus oryzae RIB40] gi|83773067|dbj|BAE63195.1| protein product [Aspergillus oryzae]
  misc_feature (1)..(393): NCBI GI: 212535002 Blast Desc: cell wall glycosyl hydrolase YteR, [Penicillium marneffei ATCC 18224] gi|210070056|gb|EEA24146.1| cell wall glycosyl hydrolase YteR, [Penicillium marneffei ATCC 18224]
  misc_feature (19)..(393): NCBI GI: 67527027 Blast Desc: AN3971.2 [Aspergillus nidulans FGSC A4] gi|40740252|gb|EAA59442.1| AN3971.2 [Aspergillus nidulans FGSC A4]
  misc_feature (29)..(393): NCBI GI: 259481450 Blast Desc: TPA: cell wall glycosyl hydrolase YteR, (AFU_orthologue; AFUA_2G14630) [Aspergillus nidulans FGSC A4]
  misc_feature (29)..(367): NCBI GI: 238500397 Blast Desc: conserved [Aspergillus flavus NRRL3357] gi|220693186|gb|EED49532.1| conserved [Aspergillus flavus NRRL3357]
  misc_feature (29)..(395): NCBI GI: 262095679 Blast Desc: glycoside hydrolase, [Phytophthora infestans T30-4]
  misc_feature (29)..(395): NCBI GI: 262101108 Blast Desc: glycoside hydrolase, [Phytophthora infestans T30-4]
MRFATNLKALVGVLVYQAATAETPYSIWMAKGIMSRNQGVWTGTSGSSEALQAGFVQKAFTALVKQYPEHDTKKIQQYIRTSAASSVPFLSNATEDALTLPLDRLSNGNALLTLPSSDNTSSLLNTAEALRESIDLNRLTPEGGLWYYVYPQWSYLDGMYSLAPFYTLYTLTTTASGSDGAKSALDDMVFQIDLLWNHTFHAPLGLLNHGYDASRTAVWANNITGSSPHVWGRSLGWYAMALVDTIEILAEAPCKYRKQLLKKFNALMPAIINSVDSQSGGWWQVMDKPGRKGNYIESSGTAMFAYALLKGARLGYLPQDIAPHASSVAVRAQSYLTNNFVVREANGTLSYNGTVAVCSLNSTATYDYYIGQPILYNSVLGSAAYILASLEAEALRSS

SEQ ID NO: 9656 - DNA, 4495 bp, Muscodor strobelii; identical to SEQ ID NO: 9653
  misc_feature: SGI EST ID NO. CUFF.22846.0
  misc_feature: Variant of the nucleotide sequence at SEQ ID NO 9654

SEQ ID NO: 9657 - DNA, 1029 bp, Muscodor strobelii
  misc_feature: SGI cDNA ID NO. 563030
  misc_feature: Encodes the peptide sequence at SEQ ID NO 9658
atgccaactcatcgcgacggcttgatagcggcaacagcccttttcatcggccttgatggcattgttgtttttgctcgcgtgtttacccgaactatattgatcaaaggcggctttggctgggatgatttctttctctgtctaacatatgtcgggtataccctcgcgttgtcttttggatttacagctggtaagtatccctacaagttttgcttgctgaagcttataattatcataatgcactatgggtacgctgctcctccaggcgatcaacaaccgtactataacccggcaaaggctacccagttcacatatgcaaaccaaaccactctctatatttctgcaggcttagtaaagattgccgtcgctcttgttctataccgtcttacgccaaagcgagtcttccgaagactgattgccgggtccgtggtcatcgtcgctatatggaccatcatcacggttattttcgcctcgtggctctgtgtccgaggggggacaagtaattgggccggctcagaaacatgcactcgtgttgcttactttcgcactatctcgaacatattcatcgattatttctacgcccttctacccattgccatcctttggaatactaagatgaagccaaaactcaaagcaatcgtggtattcttgcttggactgggtattttcgcgagttcggctacgatagttaaacttgttattatcgttaggcttccgtatgctagcggagaagaggctgaagggcttcattatgatcttgcactctgggcagacattgaactaggccttgctattcttgccgcatcttctgcggccttgcgtcctcttctcagacatctgtcgatcataaaggaaccaactgctaaggaaacaagccacggctcgaacgatagcggaccatatcatgaacttgtggctagtcgtcaaattaccaacacggaaagtcacgatggaaagagaaaaagccacgtaggacatcacgaacggcaacataatgcatcggcaaactcttccgacgatcacctcgtttag

SEQ ID NO: 9658 - protein, 342 aa, Muscodor strobelii
  misc_feature: SGI Peptide ID NO. 563030
  misc_feature (7)..(298): NCBI GI: 46125517 Blast Desc: FG07136.1 [Gibberella zeae PH-1]
  misc_feature (5)..(330): NCBI GI: 46126829 Blast Desc: FG07792.1 [Gibberella zeae PH-1]
  misc_feature (6)..(297): NCBI GI: 169763664 Blast Desc: [Aspergillus oryzae RIB40] gi|83770760|dbj|BAE60893.1| protein product [Aspergillus oryzae]
  misc_feature (8)..(336): NCBI GI: 145602753 Blast Desc: MGG_14167 [Magnaporthe grisea 70-15] gi|145011145|gb|EDJ95801.1| MGG_14167 [Magnaporthe grisea 70-15]
  misc_feature (20)..(294): NCBI GI: 46117316 Blast Desc: FG04500.1 [Gibberella zeae PH-1]
  misc_feature (5)..(279): NCBI GI: 256733374 Blast Desc: [Nectria haematococca mpVI 77-13-4]
  misc_feature (7)..(281): NCBI GI: 256730940 Blast Desc: NECHADRAFT_48436 [Nectria haematococca mpVI 77-13-4]
  misc_feature (8)..(311): NCBI GI: 259485899 Blast Desc: TPA: P-type ATPase, (Eurofung) [Aspergillus nidulans FGSC A4]
  misc_feature (8)..(277): NCBI GI: 121706204 Blast Desc: conserved [Aspergillus clavatus NRRL 1] gi|119399511|gb|EAW09939.1| conserved [Aspergillus clavatus NRRL 1]
  misc_feature (12)..(336): NCBI GI: 255938305 Blast Desc: Pc13g15280 [Penicillium chrysogenum Wisconsin 54-1255] gi|211584543|emb|CAP92597.1| Pc13g15280 [Penicillium chrysogenum Wisconsin 54-1255]
MPTHRDGLIAATALFIGLDGIVVFARVFTRTILIKGGFGWDDFFLCLTYVGYTLALSFGFTAGKYPYKFCLLKLIIIIMHYGYAAPPGDQQPYYNPAKATQFTYANQTTLYISAGLVKIAVALVLYRLTPKRVFRRLIAGSVVIVAIWTIITVIFASWLCVRGGTSNWAGSETCTRVAYFRTISNIFIDYFYALLPIAILWNTKMKPKLKAIVVFLLGLGIFASSATIVKLVIIVRLPYASGEEAEGLHYDLALWADIELGLAILAASSAALRPLLRHLSIIKEPTAKETSHGSNDSGPYHELVASRQITNTESHDGKRKSHVGHHERQHNASANSSDDHLV

SEQ ID NO: 9659 - DNA, 2399 bp, Muscodor strobelii
  misc_feature: SGI EST ID NO. CUFF.22958.1
  misc_feature: Variant of the nucleotide sequence at SEQ ID NO 9657
agggtggcccttcgcattaaacgacacgtacgagaaatttacattgttccaggaatgttatgcatcgcagtgtcgcccagctatgcagacaccatctgaagcacaatatttcgtcggttggtgtatgtcgaccttgaatttccacgaagttaccccagaactgcctttgatgcccaccagtgcagttcaccagttaacaatcaatagcgagtgcggccagccaaaagatcatttgaggaagataggagagcgagcgcatgaaatgacctgtttacggggtttgtgtataagcgaagaggcattaattagaagagcacagacacagtacaatttgaagaagaaaccaagattttcaatgtcaaggcctctcctgaagtctactgtactgtatttaaggtcgtatcagtctatttgccatgcctgcagttctgagtgaagcgagtggcagggttatcatacgtttctgcaatgcaacaagtgatgcctaccacctgccatcacacggtttcattgggtgcattctctagaataagcagccatgtcttgtcgatttttctcgactgcgaccgacctcaaacggcctcgaatctgcccgacgtcgtcgtacaagcgaatagatctaattctcatagaagactgacccttggcttctccaactcaccaacggaagatctggaggctggactctacatgcatcgcgcttatattctatataatatatcatggggcgacgttttcttgaccgctgcagcttattacttatgagagctttttagggctccgcgaaacatcagcctccgctgacagtatgccaactcatcgcgacggcttgatagcggcaacagcccttttcatcggccttgatggcattgttgtttttgctcgcgtgtttacccgaactatattgatcaaaggcggctttggctgggatgatttctttctctgtctaacatatgtcgggtataccctcgcgttgtcttttggatttacagctgtatgtaacccctgatcgaaaacatcaacacgggtagtcaaacagacatacccacgacgcataatgccacatcttactcacgtagactaataccttcacacgccagatgcactatgggtacgctgctcctccaggcgatcaacaaccgtactataacccggcaaaggctacccagttcacatatgcaaaccaaaccactctctatatttctgcaggcttagtaaagattgccgtcgctcttgttctataccgtcttacgccaaagcgagtcttccgaagactgattgccgggtccgtggtcatcgtcgctatatggaccatcatcacggttattttcgcctcgtggctctgtgtccgaggggggacaagtaattgggccggctcagaaacatgcactcgtgttgcttactttcgcactatctcgaacatattcatcgattatttctacgcccttctacccattgccatcctttggaatactaagatgaagccaaaactcaaagcaatcgtggtattcttgcttggactgggtattttcgcgagttcggctacgatagttaaacttgttattatcgttaggcttccgtatgctagcggagaagaggctgaagggcttcattatgatcttgcactctgggcagacattgaactaggccttgctattcttgccgcatcttctgcggccttgcgtcctcttctcagacatctgtcgatcataaaggaaccaactgctaaggaaacaagccacggctcgaacgatagcggaccatatcatgaacttgtggctagtcgtcaaattaccaacacggaaagtcacgatggaaagagaaaaagccacgtaggacatcacgaacggcaacataatgcatcggcaaactcttccgacgatcacctcgtttagcgagattgggcagaaatccaaggcacgagaccatttatttcataacatcgaactgcacgcataatgttggtggtgtcatgagggccatcgtggttttcattcaaatgtaatggaacgaaatgccatgcctaagaatgacttcgcgtcttggttgggcgaaagccgaattccgggttgcggtataccagcttcatgttctccttaagccatcgattattgtcgtcgtttttggagaaggcacgaatagttggatatctgaacaagatatgctatcaaccttattgagcattcgaatctgtcttcggttgtacagtgtgattgggtaaaattaagctgcccagggtcttatgcagtacatagcgatcaagagcaagaaggagtaaaggtattcagtcttgtagattacaccaaattcgtggctgtgtcacacctcaatatttgagtgattcacgcacgtggactctacgatgcatcctaaagttgtgtgcctagtcactgatttca

SEQ ID NO: 9660 - DNA, 1200 bp, Muscodor strobelii
  misc_feature: SGI cDNA ID NO. 563031
  misc_feature: Elevated expression when VOC is produced
  misc_feature: Encodes the peptide sequence at SEQ ID NO 9661
atgcttcttgttatgctcgtgctaggaagcctggcagtgtacttgaatcgcggacggaaaccaatagaccgcaccaaacttgcatcaacaccaacggcccaggggcttgagaaagtgccgaaaacacaaagtcgcgaatttggtaggtggaagccgtcgaatttccgcatggctacaccagagccgtatccagactggaacctagaacatacgaagccacttccgtatcgtccatttcgatacgggccgaaatattatgtgaccatgggcctgcggacggtgaaacatgaagactggatcgaactagacaaccattttcctcgataccacgccgacaaatcacggaggattgcggaacgaggagacaagttatcggcaactgctcctgaagcttatccagctgctatcgagctcctcgaagaatttgcagactacctaccacagcgatatccatcgttgttcaaacgcacggctgtgggactagacaatctatggtctggagagaagttcgacattgtgagccggccgcttgctgaggatccaatgcaaatgtgtgctcgactcgttcaagacgacctagcaatcatgattgagaaggaagatggacaatgttacctacttgccggcacgattgtgctcccaggtttctggcgcttgagagataagtttggcatgcccctatcggagatacacacatctggtgatgtgccgcagttcaaggagaagctggagaagggtatgatgaacatgttccggcgactcaagccggaagagatggtggcgcggcacaactacttcttccaagtcgatgacgacctggggtggtcgtggagcattgggccggaagacgcagatgtcaacggacacgctggatggaacacagcggagaagaaccgggcgattgatcaccactactttcggtcggagaggcagacgcttcgtaggctgccaaagacgggtggcattgtgttcacgatacgcacgtattttcaccccattcgggacatagtagaggaggactacgtgccggggagactggcgagcgcagtcaggagttggggcgacgatgtgagccgatataagggtagggagcgctatggagatattcttttggaatttctcgacatgaagcacgaagaacaagtcgctcgggggttagacttgaagaaagaggatgaagttcgagcatatccctattga

SEQ ID NO: 9661 - protein, 399 aa, Muscodor strobelii
  misc_feature: SGI Peptide ID NO. 563031
  misc_feature (28)..(399): NCBI GI: 171679132 Blast Desc: protein product [Podospora anserina] gi|170937637|emb|CAP62296.1| protein product [Podospora anserina]
  misc_feature (28)..(399): NCBI GI: 242774399 Blast Desc: conserved [Talaromyces stipitatus ATCC 10500] gi|218722052|gb|EED21470.1| conserved [Talaromyces stipitatus ATCC 10500]
  misc_feature (2)..(399): NCBI GI: 212531997 Blast Desc: conserved [Penicillium marneffei ATCC 18224] gi|210071519|gb|EEA25608.1| conserved [Penicillium marneffei ATCC 18224]
  misc_feature (48)..(399): NCBI GI: 46122605 Blast Desc: FG05680.1 [Gibberella zeae PH-1]
  misc_feature (50)..(399): NCBI GI: 259488991 Blast Desc: TPA: conserved [Aspergillus nidulans FGSC A4]
  misc_feature (28)..(399): NCBI GI: 145240339 Blast Desc: An08g07010 [Aspergillus niger] gi|134077333|emb|CAK39948.1| protein product [Aspergillus niger]
  misc_feature (26)..(399): NCBI GI: 85076480 Blast Desc: NCU05004 [Neurospora crassa OR74A] gi|28916964|gb|EAA26695.1| conserved [Neurospora crassa OR74A]
  misc_feature (37)..(399): NCBI GI: 258563382 Blast Desc: conserved [Uncinocarpus reesii 1704] gi|237907943|gb|EEP82344.1| conserved [Uncinocarpus reesii 1704]
  misc_feature (50)..(399): NCBI GI: 256729612 Blast Desc: [Nectria haematococca mpVI 77-13-4]
  misc_feature (44)..(399): NCBI GI: 70996002 Blast Desc: conserved [Aspergillus fumigatus Af293] gi|66850391|gb|EAL90718.1| conserved [Aspergillus fumigatus Af293] gi|159131510|gb|EDP56623.1| conserved [Aspergillus A1163]
  misc_feature: Useful for introducing or modulating the production of volatile compounds
MLLVMLVLGSLAVYLNRGRKPIDRTKLASTPTAQGLEKVPKTQSREFGRWKPSNFRMATPEPYPDWNLEHTKPLPYRPFRYGPKYYVTMGLRTVKHEDWIELDNHFPRYHADKSRRIAERGDKLSATAPEAYPAAIELLEEFADYLPQRYPSLFKRTAVGLDNLWSGEKFDIVSRPLAEDPMQMCARLVQDDLAIMIEKEDGQCYLLAGTIVLPGFWRLRDKFGMPLSEIHTSGDVPQFKEKLEKGMMNMFRRLKPEEMVARHNYFFQVDDDLGWSWSIGPEDADVNGHAGWNTAEKNRAIDHHYFRSERQTLRRLPKTGGIVFTIRTYFHPIRDIVEEDYVPGRLASAVRSWGDDVSRYKGRERYGDILLEFLDMKHEEQVARGLDLKKEDEVRAYPY

SEQ ID NO: 9662 - DNA, 2042 bp, Muscodor strobelii
  misc_feature: SGI EST ID NO. CUFF.22864.0
  misc_feature: Variant of the nucleotide sequence at SEQ ID NO 9660
tgaaagtcgacgtatagcttatctctaactcacaatagccaccagatcgccgctctaacgggtggggaaattgcacccctcaagaaaccagacaattgttcattacgaactcaaattcgatagtatggccctgaaagatcggacttgtccttatcacaccgttaatagcctgtctactttccatgaaatgatccacatctactgcatctgattgcaggttgctcgcacgatattaataacgtgtgacatactctccccgagatatctactcagagccgacaacggcgccggatgcaacaagcgccatctatttgagccctttgctatctggctactcttttatctcatggacctgtcatgtagtcatcctagaactattctaaatacgtggtgaggcttttgtgctaccagcctaacctccaaacaatttctgattccaaggaggctttctatacctctctgactatggacggggtacttgcgaagctatctggacgggctgagtacatatatcacggggttgaatcagtcgaacaaagccgcccagttgctggtatgcttcttgttatgctcgtgctaggaagcctggcagtgtacttgaatcgcggacggaaaccaatagaccgcaccaaacttgcatcaacaccaacggcccaggggcttgagaaagtgccgaaaacacaaagtcgcgaatttggtaggtggaagccgtcgaatttccgcatggctacaccagagccgtatccagactggaacctagaacatacgaagccacttccgtatcgtccatttcgatacgggccgaaatattatgtgaccatgggcctgcggacggtgaaacatgaagactggatcgaactagacaaccattttcctcgataccacgccgacaaatcacggaggattgcggaacgaggagacaagttatcggcaactgctcctgaagcttatccagctgctatcgagctcctcgaagaatttgcagactacctaccacagcgatatccatcgttgttcaaacgcacggctgtgggactagacaatctatggtctggagagaagttcgacattgtgagccggccgcttgctgaggatccaatgcaaatgtgtgctcgactcgttcaagacgacctagcaatcatgattgagaaggaagatggacaatgttacctacttgccggcacgattgtgctcccaggtttctggcgcttgagagataagtttggcatgcccctatcggagatacacacatctggtgatgtgccgcagttcaaggagaagctggagaagggtatgatgaacatgttccggcgactcaagccggaagagatggtggcgcggcacaactacttcttccaagtcgatgacgacctggggtggtcgtggagcattgggccggaagacgcagatgtcaacggacacgctggatggaacacagcggagaagaaccgggcgattgatcaccactactttcggtcggagaggcagacgcttcgtaggctgccaaagacgggtggcattgtgttcacgatacgcacgtattttcaccccattcgggacatagtagaggaggactacgtgccggggagactggcgagcgcagtcaggagttggggcgacgatgtgagccgatataagggtagggagcgctatggagatattcttttggaatttctcgacatgaagcacgaagaacaagtcgctcgggggttagacttgaagaaagaggatgaagttcgagcatatccctattgaaggagtctggagttgccgccatgttcagtagtctcatgtagtccaaagtagactcaagagacgatctacataccttacacatggacgtgtatataaggcaagaagtgatgcctagtaccacctcgactcgccgcctacaaagcgcacttcacttcgctccgggaatgaataaacctcgtggtaattcgttatgaatgatgaagtcgctgctcgtgtacttattgctgtggatgcaggcatttgtcggattatactaccgtatcaacatcaaacggggtcaagggtga

SEQ ID NO: 9663 - DNA, 591 bp, Muscodor strobelii
  misc_feature: SGI cDNA ID NO. 563032
  misc_feature: Encodes the peptide sequence at SEQ ID NO 9664
atggaacaacaacaaccagtgcaacagcccgccggggctctgagctggcgtctcagctcgcatcccataacgctgctcacataccttgctttccgcatctcctccctcctcgtctacctcttcggcgtcctcttcacgagcaacatggtcctgatcttcatcatcaccatcctcctgctggccgccgacttctactacctcaagaacatcgccgggcggcgtctcgtcggcctgcgctggtggaacgaagttgatgcctcgtccggcgactcccagtgggtcttcgagagcttcgagcccggcaccaaggctgtcaatgccaccgactcccgcttcttctggctcgccctctactcccagcccgtgctgtgggtcgccctcgccatcctgctactcgtccggctcaagttcgagtggctgccgctcgtcgctatcgctcttgttcttaccatcaccaatacccttgccttctcccgatgcgataaattcagccacgcctccaacatcgcaggcagcgcgctctactcgagtaatctagctgggaatatcgcgagcaacatggtcgggcgtctctttacctttggccgctga

SEQ ID NO: 9664 - protein, 196 aa, Muscodor strobelii
  misc_feature: SGI Peptide ID NO. 563032
  misc_feature (1)..(160): Pfam Id: PF05832 Pfam Desc: Eukaryotic protein of function (DUF846)
  misc_feature (19)..(160): Pfam Id: PF05832 Pfam Desc: Eukaryotic protein of function (DUF846)
  misc_feature (1)..(193): NCBI GI: 171680241 Blast Desc: protein product [Podospora anserina] gi|193806560|sp|B2ALT5.1|TVP23_PODAN RecName: Full=Golgi apparatus membrane protein TVP23 gi|170939747|emb|CAP64973.1|
  misc_feature (12)..(193): NCBI GI: 193806598 Blast Desc: protein product [Podospora anserina] gi|193806560|sp|B2ALT5.1|TVP23_PODAN RecName: Full=Golgi apparatus membrane protein TVP23 gi|170939747|emb|CAP64973.1|
  misc_feature (1)..(193): NCBI GI: 256734562 Blast Desc: NECHADRAFT_74953 [Nectria haematococca mpVI 77-13-4]
  misc_feature (1)..(193): NCBI GI: 39945646 Blast Desc: conserved [Magnaporthe grisea 70-15] gi|193806558|sp|A4RME3.1|TVP23_MAGGR RecName: Full=Golgi apparatus membrane protein TVP23 gi|145021335|gb|EDK05464.1|
  misc_feature (1)..(192): NCBI GI: 121935940 Blast Desc: conserved [Magnaporthe grisea 70-15] gi|193806558|sp|A4RME3.1|TVP23_MAGGR RecName: Full=Golgi apparatus membrane protein TVP23 gi|145021335|gb|EDK05464.1|
  misc_feature (3)..(192): NCBI GI: 145229951 Blast Desc: An01g08620 [Aspergillus niger] gi|193806554|sp|A2Q9P5.1|TVP23_ASPNC RecName: Full=Golgi apparatus membrane protein tvp23 gi|134055397|emb|CAK43951.1|
  misc_feature (7)..(192): NCBI GI: 258573885 Blast Desc: conserved [Uncinocarpus reesii 1704] gi|237901390|gb|EEP75791.1| conserved [Uncinocarpus reesii 1704]
  misc_feature (3)..(192): NCBI GI: 212534990 Blast Desc: clathrin-coated vesicle protein, [Penicillium marneffei ATCC 18224] gi|210070050|gb|EEA24140.1| clathrin-coated vesicle protein, [Penicillium marneffei ATCC 18224]
  misc_feature (1)..(192): NCBI GI: 169764587 Blast Desc: [Aspergillus oryzae RIB40] gi|238504152|ref|XP_002383308.1| clathrin-coated vesicle protein, [Aspergillus flavus NRRL3357] RecName: Full=Golgi apparatus tvp23
  misc_feature (3)..(192): NCBI GI: 193806583 Blast Desc: [Aspergillus oryzae RIB40] gi|238504152|ref|XP_002383308.1| clathrin-coated vesicle protein, [Aspergillus flavus NRRL3357] RecName: Full=Golgi apparatus tvp23
MEQQQPVQQPAGALSWRLSSHPITLLTYLAFRISSLLVYLFGVLFTSNMVLIFIITILLLAADFYYLKNIAGRRLVGLRWWNEVDASSGDSQWVFESFEPGTKAVNATDSRFFWLALYSQPVLWVALAILLLVRLKFEWLPLVAIALVLTITNTLAFSRCDKFSHASNIAGSALYSSNLAGNIASNMVGRLFTFGR

SEQ ID NO: 9665 - DNA, 1291 bp, Muscodor strobelii
  misc_feature: SGI EST ID NO. CUFF.22921.0
  misc_feature: Variant of the nucleotide sequence at SEQ ID NO 9663
aatgcatgcaatgcgcgtaagcgtataggtaattatcggggatgctccgacctccaatcgaacactaggtgacagctatctgtccacggcttgagagctactacctacctacctaatgtatggttgagcttcgcattgcgacaggcacaggcacccgacacaaagctttaacccccggatacgccgcgcgatcgcaaagaacatcccacactcgatccgaatggaacaacaacaaccagtgcaacagcccgccggggctctgagctggcgtctcagctcgcatcccataacgctgctcacataccttgctttccgcatctcctccctcctcgtctacctcttcggcgtcctcttcacgagcaacatggtcctgatcttcatcatcaccatcctcctgctggccgccgacttctactacctcaagaacatcgccgggcggcgtctcgtcggcctgcgctggtggaacgaagttgatgcctcgtccggcgactcccagtgggtcttcgagagcttcgagcccggcaccaaggctgtcaatgccaccgactcccgcttcttctggctcgccctctactcccagcccgtgctgtgggtcgccctcgccatcctgctactcgtccggctcaagttcgagtggctgccgctcgtcggtgagtcctgattaccgatttacctcatgcgcgatctagacgcctctctgcttcattcgatagtggccagaagtctcacgttctacgacccgtatactcctgcacggcacgagtcgcgaaccacgtaacctcacccctttatatcaattcgctaactgacgggttctgctctctagctatcgctcttgttcttaccatcaccaatacccttgccttctcccgatgcgataaattcagccacgcctccaacatcgcaggcagcgcgctctactcgagtaatctagctgggaatatcgcgagcaacatggtcgggcgtctctttacctttggccgctgaatggcctctgacgatatgagacactatgattacggggcttagaagtagaggctcacggaaactgttcaaaaaccgtgtatgatgactatctgattatgttataccatacggaaaatgcgaaaaagtgctttccatcgtctaagtagcctggcaggagcttcatttatctgtatcattataaacggatgttttcattatcacttgtacaccgtcgtacatataggctctctgggcttaaggtaggatcgacgtaacggtaaggtagtaagacgacgacaatcttaaatagagtgcgaagtatgct

SEQ ID NO: 9666 - DNA, 672 bp, Muscodor strobelii
  misc_feature: SGI cDNA ID NO. 563033
  misc_feature: Reduced expression when VOC is produced
  misc_feature: Encodes the peptide sequence at SEQ ID NO 9667
atggaacaacaacaaccagtgcaacagcccgccggggctctgagctggcgtctcagctcgcatcccataacgctgctcacataccttgctttccgcatctcaccgaccaccgtcgactgctccagcctggcaaaccagcaacgcagtgaagacgcagtgcagctgaccacatctccgccagcctccctcctcgtctacctcttcggcgtcctcttcacgagcaacatggtcctgatcttcatcatcaccatcctcctgctggccgccgacttctactacctcaagaacatcgccgggcggcgtctcgtcggcctgcgctggtggaacgaagttgatgcctcgtccggcgactcccagtgggtcttcgagagcttcgagcccggcaccaaggctgtcaatgccaccgactcccgcttcttctggctcgccctctactcccagcccgtgctgtgggtcgccctcgccatcctgctactcgtccggctcaagttcgagtggctgccgctcgtcgctatcgctcttgttcttaccatcaccaatacccttgccttctcccgatgcgataaattcagccacgcctccaacatcgcaggcagcgcgctctactcgagtaatctagctgggaatatcgcgagcaacatggtcgggcgtctctttacctttggccgctga

SEQ ID NO: 9667 - protein, 223 aa, Muscodor strobelii
  misc_feature: SGI Peptide ID NO. 563033
  misc_feature (47)..(187): Pfam Id: PF05832 Pfam Desc: Eukaryotic protein of function (DUF846)
  misc_feature (61)..(187): Pfam Id: PF05832 Pfam Desc: Eukaryotic protein of function (DUF846)
  misc_feature (1)..(220): NCBI GI: 171680241 Blast Desc: protein product [Podospora anserina] gi|193806560|sp|B2ALT5.1|TVP23_PODAN RecName: Full=Golgi apparatus membrane protein TVP23 gi|170939747|emb|CAP64973.1|
  misc_feature (12)..(220): NCBI GI: 193806598 Blast Desc: protein product [Podospora anserina] gi|193806560|sp|B2ALT5.1|TVP23_PODAN RecName: Full=Golgi apparatus membrane protein TVP23 gi|170939747|emb|CAP64973.1|
  misc_feature (1)..(220): NCBI GI: 256734562 Blast Desc: NECHADRAFT_74953 [Nectria haematococca mpVI 77-13-4]
  misc_feature (1)..(220): NCBI GI: 39945646 Blast Desc: conserved [Magnaporthe grisea 70-15] gi|193806558|sp|A4RME3.1|TVP23_MAGGR RecName: Full=Golgi apparatus membrane protein TVP23 gi|145021335|gb|EDK05464.1|
  misc_feature (40)..(220): NCBI GI: 154299029 Blast Desc: BC1G_11827 [Botryotinia fuckeliana B05.10] gi|193806555|sp|A6SFL7.1|TVP23_BOTFB RecName: Full=Golgi apparatus membrane protein tvp23 gi|150857530|gb|EDN32722.1|
  misc_feature (1)..(219): NCBI GI: 121935940 Blast Desc: BC1G_11827 [Botryotinia fuckeliana B05.10] gi|193806555|sp|A6SFL7.1|TVP23_BOTFB RecName: Full=Golgi apparatus membrane protein tvp23 gi|150857530|gb|EDN32722.1|
  misc_feature (3)..(219): NCBI GI: 145229951 Blast Desc: An01g08620 [Aspergillus niger] gi|193806554|sp|A2Q9P5.1|TVP23_ASPNC RecName: Full=Golgi apparatus membrane protein tvp23 gi|134055397|emb|CAK43951.1|
  misc_feature (7)..(219): NCBI GI: 258573885 Blast Desc: conserved [Uncinocarpus reesii 1704] gi|237901390|gb|EEP75791.1| conserved [Uncinocarpus reesii 1704]
  misc_feature (3)..(219): NCBI GI: 212534990 Blast Desc: clathrin-coated vesicle protein, [Penicillium marneffei ATCC 18224] gi|210070050|gb|EEA24140.1| clathrin-coated vesicle protein, [Penicillium marneffei ATCC 18224]
  misc_feature (1)..(219): NCBI GI: 169764587 Blast Desc: [Aspergillus oryzae RIB40] gi|238504152|ref|XP_002383308.1| clathrin-coated vesicle protein, [Aspergillus flavus NRRL3357] RecName: Full=Golgi apparatus tvp23
  misc_feature: Useful for introducing or modulating the production of volatile compounds
MEQQQPVQQPAGALSWRLSSHPITLLTYLAFRISPTTVDCSSLANQQRSEDAVQLTTSPPASLLVYLFGVLFTSNMVLIFIITILLLAADFYYLKNIAGRRLVGLRWWNEVDASSGDSQWVFESFEPGTKAVNATDSRFFWLALYSQPVLWVALAILLLVRLKFEWLPLVAIALVLTITNTLAFSRCDKFSHASNIAGSALYSSNLAGNIASNMVGRLFTFGR

SEQ ID NO: 9668 - DNA, 1291 bp, Muscodor strobelii; identical to SEQ ID NO: 9665
  misc_feature: SGI EST ID NO. CUFF.22921.0
  misc_feature: Variant of the nucleotide sequence at SEQ ID NO 9666

SEQ ID NO: 9669 - DNA, 1212 bp, Muscodor strobelii
  misc_feature: SGI cDNA ID NO. 563034
  misc_feature: Encodes the peptide sequence at SEQ ID NO 9670
atgcgtgcccgtgttacgatattaggactctggacctatctagggctctcgactgcagagcaaataaactcgctgctaatccgcgacgcagctttcatagcgccaaataaagtcgtcttgctgggagatcctctgaaagatcagaatcttttcgacgcagcatacaatgttaccgctcagtactcggcctcagggacgaccatcaccaacgtgtatctgaaggaatataacctaagaggagtggacgctgatgacgacaaaataattgggacgggatcagtctcaacagcggcagccggtcctggctccgatacacaatctaaagcagagctggaacggagagctttcaatgtttccttgaccgtgactacgaattccgtactaatcccctggactgtcctcgaacgcgatgactatatcaacaaggctctttatttacagtttgtatgggataacacaacttcgagcggcacgagctgttctgcaatcttcgtggggtatcctgcaggctcggattcatcgttggcacaaggtatcttcagcagtacaagcaagcccataggcgaaccggcgagaaaggaagacatcacatccagttctacagcaacgacatcgaccgccagcactgaacccaccgcccaggccactacgggtcccactactgaaacgccttcgtccactcccgcaccctcgcaaggtggactcaacgagaagggtattatcggtgtcgccgtgggagctggtggagcgggacttctcatcgccggagtgctgatctacttcttctgcttccgacgtcgtcgtaacaacgcaacccgccaaggatctgtgagctacggctcagatgctggcgctcaggtcatgatgtcgggcaaagagatcccacctgtatcagaatcgtcacctcaatccgcatacggcggcgagggccggacgagcgacgcacgtgaggacccttacgcaccgtactcggaccggcccatgacaccaccggaagcccctcgtactgttccggctgcttccactccaggagcaacgagccaaacggatctaagctcaacacgaggcgcagacacgccgacgcccgccatcaaccagcggtatgctcatttagtagaggagggtatgaccgagcacgagatcaggcaactggaagaagaagagcggcaccttgatgctgcaattgccgccgggaggagagtaccgtcctga

SEQ ID NO: 9670 - protein, 403 aa, Muscodor strobelii
  misc_feature: SGI Peptide ID NO. 563034
  misc_feature (219)..(400): NCBI GI: 171680243 Blast Desc: protein product [Podospora anserina] gi|170939748|emb|CAP64974.1| protein product [Podospora anserina]
  misc_feature (242)..(400): NCBI GI: 46106843 Blast Desc: FG00438.1 [Gibberella zeae PH-1]
  misc_feature (131)..(326): NCBI GI: 85116778 Blast Desc: NCU02732 [Neurospora crassa OR74A] gi|28926920|gb|EAA35881.1| NCU02732 [Neurospora crassa OR74A]
  misc_feature (214)..(270): NCBI GI: 70999336 Blast Desc: conserved [Aspergillus fumigatus Af293] gi|66852024|gb|EAL92349.1| conserved [Aspergillus fumigatus Af293] gi|159127401|gb|EDP52516.1| conserved [Aspergillus A1163]
MRARVTILGLWTYLGLSTAEQINSLLIRDAAFIAPNKVVLLGDPLKDQNLFDAAYNVTAQYSASGTTITNVYLKEYNLRGVDADDDKIIGTGSVSTAAAGPGSDTQSKAELERRAFNVSLTVTTNSVLIPWTVLERDDYINKALYLQFVWDNTTSSGTSCSAIFVGYPAGSDSSLAQGIFSSTSKPIGEPARKEDITSSSTATTSTASTEPTAQATTGPTTETPSSTPAPSQGGLNEKGIIGVAVGAGGAGLLIAGVLIYFFCFRRRRNNATRQGSVSYGSDAGAQVMMSGKEIPPVSESSPQSAYGGEGRTSDAREDPYAPYSDRPMTPPEAPRTVPAASTPGATSQTDLSSTRGADTPTPAINQRYAHLVEEGMTEHEIRQLEEEERHLDAAIAAGRRVPS

SEQ ID NO: 9671 - DNA, 1872 bp, Muscodor strobelii
  misc_feature: SGI EST ID NO. CUFF.22874.0
  misc_feature: Variant of the nucleotide sequence at SEQ ID NO 9669
tgcgagttgacttgtgacttaaagaaccaggatccagagactagcacttaagagtcaagggtcttgctcacattgggcagtcctctatgcacagctgaaagccgaagttcacgacagaagcctgtgccaggagtttcgccctagaccctgtacagtgttcctgattttcttacgcttctcctcacaagtcctagaatacacttctttcgacttgcttccttcgtagtctctccgttacgacatcgacagtacagcgaacattacagacatcgagaagctacgaaacagaacaatcgccttgaaaggaggacacatggtaaaggatcgggcgttgttcaagctatacgacggcgaggttgagcaacgctcatacccgagcccttgacgatgcgtgcccgtgttacgatattaggactctggacctatctagggctctcgactgcagagcaaataaactcgctgctaatccgcgacgcagctttcatagcgccaaataaagtcgtcttgctgggagatcctctgaaagatcagaatcttttcgacgcagcatacaatgttaccgctcagtactcggcctcagggacgaccatcaccaacgtgtatctgaaggaatataacctaagaggagtggacgctgatgacgacaaaataattgggacgggatcagtctcaacagcggcagccggtcctggctccgatacacaatctaaagcagagctggaacggagagctttcaatgtttccttgaccgtgactacgaattccgtactaatcccctggactgtcctcgaacgcgatgactatatcaacaaggctctttatttacagtttgtatgggataacacaacttcgagcggcacgagctgttctgcaatcttcgtggggtatcctgcaggctcggattcatcgttggcacaaggtatcttcagcagtacaagcaagcccataggcgaaccggcgagaaaggaagacatcacatccagttctacagcaacgacatcgaccgccagcactgaacccaccgcccaggccactacgggtcccactactgaaacgccttcgtccactcccgcaccctcgcaaggtggactcaacgagaagggtattatcggtgtcgccgtgggagctggtggagcgggacttctcatcgccggagtgctgatctacttcttctgcttccgacgtcgtcgtaacaacgcaacccgccaaggatctgtgagctacggctcagatgctggcgctcaggtcatgatgtcgggcaaagagatcccacctgtatcagaatcgtcacctcaatccgcatacggcggcgagggccggacgagcgacgcacgtgaggacccttacgcaccgtactcggaccggcccatgacaccaccggaagcccctcgtactgttccggctgcttccactccaggagcaacgagccaaacggatctaagctcaacacgaggcgcagacacgccgacgcccgccatcaaccagcggtatgctcatttagtagaggagggtatgaccgagcacgagatcaggcaactggaagaagaagagcggcaccttgatgctgcaattgccgccgggaggagagtaccgtcctgatgtgatcgggaccagatacgtgacattgtagaaaaaagatgctgctgatatatatacttttttaccaatccatcatcgaaaggcgttgttggttttctttgtggggcgctttcccctcttcattatccatatatccgtcgaagggcatagagatgcccttcagagcactcgcttatcatgctggttatacgtacgagcggggtcgtcgggaaatgcttgatagttgacgtaccactcgaggctaataataaagaaaaacactttcaaaagaca

SEQ ID NO: 9672 - DNA, 3648 bp, Muscodor strobelii
  misc_feature: SGI cDNA ID NO. 563035
  misc_feature: Encodes the peptide sequence at SEQ ID NO 9673
atgcagcctgatgtgtgtatttctctacttgaacccctgaaccaggcatttgtgaccgctgagccatgtggggtggcgctactattcacccttgcaaacctcacctctttcttgacgtttgatgagggcctgacaggtatgggccgtgagaggtggacaatgccacccaaatccagctctcctcccctcgacgacaaagtctcgacgacttcacttccttctcaacattatcccaaccacaagccgcatgctcaggagctgcaagcacccatggcagcagccaagcccctcgatctcgatgattttggcttacccatcagaaagtgcatgagccctgaggacacaaacgaagcgactcaaaccgatgcacctgccaccgtcgaggccgccccagctgaggaccttgtccaccaaaatgcacgagcacccacgccccaggatgcaccagaggataaagggccaagaacgatagaggagaagagtcacatgccgcctggtgagaaaagagatgaaaggcgcgatgacataacgagagcggatggacctagcagcagggccaccgccaccgatacctcactgccctctataccagaacagtcctcagtaaccggttcgaacaaatcaacaccgctgcagcatgcggaaaatgcgccagatgcagatcccacttccccattcgacacggacaaaccggtctcacccatcaaagctgcccggcggaagcggaccttgagcaaagatgcccaagctatttccggaccatcgatcagggaagtacaagccagcaagcaggcggaggagcgagaacatgcaccacaggctccgagcggccacactcgtgagcagagcacggccagctccacgttcgaagcctccgaattttcgcaccaacagttgacggctccaaaagaagacagagatggcgatggcgatggcggatggcagaccatgccggcctacgcgccttacgatatatacgatgatgataacagactgatcgcaaaggagcacaatccggacgacgacgagtcgtacggatatgccgggctgggcggcgctggtaaaggatatacccgtgtcttggacgacgaggatgcccaatcagagactagtatggacgacaacacacgctacctcttcaatagtaatctcaaatccaccagcatggcggagatggacgaagaacaacgcgacgctgtctctcaattgcaagctaccaaggatctgttgaccgaaggtcaaagaatagcctatgttgggattgctcgcctagaactagcggaaatggtaaaagctatcgaagagctggaacgagtcaagaaggtgaaaaaggaaatacggatagccggggaagccacgaaaatgtggtcacaaaagattatgattcgactctatgcgcatatggacatcagttctccagaacagattatgatagagcagctctccgatcacggcgtccggcctgacgacctcacaccaactctgatgaaaaacgctagggttaaaaacccaatggctgaaaccacaccatccacctcgactcagatctcacgcactaacagcccccggccatccacgtcgaacgggttcgcgcgagaggcgtctgctgagccaccaccaccctacgaaagtcacgacggcgaggagatgcccgaagtgaagacgccttcacaattgccgagcaccgacaaaatagacatcgacatccgctggacggtcctatgtgacctcttcctagtgttaattgccgatggaatatacgatgcgcgatcgagagttcttcttgaacgcgtgggcaaagatcttgaaattccctggatagatatttgcaggtttgagaagcgtgtgacggatgcccttgaaatgcaacaggaggccgagaaagagaactggaacgaagaagagcacctcgaaaaccgtcggaaacttgcccttagaaaacgctacgtgatgatggggttggccacagttggtggtggccttgtcattggcctctccgcaggactcctagcgcctctcataggcgctggcttggctgctggattcaccacaatcggggtgggaggaacgagttcctttctcgctggagccggcggagctgcgatcatcacgtctggcgctgctgcgtctggtagctttatgggggggaaggcagcgagccgcagaacaggcgccgtaaagaccttcgaatacaggccacttcacaacaataaaagggtcaatctcatcgttacaatatccggctggctgacaagcaaagtcgacgatgttcgcttgcccttcagtaccatagatcccatcatgggcgatatctactctatcctgtgggagccggaaatgttgacaagtatgggtgacactatcaatatccttgccacagaggctctcactcaaggtctgcaacaggtgctaggaagcacaatcttaatcagtctcatggctgctcttcaactaccagtggtcttgtcgaagcttgcttacttgattgacaatccttgggcagtctcattggacagagcttgggcttctggtcttatattggcagactctctgattgacaggaacttgggcactcgtcccataacacttgtgggctattccctgggctcccgtgtcatctttgcatgccttctagaacttgctcgcaagggcgcccacggtctggtccagaatgtctacctcttcggggcgcccatcgtggtgaagcaggaagaattcgtgaaagcgcggactgttgtggccggtcgttttgtcaatgggtataataaaaatgattggattctgggctaccttttccggttgaccaatggtggcatccgtcgagtcgccggtttggcgacagttgatgccgtccctggggtggagaatttcgactgtactggctctgttgctggccacatgcaatatcgaactgccatgcctcgtctgttgcgggaatgtggttggatcgtcgagagcgatgaattcggagagattgaagatcctgatccagatcgtcaccgcgaacgacagatagatcttattaacgaaatcgaagaggcccgaaaagaattaggaaaagagggccaggctaaaaagagcggatggggcatcttcagccggaagaagaaggctgaacgtcaagattgggagatttacgaggacaacaaaaaggcagacagatcacgatccgaagacgataatgctgctagcccatcagatggtgatcacggtaacaataacggtgtccttttcgacgtcgatgccatccgcgctgagcttgcacaagatgaagagctacaaatcagagagctggcctctaccttgccacccatgaagcttgatgggtcgtcgtcgacaccatccaattcccgagacgacctgcgcgaaaccaagagcatggatggcacgcccacgccacgctccggagcgtattttgctgattcatttcggcaccaagaggatgggatgcagatgacgttcgatactgctttcacaaattcatcacctccgccaccaccggcaaacgactatcctaatgtgtacacacctacacgcccagaaatgaaatcgtcgcagacgacgcctaacattgctctaaatgacccatgggcagatgacgacgatgattttggaaaagagaaagagatctctatgacatttgcgtaa

SEQ ID NO: 9673 - protein, 1215 aa, Muscodor strobelii
  misc_feature: SGI Peptide ID NO. 563035
  misc_feature (644)..(983): Pfam Id: PF05277 Pfam Desc: Domain of function (DUF726)
  misc_feature (646)..(983): Pfam Id: PF05277 Pfam Desc: Domain of function (DUF726)
  misc_feature (89)..(1215): NCBI GI: 171680213 Blast Desc: protein product [Podospora anserina] gi|170939733|emb|CAP64959.1| protein product [Podospora anserina]
  misc_feature (98)..(1215): NCBI GI: 46106841 Blast Desc: FG00437.1 [Gibberella zeae PH-1]
  misc_feature (97)..(1215): NCBI GI: 256735279 Blast Desc: NECHADRAFT_65677 [Nectria haematococca mpVI 77-13-4]
  misc_feature (56)..(1130): NCBI GI: 261357561 Blast Desc: transmembrane and coiled-coil domain-containing protein [Verticillium albo-atrum VaMs.102]
  misc_feature (90)..(1214): NCBI GI: 238486230 Blast Desc: DUF726 domain protein [Aspergillus flavus NRRL3357] gi|220699232|gb|EED55571.1| DUF726 domain protein [Aspergillus flavus NRRL3357]
  misc_feature (90)..(1214): NCBI GI: 169771233 Blast Desc: [Aspergillus oryzae RIB40] gi|83767945|dbj|BAE58084.1| protein product [Aspergillus oryzae]
  misc_feature (273)..(1214): NCBI GI: 70990554 Blast Desc: DUF726 domain protein [Aspergillus fumigatus Af293] gi|66847758|gb|EAL88088.1| DUF726 domain protein [Aspergillus fumigatus Af293] gi|159130607|gb|EDP55720.1| DUF726 domain A1163]
  misc_feature (280)..(1214): NCBI GI: 255940696 Blast Desc: Pc16g07950 [Penicillium chrysogenum Wisconsin 54-1255] gi|211585740|emb|CAP93465.1| Pc16g07950 [Penicillium chrysogenum Wisconsin 54-1255]
  misc_feature (287)..(1214): NCBI GI: 119497021 Blast Desc: NFIA_020910 [Neosartorya fischeri NRRL 181] gi|119413442|gb|EAW23383.1| conserved [Neosartorya fischeri NRRL 181]
  misc_feature (98)..(1214): NCBI GI: 145255076 Blast Desc: An18g03960 [Aspergillus niger] gi|134084441|emb|CAK97433.1| protein product [Aspergillus niger]
MQPDVCISLLEPLNQAFVTAEPCGVALLFTLANLTSFLTFDEGLTGMGRERWTMPPKSSSPPLDDKVSTTSLPSQHYPNHKPHAQELQAPMAAAKPLDLDDFGLPIRKCMSPEDTNEATQTDAPATVEAAPAEDLVHQNARAPTPQDAPEDKGPRTIEEKSHMPPGEKRDERRDDITRADGPSSRATATDTSLPSIPEQSSVTGSNKSTPLQHAENAPDADPTSPFDTDKPVSPIKAARRKRTLSKDAQAISGPSIREVQASKQAEEREHAPQAPSGHTREQSTASSTFEASEFSHQQLTAPKEDRDGDGDGGWQTMPAYAPYDIYDDDNRLIAKEHNPDDDESYGYAGLGGAGKGYTRVLDDEDAQSETSMDDNTRYLFNSNLKSTSMAEMDEEQRDAVSQLQATKDLLTEGQRIAYVGIARLELAEMVKAIEELERVKKVKKEIRIAGEATKMWSQKIMIRLYAHMDISSPEQIMIEQLSDHGVRPDDLTPTLMKNARVKNPMAETTPSTSTQISRTNSPRPSTSNGFAREASAEPPPPYESHDGEEMPEVKTPSQLPSTDKIDIDIRWTVLCDLFLVLIADGIYDARSRVLLERVGKDLEIPWIDICRFEKRVTDALEMQQEAEKENWNEEEHLENRRKLALRKRYVMMGLATVGGGLVIGLSAGLLAPLIGAGLAAGFTTIGVGGTSSFLAGAGGAAIITSGAAASGSFMGGKAASRRTGAVKTFEYRPLHNNKRVNLIVTISGWLTSKVDDVRLPFSTIDPIMGDIYSILWEPEMLTSMGDTINILATEALTQGLQQVLGSTILISLMAALQLPVVLSKLAYLIDNPWAVSLDRAWASGLILADSLIDRNLGTRPITLVGYSLGSRVIFACLLELARKGAHGLVQNVYLFGAPIVVKQEEFVKARTVVAGRFVNGYNKNDWILGYLFRLTNGGIRRVAGLATVDAVPGVENFDCTGSVAGHMQYRTAMPRLLRECGWIVESDEFGEIEDPDPDRHRERQIDLINEIEEARKELGKEGQAKKSGWGIFSRKKKAERQDWEIYEDNKKADRSRSEDDNAASPSDGDHGNNNGVLFDVDAIRAELAQDEELQIRELASTLPPMKLDGSSSTPSNSRDDLRETKSMDGTPTPRSGAYFADSFRHQEDGMQMTFDTAFTNSSPPPPPANDYPNVYTPTRPEMKSSQTTPNIALNDPWADDDDDFGKEKEISMTFA

SEQ ID NO: 9674 - DNA, 4016 bp, Muscodor strobelii
  misc_feature: SGI EST ID NO. CUFF.22910.0
  misc_feature: Variant of the nucleotide sequence at SEQ ID NO 9672
gctgagccatgtggggtggcgctactattcacccttgcaaacctcacctctttcttgacgtttgatgagggcctgacaggtatgggccgtgagaggtggacaatgccacccaaatccagctctcctcccctcgacgacaaagtctcgacgacttcacttccttctcaacattatcccaaccacaagccgcatgctcaggagctgcaagcacccatggcagcagccaagcccctcgatctcgatgattttggcttacccatcagaaagtgcatgagccctgaggacacaaacgaagcgactcaaaccgatgcacctgccaccgtcgaggccgccccagctgaggaccttgtccaccaaaatgcacgagcacccacgccccaggatgcaccagaggataaagggccaagaacgatagaggagaagagtcacatgccgcctggtgagaaaagagatgaaaggcgcgatgacataacgagagcggatggacctagcagcagggccaccgccaccgatacctcactgccctctataccagaacagtcctcagtaaccggttcgaacaaatcaacaccgctgcagcatgcggaaaatgcgccagatgcagatcccacttccccattcgacacggacaaaccggtctcacccatcaaagctgcccggcggaagcggaccttgagcaaagatgcccaagctatttccggaccatcgatcagggaagtacaagccagcaagcaggcggaggagcgagaacatgcaccacaggctccgagcggccacactcgtgagcagagcacggccagctccacgttcgaagcctccgaattttcgcaccaacagttgacggctccaaaagaagacagagatggcgatggcgatggcggatggcagaccatgccggcctacgcgccttacgatatatacgatgatgataacagactgatcgcaaaggagcacaatccggacgacgacgagtcgtacggatatgccgggctgggcggcgctggtaaaggatatacccgtgtcttggacgacgaggatgcccaatcagagactagtatggacgacaacacacgctacctcttcaatagtaatctcaaatccaccagcatggcggagatggacgaagaacaacgcgacgctgtctctcaattgcaagctaccaaggatctgttgaccgaaggtcaaagaatagcctatgttgggattgctcgcctagaactagcggaaatggtaaaagctatcgaagagctggaacgagtcaagaaggtgaaaaaggaaatacggatagccggggaagccacgaaaatgtggtcacaaaagattatgattcgactctatgcgcatatggacatcagttctccagaacagattatgatagagcagctctccgatcacggcgtccggcctgacgacctcacaccaactctgatgaaaaacgctagggttaaaaacccaatggctgaaaccacaccatccacctcgactcagatctcacgcactaacagcccccggccatccacgtcgaacgggttcgcgcgagaggcgtctgctgagccaccaccaccctacgaaagtcacgacggcgaggagatgcccgaagtgaagacgccttcacaattgccgagcaccgacaaaatagacatcgacatccgctggacggtcctatgtgacctcttcctagtgttaattgccgatggaatatacgatgcgcgatcgagagttcttcttgaacgcgtgggcaaagatcttgaaattccctggatagatatttgcaggtttgagaagcgtgtgacggatgcccttgaaatgcaacaggaggccgagaaagagaactggaacgaagaagagcacctcgaaaaccgtcggaaacttgcccttagaaaacgctacgtgatgatggggttggccacagttggtggtggccttgtcattggcctctccgcaggactcctagcgcctctcataggcgctggcttggctgctggattcaccacaatcggggtgggaggaacgagttcctttctcgctggagccggcggagctgcgatcatcacgtctggcgctgctgcgtctggtagctttatgggggggaaggcagcgagccgcagaacaggcgccgtaaagaccttcgaatacaggccacttcacaacaataaaagggtcaatctcatcgttacaatatccggctggctgacaagcaaagtcgacgatgttcgcttgcccttcagtaccatagatcccatcatgggcgatatctactctatcctgtgggagccggaaatgttgacaagtatgggtgacactatcaatatccttgccacagaggctctcactcaaggtctgcaacaggtgctaggaagcacaatcttaatcagtctcatggctgctcttcaactaccagtggtcttgtcgaagcttgcttacttgattgacaatccttgggcagtctcattggacagagcttgggcttctggtcttatattggcagactctctgattgacaggaacttgggcactcgtcccataacacttgtgggctattccctgggctcccgtgtcatctttgcatgccttctagaacttgctcgcaagggcgcccacggtctggtccagaatgtctacctcttcggggcgcccatcgtggtgaagcaggaagaattcgtgaaagcgcggactgttgtggccggtcgttttgtcaatgggtataataaaaatgattggattctgggctaccttttccggttgaccaatggtggcatccgtcgagtcgccggtttggcgacagttgatgccgtccctggggtggagaatttcgactgtactggctctgttgctggccacatgcaatatcgaactgccatgcctcgtctgttgcgggaatgtggttggatcgtcgagagcgatgaattcggagagattgaagatcctgatccagatcgtcaccgcgaacgacagatagatcttattaacgaaatcgaagaggcccgaaaagaattaggaaaagagggccaggctaaaaagagcggatggggcatcttcagccggaagaagaaggctgaacgtcaagattgggagatttacgaggacaacaaaaaggcagacagatcacgatccgaagacgataatgctgctagcccatcagatggtgatcacggtaacaataacggtgtccttttcgacgtcgatgccatccgcgctgagcttgcacaagatgaagagctacaaatcagagagctggcctctaccttgccacccatgaagcttgatgggtcgtcgtcgacaccatccaattcccgagacgacctgcgcgaaaccaagagcatggatggcacgcccacgccacgctccggagcgtattttgctgattcatttcggcaccaagaggatgggatgcagatgacgttcgatactgctttcacaaattcatcacctccgccaccaccggcaaacgactatcctaatgtgtacacacctacacgcccagaaatgaaatcgtcgcagacgacgcctaacattgctctaaatgacccatgggcagatgacgacgatgattttggaaaagagaaagagatctctatgacatttgcgtaatgagcacgtggcatttgattgccaagcaccagaccttaccaacacatccgacgttctgggcatgttttcactcactcattcatattgcccagattgagtcgtcaagcgacgacatttcaagccaatcaagcctccatccacgtgccttaagggtaacgattcattatatacttgtaatattaaatgcatacgctcggcggcctggagtcgaagggatggcgggcgtgcacctctcagcattaccaagagacataggggagtatggtcaatcataatttaagcatatcatcacttttatgccagcactgtcgaagcagcccgacctcttctagaatactgacaagtgacatgcaaggaacacttgagccttgctggtacgaatgcagtaatgtaaatgagtgaagaaggatatccatagattgcaa

SEQ ID NO: 9675 - DNA, 945 bp, Muscodor strobelii
  misc_feature: SGI cDNA ID NO. 563036
  misc_feature: Encodes the peptide sequence at SEQ ID NO 9676
atgcctcgcgcaaaacgatccaagcagtatcggaagctcatgagccactatgtcatgaattttggtttccgcgagccctaccaaatcctgtgcgacagtcggttcctccaatcggccgtgcaatcaaagatggatatcaagcacgtcatggaagcgactctgcacggagcctccaagctgttcctcacacaatgctccatacgccatctatacgcacgcagcgaggaacctggcatcccggccacgatagacttcgcaaaaagcatagaacgacggatgtgcggccatctaccgtccgactacccatcacccttatcagaatccgagtgtcttcactccgtcgtggatccgaaacagacgggcgtcaataagcaccacgtgtgctgcgccatcaacgatgacgacgttcgcgcctccctgcgaaacagcgtcaccgccgtgcctctgctttacatccggcgctcggttctcatcatggagcccgcgtcttctgcgaccgtgaaagcgcgctcgcgggatgagaaatccaagttcagagccgagctgaggacagtcggggggaagagaaagcgggaagaagaggatgacacggaaaccgacgagaagggcccttcggaacctggtacctcatcttcaaacctagagaagaagaagaaaaagggtgtgaaggcattcggtcgcaaagagccaaatcccttgtcaatgaagaagaagaaagaaaaaccacgaccaggaggaggggagaaatcagccaaggcaccgcccgctgacgatatagacgcttcagaggtcgtagaatcagacgaccggccggctgctacgccgtctgagggaatgccccgcaaacggcgacgcaaacacagatctaaggcggcaagcaaatcgtccgaggctgcggaggacggggacgatccggcgcagggctcgggcggcgaggatcgatag

SEQ ID NO: 9676 - protein, 314 aa, Muscodor strobelii
  misc_feature: SGI Peptide ID NO. 563036
  misc_feature (3)..(304): NCBI GI: 154291091 Blast Desc: BC1G_15433 [Botryotinia fuckeliana B05.10] gi|150847123|gb|EDN22316.1| BC1G_15433 [Botryotinia fuckeliana B05.10]
  misc_feature (3)..(249): NCBI GI: 256735280 Blast Desc: NECHADRAFT_74956 [Nectria haematococca mpVI 77-13-4]
  misc_feature (3)..(303): NCBI GI: 156036340 Blast Desc: conserved [Sclerotinia sclerotiorum 1980] gi|154698264|gb|EDN98002.1| conserved [Sclerotinia sclerotiorum 1980]
  misc_feature (3)..(246): NCBI GI: 46106789 Blast Desc: FG00436.1 [Gibberella zeae PH-1]
  misc_feature (3)..(240): NCBI GI: 261357562 Blast Desc: rRNA-processing protein UTP23 [Verticillium albo-atrum VaMs.102]
  misc_feature (3)..(262): NCBI GI: 169603263 Blast Desc: SNOG_04639 [Phaeosphaeria nodorum SN15] gi|111067279|gb|EAT88399.1| SNOG_04639 [Phaeosphaeria nodorum SN15]
  misc_feature (3)..(239): NCBI GI: 189203529 Blast Desc: rRNA-processing protein UTP23 [Pyrenophora tritici-repentis Pt-1C-BFP] gi|187985199|gb|EDU50687.1| rRNA-processing protein UTP23 [Pyrenophora tritici-repentis
  misc_feature (3)..(244): NCBI GI: 213401545 Blast Desc: rRNA-processing protein UTP23 [Schizosaccharomyces japonicus yFS275] gi|211999592|gb|EEB05252.1| rRNA-processing protein UTP23 [Schizosaccharomyces japonicus yFS275]
  misc_feature (3)..(241): NCBI GI: 19075891 Blast Desc: rRNA processing protein [Schizosaccharomyces pombe] gi|74582579|sp|O74862.1|UTP23_SCHPO RecName: Full=rRNA-processing protein utp23; AltName: Full=U three protein 23 rRNA processing
  misc_feature (4)..(239): NCBI GI: 171680211 Blast Desc: protein product [Podospora anserina] gi|170939732|emb|CAP64958.1| protein product [Podospora anserina]
MPRAKRSKQYRKLMSHYVMNFGFREPYQILCDSRFLQSAVQSKMDIKHVMEATLHGASKLFLTQCSIRHLYARSEEPGIPATIDFAKSIERRMCGHLPSDYPSPLSESECLHSVVDPKQTGVNKHHVCCAINDDDVRASLRNSVTAVPLLYIRRSVLIMEPASSATVKARSRDEKSKFRAELRTVGGKRKREEEDDTETDEKGPSEPGTSSSNLEKKKKKGVKAFGRKEPNPLSMKKKKEKPRPGGGEKSAKAPPADDIDASEVVESDDRPAATPSEGMPRKRRRKHRSKAASKSSEAAEDGDDPAQGSGGEDR

SEQ ID NO: 9677 - DNA, 1258 bp, Muscodor strobelii
  misc_feature: SGI EST ID NO. CUFF.22895.0
  misc_feature: Variant of the nucleotide sequence at SEQ ID NO 9675
cctgatcaaagcagtgtgcttaacttgccaggtctcccgaacctctgtcttttcacatcggtctacgagacagggccagcttccgcgacaatgcctcgcgcaaaacgatccaagcagtatcggaagctcatgagccactatgtcatgaattttggtttccgcgagccctaccaaatcctgtgcgacagtcggttcctccaatcggccgtgcaatcaaagatggatatcaagcacgtcatggaagcgactctgcacggagcctccaagctgttcctcacacaatgctccatacgccatctatacgcacgcagcgaggaacctggcatcccggccacgatagacttcgcaaaaagcatagaacgacggatgtgcggccatctaccgtccgactacccatcacccttatcagaatccgagtgtcttcactccgtcgtggatccgaaacagacgggcgtcaataagcaccacgtgtgctgcgccatcaacgatgacgacgttcgcgcctccctgcgaaacagcgtcaccgccgtgcctctgctttacatccggcgctcggttctcatcatggagcccgcgtcttctgcgaccgtgaaagcgcgctcgcgggatgagaaatccaagttcagagccgagctgaggacagtcggggggaagagaaagcgggaagaagaggatgacacggaaaccgacgagaagggcccttcggaacctggtacctcatcttcaaacctagagaagaagaagaaaaagggtgtgaaggcattcggtcgcaaagagccaaatcccttgtcaatgaagaagaagaaagaaaaaccacgaccaggaggaggggagaaatcagccaaggcaccgcccgctgacgatatagacgcttcagaggtcgtagaatcagacgaccggccggctgctacgccgtctgagggaatgccccgcaaacggcgacgcaaacacagatctaaggcggcaagcaaatcgtccgaggctgcggaggacggggacgatccggcgcagggctcgggcggcgaggatcgatagcttcatgcctaacttcgactcttggtacagtttcagagtcccatgtgtacatatattatttgggcgtaaagtgttcatttccgtggcgtttctatgagagtcgatgtttgagaacgaccgttagttgataccacaacacagattgatttccacaacatgcgacaagagctaatcagatcatatttgcttcccccgaactgatttccatcctagacggtctaca

SEQ ID NO: 9678 - DNA, 1068 bp, Muscodor strobelii
  misc_feature: SGI cDNA ID NO. 563037
  misc_feature: Reduced expression when VOC is produced
  misc_feature: Encodes the peptide sequence at SEQ ID NO 9679
atgcccgggggaccaagggagtctatcacctatggcggtcacgagataatcgaaaaggccgccacgctgttgtggatcactgaggatcacgttgctgagcacagcctgaatcaccctcgggctactgatacgttgagagaaagtatacgtggtgttggtaaaatgtttgtcagatatcctgtgtgggatgttagttacgatgtcgctgtgatatttactttgggttccgtcatatgggtcatcaatggtttctttgtgtggctcccagtccagtatccttccacggaattcagtggcgaaatcgctacaggaggcggtatcacggcatttattggggcgacagtattcgaatttggctctatactgttaatgctagaagccgtgaacgagaacaagacagactgcttcggatgggccctcgaggaggcattcgaaagtcgcggcgctttgctgcgcccggcgcccgaagactgtgatcaccatcattcaattaagcagaatttcctttcgaacaggacatcgtccgagaaggagaatcatggtagggcttgggagtggtgtccgacctggtatgagttaaagacacactatttccgggaacttgggtttcttgcttgtctatctcagttcatcggggcaactatattttggatcgcagggttcacaagtctgagtcctatttacgagaatctctctgtgcgctcaactaatggtgcgtactgggcacctcaggtggtaataggcggcacgggattcatcatttcctcgtggctattcatgttagagacccagtccaaatggtatatgattgctcccacggtcctgggatggcacattgggttctggaacctcgttggcgccctggggttcactatttgtggagcgtacttatctgctgttgaagatgagggcataagactaggattcgccagcgaaaatgaggctgcctcgtatgcctctaccttagcaactttcatcggctcattagcttttttaattggtagcgcaatacaatggtacgaaagtctagacaagtatccaatcacgatagagaagaaactgaaatag

SEQ ID NO: 9679 - protein, 355 aa, Muscodor strobelii
  misc_feature: SGI Peptide ID NO. 563037
  misc_feature (37)..(351): NCBI GI: 242803682 Blast Desc: integral membrane protein [Talaromyces stipitatus ATCC 10500] gi|218717569|gb|EED16990.1| integral membrane protein [Talaromyces stipitatus ATCC 10500]
  misc_feature (31)..(351): NCBI GI: 212539776 Blast Desc: integral membrane protein [Penicillium marneffei ATCC 18224] gi|210067342|gb|EEA21434.1| integral membrane protein [Penicillium marneffei ATCC 18224]
  misc_feature (37)..(348): NCBI GI: 119477049 Blast Desc: NFIA_072440 [Neosartorya fischeri NRRL 181] gi|119407381|gb|EAW17330.1| conserved [Neosartorya fischeri NRRL 181]
  misc_feature (37)..(353): NCBI GI: 115449463 Blast Desc: [Aspergillus terreus NIH2624] gi|114187562|gb|EAU29262.1| [Aspergillus terreus NIH2624]
  misc_feature (24)..(348): NCBI GI: 121714208 Blast Desc: conserved [Aspergillus clavatus NRRL 1] gi|119402868|gb|EAW13289.1| conserved [Aspergillus clavatus NRRL 1]
  misc_feature (38)..(348): NCBI GI: 146324239 Blast Desc: integral membrane protein [Aspergillus fumigatus Af293] gi|129557999|gb|EAL91167.2| integral membrane protein [Aspergillus fumigatus Af293]
  misc_feature (38)..(348): NCBI GI: 159127065 Blast Desc: conserved [Aspergillus fumigatus A1163]
  misc_feature (42)..(348): NCBI GI: 225556632 Blast Desc: integral membrane protein [Ajellomyces capsulatus G186AR]
  misc_feature (42)..(348): NCBI GI: 240281495 Blast Desc: integral membrane protein [Ajellomyces capsulatus H143]
  misc_feature (43)..(348): NCBI GI: 154284558 Blast Desc: [Ajellomyces capsulatus NAm1] gi|150406715|gb|EDN02256.1| [Ajellomyces capsulatus NAm1]
  misc_feature: Useful for introducing or modulating the production of volatile compounds
MPGGPRESITYGGHEIIEKAATLLWITEDHVAEHSLNHPRATDTLRESIRGVGKMFVRYPVWDVSYDVAVIFTLGSVIWVINGFFVWLPVQYPSTEFSGEIATGGGITAFIGATVFEFGSILLMLEAVNENKTDCFGWALEEAFESRGALLRPAPEDCDHHHSIKQNFLSNRTSSEKENHGRAWEWCPTWYELKTHYFRELGFLACLSQFIGATIFWIAGFTSLSPIYENLSVRSTNGAYWAPQVVIGGTGFIISSWLFMLETQSKWYMIAPTVLGWHIGFWNLVGALGFTICGAYLSAVEDEGIRLGFASENEAASYASTLATFIGSLAFLIGSAIQWYESLDKYPITIEKKLK

SEQ ID NO: 9680 - DNA, 801 bp, Muscodor strobelii
  misc_feature: SGI EST ID NO. CUFF.22900.0
  misc_feature: Variant of the nucleotide sequence at SEQ ID NO 9678
agatcactgaggatcacgttgctgagcacagcctgaatcaccctcgggctactgatacgttgagagaaagtatacgtggtgttggtaaaatgtttgtcagatatcctgtgtgggatgttagttacgatgtcgctgtgatatttactttgggttccgtcatatgggtcatcaatggtttctttgtgtggctcccagtccagtatccttccacggaattcagtggcgaaatcgctacaggaggcggtatcacggcatttattggggcgacagtattcgaatttggctctatactgttaatgctagaagccgtgaacgagaacaagacagactgcttcggatgggccctcgaggaggcattcgaaagtcgcggcgctttgctgcgcccggcgcccgaagactgtgatcaccatcattcaattaagcagaatttcctttcgaacaggacatcgtccgagaaggagaatcatggtagggcttgggagtggtgtccgacctggtatgagttaaagacacactatttccgggaacttgggtttcttgcttgtctatctcagttcatcggggcaactatattttggatcgcagggttcacaagtctgagtcctatttacgagaatctctctgtgcgctcaactaatggtgcgtactgggcacctcaggtaataggcggcacgggattcatcatttcctcgtggctattcatgttagagacccagtccaaatggtatatgattgctcccacggtcctgggatggcacattgggttctggaacctcgttggcgccctggggttcactattt

SEQ ID NO: 9681 - DNA, 1260 bp, Muscodor strobelii
  misc_feature: SGI cDNA ID NO. 563038
  misc_feature: Encodes the peptide sequence at SEQ ID NO 9682
atgcagccgtttgaggaagcgttcgaaagcgcttgcgcaaatgaggagatacctggggctgtcttattagctacaaacagagatggaagcttctcatacgggaaagcattcggcaagcgttccgtgcgcgcaggtgcggatcagtcaaaacttaagctcgactccgtgatgtggatcgcatcctgcacgaaagtaatcacatcgctagcagccgttcagtgcgtcgagcgcggtctcttgactctcgacgggcccatctacgatgtactcccggagttcaaatccttaccggtcatcaagcgcttcaacgatgccggtagccccgtcctagtggcacactcgaaacccatcactctgcgttgtttgctcaaccattcttcggggtttgcgtatgatgaaacgcatcccaagctcatgagatggcacgaatggcatcgtacagcgcccaatcgggcgaattctgttgaagcccgatacgggtatccgctcgtcttcgagcctggggactcatggtgttacggtgcgggaattgattgggctggtgtcgctgttgaacgcgtcaacggtattagcttacagcggtatttcgaagagaatatctttagtaaagtcgaggcgcgagatattgtattctcaagtcatttgcatacacgtccagatttacaagctcggcttgtggaccagagcaagcgggatccgaacaatccagcaagagtgatacgcagtaacgctcgcgcccaagccagtaagttgttcacgtttggggaccagaatctagactcttacgagagaggaggctgttttgggggattaggcctctatagtacccctgtggattacatgaaaattattgtagcaattctcacgacagatgaagatcaaaagctgttaagcagggccggtgtcgatgagttcttcaggggctgtcttagcgagaaagccaaagatgccttgaacaagctattacatttcgacgaagcgcgaatagggatgggtaatttgccaaagtctgttagaaaaaattggggtttgggcggcattatcaacgaagacgatgttcctggtggccgaaaggctggaaccatgacctggacagggctaccgaatctggcctggttcgtagaccgaaaagcgaatctttgtgggctttacgcaggacagctttatcctccagcggatcccaaagttggagagctctgcgaaatgtttgagaagggtgtatattacgaactacccctgaaaaacgcacccaaactatga

SEQ ID NO: 9682 - protein, 419 aa, Muscodor strobelii
  misc_feature: SGI Peptide ID NO. 563038
  misc_feature (4)..(407): Pfam Id: PF00144 Pfam Desc: Beta-lactamase
  misc_feature (4)..(384): Pfam Id: PF00144 Pfam Desc: Beta-lactamase
  misc_feature (1)..(411): NCBI GI: 169612483 Blast Desc: SNOG_09364 [Phaeosphaeria nodorum SN15] gi|160702521|gb|EAT83556.2| SNOG_09364 [Phaeosphaeria nodorum SN15]
  misc_feature (1)..(408): NCBI GI: 189189214 Blast Desc: beta-lactamase family protein [Pyrenophora tritici-repentis Pt-1C-BFP] gi|187972552|gb|EDU40051.1| beta-lactamase family protein [Pyrenophora tritici-repentis
  misc_feature (1)..(408): NCBI GI: 156063242 Blast Desc: SS1G_01737 [Sclerotinia sclerotiorum 1980] gi|154697073|gb|EDN96811.1| SS1G_01737 [Sclerotinia sclerotiorum 1980]
  misc_feature (1)..(413): NCBI GI: 154294458 Blast Desc: BC1G_13749 [Botryotinia fuckeliana B05.10] gi|150844758|gb|EDN19951.1| BC1G_13749 [Botryotinia fuckeliana B05.10]
  misc_feature (1)..(411): NCBI GI: 156053728 Blast Desc: SS1G_05711 [Sclerotinia sclerotiorum 1980] gi|154703492|gb|EDO03231.1| SS1G_05711 [Sclerotinia sclerotiorum 1980]
  misc_feature (1)..(408): NCBI GI: 119485262 Blast Desc: beta-lactamase family protein [Neosartorya fischeri NRRL 181] gi|119410319|gb|EAW20266.1| beta-lactamase family protein [Neosartorya fischeri NRRL 181]
  misc_feature (1)..(408): NCBI GI: 169776073 Blast Desc: [Aspergillus oryzae RIB40] gi|83771238|dbj|BAE61370.1| protein product [Aspergillus oryzae]
  misc_feature (1)..(408): NCBI GI: 258573097 Blast Desc: beta-lactamase [Uncinocarpus reesii 1704] gi|237900996|gb|EEP75397.1| beta-lactamase [Uncinocarpus reesii 1704]
  misc_feature (1)..(408): NCBI GI: 238502755 Blast Desc: transesterase (LovD), [Aspergillus flavus NRRL3357] gi|220691421|gb|EED47769.1| transesterase (LovD), [Aspergillus flavus NRRL3357]
  misc_feature (1)..(408): NCBI GI: 156055686 Blast Desc: SS1G_05195 [Sclerotinia sclerotiorum 1980] gi|154702979|gb|EDO02718.1| SS1G_05195 [Sclerotinia sclerotiorum 1980]
MQPFEEAFESACANEEIPGAVLLATNRDGSFSYGKAFGKRSVRAGADQSKLKLDSVMWIASCTKVITSLAAVQCVERGLLTLDGPIYDVLPEFKSLPVIKRFNDAGSPVLVAHSKPITLRCLLNHSSGFAYDETHPKLMRWHEWHRTAPNRANSVEARYGYPLVFEPGDSWCYGAGIDWAGVAVERVNGISLQRYFEENIFSKVEARDIVFSSHLHTRPDLQARLVDQSKRDPNNPARVIRSNARAQASKLFTFGDQNLDSYERGGCFGGLGLYSTPVDYMKIIVAILTTDEDQKLLSRAGVDEFFRGCLSEKAKDALNKLLHFDEARIGMGNLPKSVRKNWGLGGIINEDDVPGGRKAGTMTWTGLPNLAWFVDRKANLCGLYAGQLYPPADPKVGELCEMFEKGVYYELPLKNAPKL

SEQ ID NO: 9683 - DNA, 3718 bp, Muscodor strobelii
  misc_feature: SGI EST ID NO. CUFF.22924.0
  misc_feature: Variant of the nucleotide sequence at SEQ ID NO 9681
aatagttgagacttaatggtcacattgcaagtgaaatatttgcaggcatatcaatcattatgcagccgtttgaggaagcgttcgaaagcgcttgcgcaaatgaggagatacctggggctgtcttattagctacaaacagagatggaagcttctcatacgggaaagcattcggcaagcgttccgtgcgcgcaggtgcggatcagtcaaaacttaagctcgactccgtgatgtggatcgcatcctgcacgaaagtaatcacatcgctagcagccgttcagtgcgtcgagcgcggtctcttgactctcgacgggcccatctacgatgtactcccggagttcaaatccttaccggtcatcaagcgcttcaacgatgccggtagccccgtcctagtggcacactcgaaacccatcactctgcgttgtttgctcaaccattcttcggggtttgcgtatgatgaaacgcatcccaagctcatgagatggcacgaatggcatcgtacagcgcccaatcgggcgaattctgttgaagcccgatacgggtatccgctcgtcttcgagcctggggactcatggtgttacggtgcgggaattgattgggctggtgtcgctgttgaacgcgtcaacggtattagcttacagcggtatttcgaagagaatatctttagtaaagtcgaggcgcgagatattgtattctcaagtcatttgcatacacgtccagatttacaagctcggcttgtggaccagagcaagcgggatccgaacaatccagcaagagtgatacgcagtaacgctcgcgcccaagccagtaagttgttcacgtttggggaccagaatctagactcttgttatgagagatgcaggtatgtatggtaacctgctagggaaaaaactaacgtatgacctttctgcccactagacgagagaggaggctgttttgggggattaggcctctatagtacccctgtggattacatgaaaattattgtagcaattctcacgacagatgaagatcaaaagctgttaagcagggccggtgtcgatgagttcttcaggggctgtcttagcgagaaagccaaagatgccttgaacaagctattacatttcgacgaagcgcgaatagggatgggtaatttgccaaagtctgttagaaaaaattggggtttgggcggcattatcaacgaagacgatgttcctggtggccgaaaggctggaaccatgacctggacagggctaccgaatctggcctggttcgtagaccgaaaagcgaatctttgtgggctttacgcaggacagctttatcctccagcggatcccaaagttggagagctctgcgaaatgtttgagaagggtgtatattacgaactacccctgaaaaacgcacccaaactatgaagaaccaggataatcccaaacccctaatttgttcgtacagtgtccatcatgaatctctcaatcgttgttgggcgtgtttgatcccgtgtatccgctcaacgcctaccaatgcaaaacgccgaagtcccattgggacatattctttccaaggccaatttccaatggaagccgtctacaagtacctctgtaacgcctcgcagacatcccatcactttctggctcccaacgccctgcccagtaaacctaagtgacttgaggtagactacatattgaaactctttgaaatgtctgagatgcggatcgacctacttcatcgtgcgctggcataatgcagcgacgacactaatatcgtcgggtttgcctataaccattagattatggtacgagttgagtgcgacatcagaaatctagactcacctccctcacttgctaggccttcttcgatggcatgctccatgaatgggctttctgcgaaggggtcatttgcgatggccttagccgcactgacgagctgttctgccacgaaatccatgccaccgttggcgccaaaggagcggtcgccgctggccgagcctccttctcccgcctcccatcgctgcacgctttttgtgacattttccacgatctcgtggtcccatagattgtcaatcacgccatcagacatggcaagcacgacgtctccctcgctgagctctacggtgtcgacaacggcattctccagcggcgtatccgggctgtttgtacccagctgtcggggacagtcaaaccaatgccactgctcctgcgatttgtagatcatcttcttagtcttggtccggacgaccatgacctgggagtcaccgatgttggtgacgtagagcagcgggagcacggatgacggcgcattgatcgcgtctcccttgtagaacagctgcgcgccagtggctgttgtagtgccttggcagtcgccgggccctgacgtagcctcgatggtgcgctcatatgcctcttgtagatagcgcctcggatcgggcttgtacgaatggtgaggcgaccgagcggcagccatgtcctcctccatggccgagacccagaagtgcaatatcagcctggaccacagactgaggcgcatgtcagcgaaggcaacgagagggaaaggtgtagggttagcgttgttttacccagcatggcctcttgggcgggcggaccaagccccgacgccatcgttggcgcagatgaagtggtcgttggcgtagacggcgtcatctccattggtccagccccggatgagctcgccgtggacgaaggcccgcctgtcgcggctctgatgatgggtgctcagcgggtcggagaaggagcccgagggcggagagaggaaggggggagggaaaggtcggggcgtgcgcttggcgaacagcgcaaggccggtctcgaagcggaagggaggtgtcgggctcggtggaggggcattcggcggattcgtggatgcggaggtagggccagttgcatcggccagtcgcggggtggacaggaaagtacgctcccgcgccgcgggataggagatgggacatgacggcgtcgcgcagatgcgcacgcgcggtggctgtcgcgttggaccgaggacagaggcccaggctgagggccgcctcatccccgcgatgtgcgcccctccagacccaaagctgtgtggacgcggcgtagaggcgagatgtacgtgcaccttggggcgcggctcatcaaggcgacaatgccggtagtgtgagggggcgaggcttgtgacgagtggccgaatgacgagcgctttcatgagacagaccaagttgagacctgatgcagcggcatgtcgggacggtaggtggtgttcaatgatccatggaagtccgataagcggcgtgttctggaaataaaaagtagtcccttccatccactaccggcatgtgcacaagaccgaaggtgacctcatcccaatatggaaaggaagttcctggcactacctgcatgtagggatatggaaatggcatacgtctcgttttggttactaagaattggacttgctccttttgatttgcatctacatttgcttcgatctcccaaatattctatctctcaatcattcccatggcaagaaactgtcttggctcggccactgacgtcgtccttctcatctcgaactcttcattaggctagccgcatgtacccggcaacgtggaaacctccgcaattcgagataattttatgattaccacaatcctcgatgccgcgaccgtggtcatgatcctttgcaatccttgtccgcctggattagacacccatttcagtgaatttaatatatctcatctacagtatat

SEQ ID NO: 9684 - DNA, 1209 bp, Muscodor strobelii
  misc_feature: SGI cDNA ID NO. 563039
  misc_feature: Reduced expression when VOC is produced
  misc_feature: Encodes the peptide sequence at SEQ ID NO 9685
atgaggcggccctcagcctgggcctctgtcctcggtccaacgcgacagccaccgcgcgtgcgcatctgcgcgacgccgtcatgtcccatctcctatcccgcggcgcgggagcgtactttcctgtccaccccgcgactggccgatgcaactggccctacctccgcatccacgaatccgccgaatgcccctccaccgagcccgacacctcccttccgcttcgagaccggccttgcgctgttcgccaagcgcacgccccgacctttccctccccccttcctctctccgccctcgggctccttctccgacccgctgagcacccatcatcagagccgcgacaggcgggccttcgtccacggcgagctcatccggggctggaccaatggagatgacgccgtctacgccaacgaccacttcatctgcgccaacgatggcgtcggggcttggtccgcccgcccaagaggccatgctggtctgtggtccaggctgatattgcacttctgggtctcggccatggaggaggacatggctgccgctcggtcgcctcaccattcgtacaagcccgatccgaggcgctatctacaagaggcatatgagcgcaccatcgaggctacgtcagggcccggcgactgccaaggcactacaacagccactggcgcgcagctgttctacaagggagacgcgatcaatgcgccgtcatccgtgctcccgctgctctacgtcaccaacatcggtgactcccaggtcatggtcgtccggaccaagactaagaagatgatctacaaatcgcaggagcagtggcattggtttgactgtccccgacagctgggtacaaacagcccggatacgccgctggagaatgccgttgtcgacaccgtagagctcagcgagggagacgtcgtgcttgccatgtctgatggcgtgattgacaatctatgggaccacgagatcgtggaaaatgtcacaaaaagcgtgcagcgatgggaggcgggagaaggaggctcggccagcggcgaccgctcctttggcgccaacggtggcatggatttcgtggcagaacagctcgtcagtgcggctaaggccatcgcaaatgaccccttcgcagaaagcccattcatggagcatgccatcgaagaaggcctagcaagtgagggaggcaaacccgacgatattagtgtcgtcgctgcattatgccagcgcacgatgaagtag

SEQ ID NO: 9685 - protein, 402 aa, Muscodor strobelii
  misc_feature: SGI Peptide ID NO. 563039
  misc_feature (53)..(400): NCBI GI: 154291089 Blast Desc: BC1G_15432 [Botryotinia fuckeliana B05.10] gi|150847122|gb|EDN22315.1| BC1G_15432 [Botryotinia fuckeliana B05.10]
  misc_feature (19)..(400): NCBI GI: 156036338 Blast Desc: SS1G_12858 [Sclerotinia sclerotiorum 1980] gi|154698263|gb|EDN98001.1| SS1G_12858 [Sclerotinia sclerotiorum 1980]
  misc_feature (63)..(400): NCBI GI: 171680209 Blast Desc: protein product [Podospora anserina] gi|170939731|emb|CAP64957.1| protein product [Podospora anserina]
  misc_feature (67)..(400): NCBI GI: 85116849 Blast Desc: NCU02749 [Neurospora crassa OR74A] gi|28926937|gb|EAA35898.1| conserved [Neurospora crassa OR74A]
  misc_feature (66)..(397): NCBI GI: 46106787 Blast Desc: FG00435.1 [Gibberella zeae PH-1]
  misc_feature (64)..(386): NCBI GI: 261357562 Blast Desc: rRNA-processing protein UTP23 [Verticillium albo-atrum VaMs.102]
  misc_feature (70)..(400): NCBI GI: 116207016 Blast Desc: CHGG_02801 [Chaetomium globosum CBS 148.51] gi|88183398|gb|EAQ90866.1| CHGG_02801 [Chaetomium globosum CBS 148.51]
  misc_feature (61)..(384): NCBI GI: 145614410 Blast Desc: MGG_11352 [Magnaporthe grisea 70-15] gi|145021342|gb|EDK05471.1| MGG_11352 [Magnaporthe grisea 70-15]
  misc_feature (102)..(384): NCBI GI: 256735281 Blast Desc: NECHADRAFT_74957 [Nectria haematococca mpVI 77-13-4]
  misc_feature (51)..(399): NCBI GI: 169602441 Blast Desc: SNOG_04222 [Phaeosphaeria nodorum SN15] gi|111066862|gb|EAT87982.1| SNOG_04222 [Phaeosphaeria nodorum SN15]
  misc_feature (126)..(395): SWISSPROT Homolog: EC 3.1.3.16 Phosphoprotein phosphatase
  misc_feature: Useful for introducing or modulating the production of volatile compounds
MRRPSAWASVLGPTRQPPRVRICATPSCPISYPAARERTFLSTPRLADATGPTSASTNPPNAPPPSPTPPFRFETGLALFAKRTPRPFPPPFLSPPSGSFSDPLSTHHQSRDRRAFVHGELIRGWTNGDDAVYANDHFICANDGVGAWSARPRGHAGLWSRLILHFWVSAMEEDMAAARSPHHSYKPDPRRYLQEAYERTIEATSGPGDCQGTTTATGAQLFYKGDAINAPSSVLPLLYVTNIGDSQVMVVRTKTKKMIYKSQEQWHWFDCPRQLGTNSPDTPLENAVVDTVELSEGDVVLAMSDGVIDNLWDHEIVENVTKSVQRWEAGEGGSASGDRSFGANGGMDFVAEQLVSAAKAIANDPFAESPFMEHAIEEGLASEGGKPDDISVVAALCQRTMK

SEQ ID NO: 9686 - DNA, 3710 bp, Muscodor strobelii
  misc_feature: SGI EST ID NO. CUFF.22925.1
  misc_feature: Variant of the nucleotide sequence at SEQ ID NO 9684
attaaattcactgaaatgggtgtctaatccaggcggacaaggattgcaaaggatcatgaccacggtcgcggcatcgaggattgtggtaatcataaaattatctcgaattgcggaggtttccacgttgccgggtacatgcggctagcctaatgaagagttcgagatgagaaggacgacgtcagtggccgagccaagacagtttcttgccatgggaatgattgagagatagaatatttgggagatcgaagcaaatgtagatgcaaatcaaaaggagcaagtccaattcttagtaaccaaaacgagacgtatgccatttccatatccctacatgcaggtagtgccaggaacttcctttccatattgggatgaggtcaccttcggtcttgtgcacatgccggtagtggatggaagggactactttttatttccagaacacgccgcttatcggacttccatggatcattgaacaccacctaccgtcccgacatgccgctgcatcaggtctcaacttggtctgtctcatgaaagcgctcgtcattcggccactcgtcacaagcctcgccccctcacactaccggcattgtcgccttgatgagccgcgccccaaggtgcacgtacatctcgcctctacgccgcgtccacacagctttgggtctggaggggcgcacatcgcggggatgaggcggccctcagcctgggcctctgtcctcggtccaacgcgacagccaccgcgcgtgcgcatctgcgcgacgccgtcatgtcccatctcctatcccgcggcgcgggagcgtactttcctgtccaccccgcgactggccgatgcaactggccctacctccgcatccacgaatccgccgaatgcccctccaccgagcccgacacctcccttccgcttcgagaccggccttgcgctgttcgccaagcgcacgccccgacctttccctccccccttcctctctccgccctcgggctccttctccgacccgctgagcacccatcatcagagccgcgacaggcgggccttcgtccacggcgagctcatccggggctggaccaatggagatgacgccgtctacgccaacgaccacttcatctgcgccaacgatggcgtcggggcttggtccgcccgcccaagaggccatgctggtctgtggtccaggctgatattgcacttctgggtctcggccatggaggaggacatggctgccgctcggtcgcctcaccattcgtacaagcccgatccgaggcgctatctacaagaggcatatgagcgcaccatcgaggctacgtcagggcccggcgactgccaaggcactacaacagccactggcgcgcagctgttctacaagggagacgcgatcaatgcgccgtcatccgtgctcccgctgctctacgtcaccaacatcggtgactcccaggtcatggtcgtccggaccaagactaagaagatgatctacaaatcgcaggagcagtggcattggtttgactgtccccgacagctgggtacaaacagcccggatacgccgctggagaatgccgttgtcgacaccgtagagctcagcgagggagacgtcgtgcttgccatgtctgatggcgtgattgacaatctatgggaccacgagatcgtggaaaatgtcacaaaaagcgtgcagcgatgggaggcgggagaaggaggctcggccagcggcgaccgctcctttggcgccaacggtggcatggatttcgtggcagaacagctcgtcagtgcggctaaggccatcgcaaatgaccccttcgcagaaagcccattcatggagcatgccatcgaagaaggcctagcaagtgagggaggcaaacccgacgatattagtgtcgtcgctgcattatgccagcgcacgatgaagtaggtcgatccgcatctcagacatttcaaagagtttcaatatgtagtctacctcaagtcacttaggtttactgggcagggcgttgggagccagaaagtgatgggatgtctgcgaggcgttacagaggtacttgtagacggcttccattggaaattggccttggaaagaatatgtcccaatgggacttcggcgttttgcattggtaggcgttgagcggatacacgggatcaaacacgcccaacaacgattgagagattcatgatggacactgtacgaacaaattaggggtttgggattatcctggttcttcatagtttgggtgcgtttttcaggggtagttcgtaatatacacccttctcaaacatttcgcctattcccagtgtttagtattgctttcaggacaatttcgatttttaggggaactatgcttgcagcgtgtatgaacgaagctcgcatagtttggaggcgtaggagaggaaaatatgcaacaacgtacagagctctccaactttgggatccgctggaggataaagctgtcctgcgtaaagcccacaaagattcgcttttcggtctacgaactattgctcaagaagtcagtcacaaaaacaaatgtagatactcgtggaagagtgatttgcttagaagcagaataactcacccaggccagattcggtagccctgtccaggtcatggttccagcctttcggccaccaggaacatcgtcttcgttgataatgccgcccaaaccccaattttttctaacagactttggcaaattacccatccctattcgcgcttcgtcgaaatgtaatagcttgttcaaggcatctttggctttctcgctaagacagcccctgaagaactcatcgacaccggccctgcttaacagcttttgatcttcatctgtcgtgagaattgctacaataattttcatgtaatccacaggggtactatagaggcctaatcccccaaaacagcctcctctctcgtctagtgggcagaaaggtcatacgttagttttttccctagcaggttaccatacatacctgcatctctcataacaagagtctagattctggtccccaaacgtgaacaacttactacagtgagaagtcagtcggtgtgcaaggaatttagttaagcataactgccgcaagattatctcatacctggcttgggcgcgagcgttactgcgtatcactcttgctggattgttcggatcccgcttgctctggtccacaagccgagcttgtaaatctggacgtgtatgcaaatgacttgagaatacaatatctcgcgcctcgactttactaaagatattctcttcgaaataccgctgtaagctaataccgttgacgcgttcaacagcgacaccagcccaatcaattcccgcaccgtaacaccatgagtccccaggctcgaagacgagcggatacccgtatcgggcttcaacagaattcgcccgattgggcgctgtacgatgccattcgtgccatctcatgagcttgggatgcgtttcatcatacgcaaaccccgaagaatggttgagcaaacaacgcagagtgatgggtttcgagtgtgccactaggacggggctaccggcatcgttgaagcgcttgatgaccggtaaggatttgaactccgggagtacatcgtagatgggcccgtcgagagtcaagagaccgcgctcgacgcactgaacggctgctagcgatgtgattactttcgtgcaggatgcgatccacatcacggagtcgagcttaagttttgactgatccgcacctgcgcgcacggaacgcttgccgaatgctttcccgtatgagaagc

SEQ ID NO: 9687 - DNA, 4245 bp, Muscodor strobelii
  misc_feature: SGI cDNA ID NO. 563040
  misc_feature: Reduced expression when VOC is produced
  misc_feature: Encodes the peptide sequence at SEQ ID NO 9688
atgtcccacttctctggctcgcattcacccaccaccggcgaaccgaaacctctcgacgacgagtctcctccgccatcgtcggcctcgccaacccgcagactcagcaccttcgctgccaacaggtccccatacgcgagtgggaaccccactgccatcaagagcgacttcttccatcgccgcggccactcccgcgccgcctcgtcgcccgtctccctctcggccccctcttccgcactgagggttgatcatgacagtttgcctgtgacgagttcccccatctccgccgccgaccacagccggtcccgaagccgcagtaactcccgtccgctgtctatgctccaggcataccaaccgccccgcatggatgtcaacgaggacaccattcccgagctgcagcccatcttcaccttcctgaacagccacgccaacaagctctaccaggagggctactttctcaagctcgacgaccagaacacccagggaaagccaaatgcggaccgcacctggacggaatgctttgcgcaactggtagggacggtcctgtccctctgggatgcagctgagctcgatgctgcgggtgaaaatggcgaggttttgccaaaatttatcaacctcaccgatgcttcgattaaaatgattgaatcgctgccgacgaggactaaagaggagcagccgcttcagaacatcttgagtctttcgacggccggaagaaatcgctatctgctgcacttcaactcgaggcactcgttgattcaatggacggcgggcatcaggcttgccatgttcgagcactccactctccaggaagcttataccggtgcgcttatagcgggcaagggaaagaccctgaacaacattggcatcatcatggaaaggtcacgcatgccagtggatcagtgggtacgagtccgttttggcgctggcgttccttggagacgctgctggtgcgtcatttcgccgccagacgagaaggaataccaaaaagtgatgaaggagcataagaagaaaaacccgtatgaccgttcgcatcctccgctgctcaagggcaatatcaagttctacgaccaaaagaaggaagggaaaaaacagaagaagatgcagccaattgcaaccatcaacgatgcctactccgcgtacgctctctacccgcagtctaaatcattgatcgatgcctctacgttgatcaagattgagggagatatgactatccatgctgaaccaccttcaaccaccgaaggcttcgtatttatcatgcccgaagtcaatcctgctatcagtggctttgagatgatgctgcggtttttattccccacgtgggattcatttggactgtatggtcgtcctgggcgattggtcgccagtgttttggattccagatcactcatgttcgcaatgcctaaatcgaagcgctacggttatcttgaactgctagatgtgtcgagcctgatcctgaccgatgaaagcggaggatggaacgagagagaatggaggagaaaactcaaagaactcacgggcactcgaatgaatagcaccgatgacgatgagagccactcttcaagccggacaaacagtcgagcgaaacgtttgagttttggtgttgccgcaggaggcgcctcaagaccccgcgttgggtttgctgacgatgcaccgtcgccaccgtccgtccgagcgtcgcggtcgttgtctcttaattctggccctaacggcagaaacgaaacgatgtctcccagaagtcaaaattcgccccctatcatgggcgatggtatacttgccagccactcgcgcaatagttccgaccctgctttcccgccacagatctctagccacgcggacaatccatactcgacaagccctgcaccgggtcgtcttcaccaaaccggccatggtttcgtaaatgaccttgcgtccacaccagagcgcgcaagcttagaagatgagaggttggacatgcctatgcgtgacttcgacggcatgcggagaatgcagactccagaaccggtctcgcagccacccagattttctcatgctccaggggccaaacctaataatcgcccgtatcattcaccggaaatgcgtcgtgccaatagtcgtctatccatggatactcttaatcagctcaccaatcagggtggtgtggtcattactccggatctaatggaccccgagagtgagaggagcagtgaggaacgaattgggcgatccgacacacaacccgatcaacgcggtccgcctcctccggtacatcttcacgccaacaacactggaatgcctactaacaatggacctcgtgaagctttgatgggaaatgcccctcgctcccccgggataccccctcgcgtcgattctgtatcccaaccagcacgatccccgatgagtccagcgttccctggtggcaacgatgcctatggaccgaactctcgaccgaagacgccgaactctcgcccaggcactgctccaggtaaccgacctcccgccccacctgcacatggccctccacaaggcaactatcctccctctggttatcgtggatcaccaggtatgccaccacctggtagaggccgtgaccgcccaccgcctaacatgcctccccctggtcgaggccgcggtcgtggctatcccaataatggccctccagacgcgtatggaggatatccaccaagctctcaaggcagagggcgagcgcgtcctgatggtagtctaccccctttaaatacctccggatcaataaataggaaacccttgccaacgcgctcggatagtcttcagcaacgtccttcccggggtaatgacactcctattactgaatcggcgagtagtgggagtttaacaggtaaccgtatcgacgccgatgggttcggtcaagtgcgtactcaaactcagggtagccgccctggccaaggtatccaacgctacgatacagcgtatagccaagccagtagcagatacgatgatgctgcatctatttcaagccctgattatgcaagttcacgcccttcgactgacacaacttcttctgtcgagcggccacgggctggagtgttgaagactgtgggggcaccggaagatagcgacacacctgttgttggaagcagctcattggtaccagacttcgattttgggcctactcttaactacgcggcgggacctcgaagcatgacgccaacgttcaatccaccagcaccacaacacacacattcaccagcgtctcgaggtcaatcccctgcgccaccgatgcaaaaaccggctgtatcacccgacgttacgcatgggagattggaaccggaagatagtactcgtaggagtgtaatatggcaacctgcgaccgcgatgccacgatcacccagtcccggaggtcctggcctgtcagcagaagagtttgtgcagcagagggctgccgcggctgctgcgacaccaatgtatgctgtccaccacagacagtcctcaagtgtcacgctttcggcttaccacacgggcacaccaacgcctcctcttggtcatggtcaaactgcagacttcatcggaatggcacactcgcgcaatagctcccaagacatgctgcaacggccggggtctcgcggggctggtgaacttctacaacgaccaaaatcgcgtgaactgttacaacggcccgggtctcgaggggcgggagcgacgttaggtggtcagaccatgcccaatgcgtcccatctctcggcgcgtgaacaagaacatgtggcgcgggttactggccaaccgctgatcagtatggcgggaaacaaaagcgcaccacaggtccagggcgccggactcgtgggtgcaattgaagcgcgcgagcgagagcgagaacaaatgaagcatggcgtcagcggacaagctgtgcagcatgttatcgaccagcgacagcaacagcagcagcagcagcaacagcagtttgcgtatcagcagcagtaccaacagccactaccgtctcccggtttaccaccaccttccgggatgtattctaatatggggcgcggcatgccacctccgtcgcccagtcggcaagggttcggaatgccgcgatatggtagtccgggtcctggctttgaaagagacgggcaatgggcaaataacagtggatttcggtcccctccaccggggcaattagatgcgcggtacttgccgcctcaggggcagccatcgccccagttctctggagggtcatacggagctcctggtggtggacagggccaaaatccatatccacatcacgggcaagcattttag

SEQ ID NO: 9688 - protein, 1414 aa, Muscodor strobelii
  misc_feature: SGI Peptide ID NO. 563040
  misc_feature (145)..(262): Pfam Id: PF00169 Pfam Desc: PH domain
  misc_feature (108)..(1296): NCBI GI: 171680207 Blast Desc: protein product [Podospora anserina] gi|170939730|emb|CAP64956.1| protein product [Podospora anserina]
  misc_feature (121)..(1296): NCBI GI: 116207018 Blast Desc: CHGG_02802 [Chaetomium globosum CBS 148.51] gi|88183399|gb|EAQ90867.1| CHGG_02802 [Chaetomium globosum CBS 148.51]
  misc_feature (99)..(713): NCBI GI: 154291087 Blast Desc: BC1G_15431 [Botryotinia fuckeliana B05.10] gi|150847121|gb|EDN22314.1| BC1G_15431 [Botryotinia fuckeliana B05.10]
  misc_feature (100)..(706): NCBI GI: 156036336 Blast Desc: SS1G_12857 [Sclerotinia sclerotiorum 1980] gi|154698262|gb|EDN98000.1| SS1G_12857 [Sclerotinia sclerotiorum 1980]
  misc_feature (102)..(699): NCBI GI: 85116853 Blast Desc: NCU02750 [Neurospora crassa OR74A] gi|28926938|gb|EAA35899.1| conserved [Neurospora crassa OR74A]
  misc_feature (121)..(822): NCBI GI: 256734563 Blast Desc: NECHADRAFT_65680 [Nectria haematococca mpVI 77-13-4]
  misc_feature (121)..(822): NCBI GI: 46106734 Blast Desc: FG00434.1 [Gibberella zeae PH-1]
  misc_feature (121)..(514): NCBI GI: 145614414 Blast Desc: MGG_11354 [Magnaporthe grisea 70-15] gi|145021344|gb|EDK05473.1| MGG_11354 [Magnaporthe grisea 70-15]
  misc_feature (105)..(748): NCBI GI: 242803034 Blast Desc: PH domain protein [Talaromyces stipitatus ATCC 10500] gi|218717437|gb|EED16858.1| PH domain protein [Talaromyces stipitatus ATCC 10500]
  misc_feature (62)..(732): NCBI GI: 119496761 Blast Desc: PH domain protein [Neosartorya fischeri NRRL 181] gi|119413316|gb|EAW23257.1| PH domain protein [Neosartorya fischeri NRRL 181]
  misc_feature: Useful for introducing or modulating the production of volatile compounds
MSHFSGSHSPTTGEPKPLDDESPPPSSASPTRRLSTFAANRSPYASGNPTAIKSDFFHRRGHSRAASSPVSLSAPSSALRVDHDSLPVTSSPISAADHSRSRSRSNSRPLSMLQAYQPPRMDVNEDTIPELQPIFTFLNSHANKLYQEGYFLKLDDQNTQGKPNADRTWTECFAQLVGTVLSLWDAAELDAAGENGEVLPKFINLTDASIKMIESLPTRTKEEQPLQNILSLSTAGRNRYLLHFNSRHSLIQWTAGIRLAMFEHSTLQEAYTGALIAGKGKTLNNIGIIMERSRMPVDQWVRVRFGAGVPWRRCWCVISPPDEKEYQKVMKEHKKKNPYDRSHPPLLKGNIKFYDQKKEGKKQKKMQPIATINDAYSAYALYPQSKSLIDASTLIKIEGDMTIHAEPPSTTEGFVFIMPEVNPAISGFEMMLRFLFPTWDSFGLYGRPGRLVASVLDSRSLMFAMPKSKRYGYLELLDVSSLILTDESGGWNEREWRRKLKELTGTRMNSTDDDESHSSSRTNSRAKRLSFGVAAGGASRPRVGFADDAPSPPSVRASRSLSLNSGPNGRNETMSPRSQNSPPIMGDGILASHSRNSSDPAFPPQISSHADNPYSTSPAPGRLHQTGHGFVNDLASTPERASLEDERLDMPMRDFDGMRRMQTPEPVSQPPRFSHAPGAKPNNRPYHSPEMRRANSRLSMDTLNQLTNQGGVVITPDLMDPESERSSEERIGRSDTQPDQRGPPPPVHLHANNTGMPTNNGPREALMGNAPRSPGIPPRVDSVSQPARSPMSPAFPGGNDAYGPNSRPKTPNSRPGTAPGNRPPAPPAHGPPQGNYPPSGYRGSPGMPPPGRGRDRPPPNMPPPGRGRGRGYPNNGPPDAYGGYPPSSQGRGRARPDGSLPPLNTSGSINRKPLPTRSDSLQQRPSRGNDTPITESASSGSLTGNRIDADGFGQVRTQTQGSRPGQGIQRYDTAYSQASSRYDDAASISSPDYASSRPSTDTTSSVERPRAGVLKTVGAPEDSDTPVVGSSSLVPDFDFGPTLNYAAGPRSMTPTFNPPAPQHTHSPASRGQSPAPPMQKPAVSPDVTHGRLEPEDSTRRSVIWQPATAMPRSPSPGGPGLSAEEFVQQRAAAAAATPMYAVHHRQSSSVTLSAYHTGTPTPPLGHGQTADFIGMAHSRNSSQDMLQRPGSRGAGELLQRPKSRELLQRPGSRGAGATLGGQTMPNASHLSAREQEHVARVTGQPLISMAGNKSAPQVQGAGLVGAIEAREREREQMKHGVSGQAVQHVIDQRQQQQQQQQQQFAYQQQYQQPLPSPGLPPPSGMYSNMGRGMPPPSPSRQGFGMPRYGSPGPGFERDGQWANNSGFRSPPPGQLDARYLPPQGQPSPQFSGGSYGAPGGGQGQNPYPHHGQAF

SEQ ID NO: 9689 - DNA, 5314 bp, Muscodor strobelii
  misc_feature: SGI EST ID NO. CUFF.23492.2
  misc_feature: Variant of the nucleotide sequence at SEQ ID NO 9687
cgggtttgcaagtcgcagctctcctaccgccgcctttctagagtacgcatcttctcttgattggcgtcacgaagaccagcagagtaaggtaggtagttcgccgagcaaggttacctgtcagtcatcgtcgcaaaagtcgacttgtacggtcctcgacaaccgactcgccgagaccttccccgttcctctggcgcacggcattccgccctttcgtatttacacgtcaaagtggatatcgcgcataccgtgccactaagagttcctgaagctacaaaacctcgtcgcttggccacgccattgctccatcacgctcgctgactgttggccttcctttttgctgtgcagtcgagtctcatataattgctgctgtatattgccgtttcgcagacttcctcgcgtcttttcgcccattaatatctacgcggctgattatttgctcacgaagagacgacgattactacctagcaccgcaccattcgatgctggtggatcctcgtcttgcaacacttacaccgagccacgaacactttgtgcatcacagagctggcattatagggacacaagctccattgttgcgccgaggacctctttgagggccgaaggtttctattcacgacaatatgggtcggaatcgtgtcctctcgtttatgtcccacttctctggctcgcattcacccaccaccggcgaaccgaaacctctcgacgacgagtctcctccgccatcgtcggcctcgccaacccgcagactcagcaccttcgctgccaacaggtccccatacgcgagtgggaaccccactgccatcaagagcgacttcttccatcgccgcggccactcccgcgccgcctcgtcgcccgtctccctctcggccccctcttccgcactgagggttgatcatgacagtttgcctgtgacgagttcccccatctccgccgccgaccacagccggtcccgaagccgcagtaactcccgtccgctgtctatgctccaggcataccaaccgccccgcatggatgtcaacgaggacaccattcccgagctgcagcccatcttcaccttcctgaacagccacgccaacaagctctaccaggagggctactttctcaagctcgacgaccagaacacccgtatgtcttgtccttgctctctccgctgtccatcttgaccagtcacgaccagccacgtacctaacatgatgcagagggaaagccaaatgcggaccgcacctggacggaatgctttgcgcaactggtagggacggtcctgtccctctgggatgcagctgagctcgatgctgcgggtgaaaatggcgaggttttgccaaaatttatcaacctcaccgatgcttcgattaaaatgattgaatcgctgccgacgaggactaaagaggagcagccgcttcagaacatcttgagtctttcgacggccggaagaaatcgctatctgctgcacttcaactcgaggcactcgttgattcaatggacggcgggcatcaggcttgccatgttcgagcactccactctccaggaagcttataccggtgcgcttatagcgggcaagggaaagaccctgaacaacattggcatcatcatggaaaggtcacgcatgccagtggatcagtgggtacgagtccgttttggcgctggcgttccttggagacgctgctggtgcgtcatttcgccgccagacgagaaggaataccaaaaagtgatgaaggagcataagaagaaaaacccgtatgaccgttcgcatcctccgctgctcaagggcaatatcaagttctacgaccaaaagaaggaagggaaaaaacagaagaagatgcagccaattgcaaccatcaacgatgcctactccgcgtacgctctctacccgcagtctaaatcattgatcgatgcctctacgttgatcaagattgagggagatatgactatccatgctgaaccaccttcaaccaccgaaggcttcgtatttatcatgcccgaagtcaatcctgctatcagtggctttgagatgatgctgcggtttttattccccacgtgggattcatttggactgtatggtcgtcctgggcgattggtcgccagtgttttggattccagatcactcatgttcgcaatgcctaaatcgaagcgctacggttatcttgaactgctagatgtgtcgagcctgatcctgaccgatgaaagcggaggatggaacgagagagaatggaggagaaaactcaaagaactcacgggcactcgaatgaatagcaccgatgacgatgagagccactcttcaagccggacaaacagtcgagcgaaacgtttgagttttggtgttgccgcaggaggcgcctcaagaccccgcgttgggtttgctgacgatgcaccgtcgccaccgtccgtccgagcgtcgcggtcgttgtctcttaattctggccctaacggcagaaacgaaacgatgtctcccagaagtcaaaattcgccccctatcatgggcgatggtatacttgccagccactcgcgcaatagttccgaccctgctttcccgccacagatctctagccacgcggacaatccatactcgacaagccctgcaccgggtcgtcttcaccaaaccggccatggtttcgtaaatgaccttgcgtccacaccagagcgcgcaagcttagaagatgagaggttggacatgcctatgcgtgacttcgacggcatgcggagaatgcagactccagaaccggtctcgcagccacccagattttctcatgctccaggggccaaacctaataatcgcccgtatcattcaccggaaatgcgtcgtgccaatagtcgtctatccatggatactcttaatcagctcaccaatcagggtggtgtggtcattactccggatctaatggaccccgagagtgagaggagcagtgaggaacgaattgggcgatccgacacacaacccgatcaacgcggtccgcctcctccggtacatcttcacgccaacaacactggaatgcctactaacaatggacctcgtgaagctttgatgggaaatgcccctcgctcccccgggataccccctcgcgtcgattctgtatcccaaccagcacgatccccgatgagtccagcgttccctggtggcaacgatgcctatggaccgaactctcgaccgaagacgccgaactctcgcccaggcactgctccaggtaaccgacctcccgccccacctgcacatggccctccacaaggcaactatcctccctctggttatcgtggatcaccaggtatgccaccacctggtagaggccgtgaccgcccaccgcctaacatgcctccccctggtcgaggccgcggtcgtggctatcccaataatggccctccagacgcgtatggaggatatccaccaagctctcaaggcagagggcgagcgcgtcctgatggtagtctaccccctttaaatacctccggatcaataaataggaaacccttgccaacgcgctcggatagtcttcagcaacgtccttcccggggtaatgacactcctattactgaatcggcgagtagtgggagtttaacaggtaaccgtatcgacgccgatgggttcggtcaagtgcgtactcaaactcagggtagccgccctggccaaggtatccaacgctacgatacagcgtatagccaagccagtagcagatacgatgatgctgcatctatttcaagccctgattatgcaagttcacgcccttcgactgacacaacttcttctgtcgagcggccacgggctggagtgttgaagactgtgggggcaccggaagatagcgacacacctgttgttggaagcagctcattggtaccagacttcgattttgggcctactcttaactacgcggcgggacctcgaagcatgacgccaacgttcaatccaccagcaccacaacacacacattcaccagcgtctcgaggtcaatcccctgcgccaccgatgcaaaaaccggctgtatcacccgacgttacgcatgggagattggaaccggaagatagtactcgtaggagtgtaatatggcaacctgcgaccgcgatgccacgatcacccagtcccggaggtcctggcctgtcagcagaagagtttgtgcagcagagggctgccgcggctgctgcgacaccaatgtatgctgtccaccacagacagtcctcaagtgtcacgctttcggcttaccacacgggcacaccaacgcctcctcttggtcatggtcaaactgcagacttcatcggaatggcacactcgcgcaatagctcccaagacatgctgcaacggccggggtctcgcggggctggtgaacttctacaacgaccaaaatcgcgtgaactgttacaacggcccgggtctcgaggggcgggagcgacgttaggtggtcagaccatgcccaatgcgtcccatctctcggcgcgtgaacaagaacatgtggcgcgggttactggccaaccgctgatcagtatggcgggaaacaaaagcgcaccacaggtccagggcgccggactcgtgggtgcaattgaagcgcgcgagcgagagcgagaacaaatgaagcatggcgtcagcggacaagctgtgcagcatgttatcgaccagcgacagcaacagcagcagcagcagcaacagcagtttgcgtatcagcagcagtaccaacagccactaccgtctcccggtttaccaccaccttccgggatgtattctaatatggggcgcggcatgccacctccgtcgcccagtcggcaagggttcggaatgccgcgatatggtagtccgggtcctggctttgaaagagacgggcaatgggcaaataacagtggatttcggtcccctccaccggggcaattagatgcgcggtacttgccgcctcaggggcagccatcgccccagttctctggagggtcatacggagctcctggtggtggacagggccaaaatccatatccacatcacgggcaagcattttaggattctgaagagcatatccgaacgagttggcatcacgacaggcgagtcgattgatacaattgaatttggatctgtaccggaggagagcattgcatagcatcatttgatggaccagttctcactagacaaagtgtttgttttgttgcatggtgcgaaggagtttttcaagcattgtacatttgggcatgtttgcatagtaaaaaaggtcctcggcatttttcttgtcgcttgcggatacctcatgagcatggtaaatatcccaaaatatttaaactgcattgctccttattgattgtccaccaagtgaatcttctcgtgtatggtaacaacgattgagacgagatgctg

SEQ ID NO: 9690 - DNA, 774 bp, Muscodor strobelii
  misc_feature: SGI cDNA ID NO. 563041
  misc_feature: Encodes the peptide sequence at SEQ ID NO 9691
atggtagcgccgagcaacaacagaaggtccagggctgagcctctccgcatcctatgctttggcaattctctcacggctggctacccggcgggcaatccctacgctatcaagcttaccaagaagatcgagaaggaatgtcccggccgaaaagtcgagtttgatgttgaggggctgccaggagatcttgtgactacgggccagtttattgatcgtatgacgacgagatgggaagccgcacagaagccgtatgactggacgataatcttaggcgggactaatgatctcggatggggaaggacagcagagcagatcatcgagggtcttaagcgcacttgggacataccgttatcgagaggaggcaaagtcttgtccctcacggtccctgaaacgaaaggaaacttccggagtatcatcgaaaggaggaacgaggtaaatgacgcgatacgatcctacgaaaagacggggttcttccatttcgacctcttcaaagccgtgccatatcacggcatggagccgggagatcgaaccaagtactgggagccagacggtgtgcatctctcggcagcggggtacgaccggatgggggagaagataggcgaggcactggtgaggatcctgaagctggccgaggcagtcgacgacgatatcggtagtgtggcgatgaatgccaggcaacggaaagcgatcgaggacttgatcttcgaggaggagatgggcgaccccaagatgttaagtcagggttatatcgtagtcaggaggaaggatctggattag

SEQ ID NO: 9691 - protein, 257 aa, Muscodor strobelii
  misc_feature: SGI Peptide ID NO. 563041
  misc_feature (17)..(198): Pfam Id: PF00657 Pfam Desc: GDSL-like Lipase/Acylhydrolase
  misc_feature (174)..(198): Pfam Id: PF00657 Pfam Desc: GDSL-like Lipase/Acylhydrolase
  misc_feature (17)..(95): Pfam Id: PF00657 Pfam Desc: GDSL-like Lipase/Acylhydrolase
  misc_feature (15)..(257): NCBI GI: 164424307 Blast Desc: NCU10658 [Neurospora crassa OR74A] gi|157070460|gb|EDO65053.1| [Neurospora crassa OR74A]
  misc_feature (15)..(257): NCBI GI: 256734477 Blast Desc: NECHADRAFT_74781 [Nectria haematococca mpVI 77-13-4]
  misc_feature (15)..(257): NCBI GI: 116192567 Blast Desc: CHGG_06001 [Chaetomium globosum CBS 148.51] gi|88181914|gb|EAQ89382.1| CHGG_06001 [Chaetomium globosum CBS 148.51]
  misc_feature (15)..(257): NCBI GI: 46108172 Blast Desc: FG00968.1 [Gibberella zeae PH-1]
  misc_feature (14)..(207): NCBI GI: 156062636 Blast Desc: SS1G_01434 [Sclerotinia sclerotiorum 1980] gi|154696770|gb|EDN96508.1| SS1G_01434 [Sclerotinia sclerotiorum 1980]
  misc_feature (14)..(214): NCBI GI: 154308856 Blast Desc: BC1G_07956 [Botryotinia fuckeliana B05.10] gi|150852582|gb|EDN27774.1| BC1G_07956 [Botryotinia fuckeliana B05.10]
  misc_feature (13)..(257): NCBI GI: 171684669 Blast Desc: protein product [Podospora anserina] gi|170942295|emb|CAP67947.1| protein product [Podospora anserina]
  misc_feature (14)..(206): NCBI GI: 212544494 Blast Desc: conserved [Penicillium marneffei ATCC 18224] gi|210065370|gb|EEA19464.1| conserved [Penicillium marneffei ATCC 18224]
  misc_feature (12)..(207): NCBI GI: 121703876 Blast Desc: GDSL-like lipase/acylhydrolase, [Aspergillus clavatus NRRL 1] gi|119398346|gb|EAW08776.1| GDSL-like lipase/acylhydrolase, [Aspergillus clavatus NRRL 1]
  misc_feature (14)..(206): NCBI GI: 242812577 Blast Desc: conserved [Talaromyces stipitatus ATCC 10500] gi|218714325|gb|EED13748.1| conserved [Talaromyces stipitatus ATCC 10500]
MVAPSNNRRSRAEPLRILCFGNSLTAGYPAGNPYAIKLTKKIEKECPGRKVEFDVEGLPGDLVTTGQFIDRMTTRWEAAQKPYDWTIILGGTNDLGWGRTAEQIIEGLKRTWDIPLSRGGKVLSLTVPETKGNFRSIIERRNEVNDAIRSYEKTGFFHFDLFKAVPYHGMEPGDRTKYWEPDGVHLSAAGYDRMGEKIGEALVRILKLAEAVDDDIGSVAMNARQRKAIEDLIFEEEMGDPKMLSQGYIVVRRKDLD

SEQ ID NO: 9692 - DNA, 2168 bp, Muscodor strobelii
  misc_feature: SGI EST ID NO. CUFF.22991.1
  misc_feature: Variant of the nucleotide sequence at SEQ ID NO 9690
ctgagattcaagcccgccgttagtatgtcttgcgtactacctcgcaagactgggctgagactgttgtagagggggagcatcacacgacgcacgccctcgtcccgtcttcatcgtctgttaacgagtccagctccaggttttcattgttgcgttccatcattagccgcgacgacgacacatattccggctgccaaaaacattgctgacgctgcttctgttctggtgttctctattactggtttaataggttctgtctgcctgatgttctttcttgctagattctagagtgtactcccttactcacgtgcattattcatctgaatcaacaacgacctgtcagcacgaatatacgctgtagtcttgtcactcagttaccttggtcgcgaacagtaggattcttggactggcgcgatacattttcatttgcatcaaccccaaggcttaggcaatatctcttaaacgacggggttcccactcttcactctctagcttcacttctcgtaacggcaacgaatatcgtcagcgagcgacgcgggaaaattcggcatagattgcatatgtcattgcattatcgtcttacagcactttggaatcgaatatacaacaagatggtagcgccgagcaacaacagaaggtccagggctgagcctctccgcatcctatgctttggcaattctctcacggctggctacccggcgggcaatccctacgctatcaagcttaccaagaagatcgagaaggaatgtcccggccgaaaagtcgagtttgatgttgaggggctgccaggagatcttgtgactacgggccagtttattgatcgtatgacgacgagatgggaagccgcacagaagccgtatgactggacgataatcttaggcgggactaatgatctcggatggggaaggacagcagagcagatcatcgagggtcttaagcgcacttgggacataccgttatcgagaggaggcaaagtcttgtccctcacggtccctgaaacgaaaggaaacttccggagtatcatcgaaaggaggaacgaggtaaatgacgcgatacgatcctacgaaaagacggggttcttccatttcgacctcttcaaagccgtgccatatcacggcatggagccgggagatcgaaccaagtactgggagccagacggtgtgcatctctcggcagcggggtacgaccggatgggggagaagataggcgaggcactggtgaggatcctgaagctggccgaggcagtcgacgacgatatcggtagtgtggcgatgaatgccaggcaacggaaagcgatcgaggacttgatcttcgaggaggagatgggcgaccccaagatgttaagtcagggttatatcgtagtcaggaggaaggatctggattagttagatgagtagatcacgaacaccgaactagactctagaagtagagtaagatatggataggtttcttggtctatgtcttataagctcgaatcctcattgattgcctagttgtgggagagacatttcaggacttccgttgtctgtgtcaacatgtagtgataagatcaatcattatgatgtagcgcaggtaagagagtttttatatcgaaacactcgctatctcaagtagcaacgcaaagctcatggtgcccaccaacgccatccatgcaaaaatgccccgtcttcttcccctttgtcattatcattagtttttaagtgtcgattcggcttcacacggcggccaggttggcagcgacgaagtccggaaactccctctgcagggcgttggtgacattttctacttcctcagccagaccctgcacatttgcgtcccatcggcgcatctccctgcccaccgcaatctcggctcgtccactgcccttctcgcccgaggcctcgccgcgctcgaaccagatgacttgctcgatctggtcgatgcggcccaccagacggccctgctcgatcatcttggcggtcgtgtcttcggcgcgctgggcgtcgagaccaagcaggccggcgagggcgtcgaagccgatgttgctgaacaggcgggaggcgccgagcaggttgtgctcgaggacggccttggcgaggacggtggagccgtcggaggtggtggccttctggtgggaggacaggtcgtgggcgaacttgtcgacctcggcaggggtgatgaggcggtcgagg

SEQ ID NO: 9693 - DNA, 459 bp, Muscodor strobelii
  misc_feature: SGI cDNA ID NO. 563042
  misc_feature: Encodes the peptide sequence at SEQ ID NO 9694
ttcctcgaccgcctcatcacccctgccgaggtcgacaagttcgcccacgacctgtcctcccaccagaaggccaccacctccgacggctccaccgtcctcgccaaggccgtcctcgagcacaacctgctcggcgcctcccgcctgttcagcaacatcggcttcgacgccctcgccggcctgcttggtctcgacgcccagcgcgccgaagacacgaccgccaagatgatcgagcagggccgtctggtgggccgcatcgaccagatcgagcaagtcatctggttcgagcgcggcgaggcctcgggcgagaagggcagtggacgagccgagattgcggtgggcagggagatgcgccgatgggacgcaaatgtgcagggtctggctgaggaagtagaaaatgtcaccaacgccctgcagagggagtttccggacttcgtcgctgccaacctggccgccgtgtga

SEQ ID NO: 9694 - protein, 152 aa, Muscodor strobelii
  misc_feature: SGI Peptide ID NO. 563042
  misc_feature (1)..(96): Pfam Id: PF01399 Pfam Desc: PCI domain
  misc_feature (22)..(96): Pfam Id: PF01399 Pfam Desc: PCI domain
  misc_feature (1)..(149): NCBI GI: 46107480 Blast Desc: FG00623.1 [Gibberella zeae PH-1]
  misc_feature (1)..(149): NCBI GI: 39975035 Blast Desc: MGG_00336 [Magnaporthe grisea 70-15] gi|145018778|gb|EDK03057.1| MGG_00336 [Magnaporthe grisea 70-15]
  misc_feature (1)..(149): NCBI GI: 256735191 Blast Desc: [Nectria haematococca mpVI 77-13-4]
  misc_feature (1)..(149): NCBI GI: 154308858 Blast Desc: BC1G_07957 [Botryotinia fuckeliana B05.10] gi|150852583|gb|EDN27775.1| BC1G_07957 [Botryotinia fuckeliana B05.10]
  misc_feature (1)..(150): NCBI GI: 116192569 Blast Desc: CHGG_06002 [Chaetomium globosum CBS 148.51] gi|88181915|gb|EAQ89383.1| CHGG_06002 [Chaetomium globosum CBS 148.51]
  misc_feature (1)..(151): NCBI GI: 156062638 Blast Desc: SS1G_01435 [Sclerotinia sclerotiorum 1980] gi|154696771|gb|EDN96509.1| SS1G_01435 [Sclerotinia sclerotiorum 1980]
  misc_feature (1)..(149): NCBI GI: 169602627 Blast Desc: SNOG_04317 [Phaeosphaeria nodorum SN15] gi|160706215|gb|EAT88077.2| SNOG_04317 [Phaeosphaeria nodorum SN15]
  misc_feature (1)..(147): NCBI GI: 189203141 Blast Desc: COP9 signalosome complex subunit 4 [Pyrenophora tritici-repentis Pt-1C-BFP] gi|187985005|gb|EDU50493.1| COP9 signalosome complex subunit 4 [Pyrenophora tritici-repentis
  misc_feature (1)..(150): NCBI GI: 171684667 Blast Desc: protein product [Podospora anserina] gi|170942294|emb|CAP67946.1| protein product [Podospora anserina]
  misc_feature (1)..(147): NCBI GI: 85089839 Blast Desc: NCU07361 [Neurospora crassa OR74A] gi|74614642|sp|Q7S0P8.1|CSN4_NEUCR RecName: Full=COP9 signalosome complex subunit 4; Short=Signalosome subunit 4 NCU07361 crassa
FLDRLITPAEVDKFAHDLSSHQKATTSDGSTVLAKAVLEHNLLGASRLFSNIGFDALAGLLGLDAQRAEDTTAKMIEQGRLVGRIDQIEQVIWFERGEASGEKGSGRAEIAVGREMRRWDANVQGLAEEVENVTNALQREFPDFVAANLAAV

SEQ ID NO: 9695 - DNA, 627 bp, Muscodor strobelii
  misc_feature: SGI cDNA ID NO. 563043
  misc_feature: Encodes the peptide sequence at SEQ ID NO 9696
atgcttctagccatcatcactttagcttacgcccttgtgcaggctgctgtcattgatcgcctgcctcgcggctctactattcgagacacagtccccaatgcctccaacttgtcgatcatcacttggataatgcccattgtcaaaggcggcgaggaattcaccttcaccgggaccgtgcaagatgtcttcgctcaggtcaacattgagcgcgctaagcgtggtatcgcccttcttgccaatcctaacgatagccctaaaaagactgtctttggctctctcgaagaccgcgactacgacaaaacattatgttcggtcggtactcctaaccctgctgacaaggatgacatcaatgaaggaatcaactacctgaacagcctcgaggccaagtgcagaatgggacctggccctggaaattgtggtcgtatctcttgtagttggaactccgccatcttttggtgcaacgatgctgaccactatgttgagtacgaatgctccaactttgcccagtacgcggcgaaggttgttgagcactgcagcgttactggctttcctgggcgaatgcagacttggggccaggctttcgacacggagaaattcaacgtcccagtaggatatagtaaatgttga

SEQ ID NO: 9696 - protein, 208 aa, Muscodor strobelii
  misc_feature: SGI Peptide ID NO. 563043
  misc_feature (1)..(205): NCBI GI: 171680404 Blast Desc: protein product [Podospora anserina] gi|170939829|emb|CAP65054.1| protein product [Podospora anserina]
  misc_feature (16)..(208): NCBI GI: 256723698 Blast Desc: NECHADRAFT_86628 [Nectria haematococca mpVI 77-13-4]
  misc_feature (36)..(208): NCBI GI: 121717032 Blast Desc: conserved [Aspergillus clavatus NRRL 1] gi|119404141|gb|EAW14558.1| conserved [Aspergillus clavatus NRRL 1]
  misc_feature (40)..(207): NCBI GI: 171679114 Blast Desc: protein product [Podospora anserina] gi|170937628|emb|CAP62287.1| protein product [Podospora anserina]
  misc_feature (41)..(208): NCBI GI: 238497574 Blast Desc: conserved [Aspergillus flavus NRRL3357] gi|220693296|gb|EED49641.1| conserved [Aspergillus flavus NRRL3357]
  misc_feature (34)..(208): NCBI GI: 170940149 Blast Desc: protein product [Podospora anserina]
  misc_feature (8)..(208): NCBI GI: 238506391 Blast Desc: conserved [Aspergillus flavus NRRL3357] gi|220689110|gb|EED45461.1| conserved [Aspergillus flavus NRRL3357]
  misc_feature (43)..(180): NCBI GI: 171679719 Blast Desc: protein product [Podospora anserina] gi|170939485|emb|CAP64713.1| protein product [Podospora anserina]
  misc_feature (50)..(208): NCBI GI: 116207534 Blast Desc: [Chaetomium globosum CBS 148.51] gi|88183657|gb|EAQ91125.1| [Chaetomium globosum CBS 148.51]
  misc_feature (41)..(163): NCBI GI: 169768298 Blast Desc: [Aspergillus oryzae RIB40] gi|83766477|dbj|BAE56617.1| protein product [Aspergillus oryzae]
MLLAIITLAYALVQAAVIDRLPRGSTIRDTVPNASNLSIITWIMPIVKGGEEFTFTGTVQDVFAQVNIERAKRGIALLANPNDSPKKTVFGSLEDRDYDKTLCSVGTPNPADKDDINEGINYLNSLEAKCRMGPGPGNCGRISCSWNSAIFWCNDADHYVEYECSNFAQYAAKVVEHCSVTGFPGRMQTWGQAFDTEKFNVPVGYSKC

SEQ ID NO: 9697 - DNA, 1071 bp, Muscodor strobelii
  misc_feature: SGI cDNA ID NO. 563044
  misc_feature: Encodes the peptide sequence at SEQ ID NO 9698
atgtctccagcacgcagccttgcacctgcccttgttgccgttttactaccatttgttgctgctggaccttgtgacatctacggctcgaacggcacgccatgtgttgctgcacatagtaccacacgcgctttgttttccgacttcagctccgcgctgtaccaggttcaacgtgacgacggaactacacaggatatctctcccgtatcccctggcggtgttgccgatgccggggcacaggacactttctgcgccggcacaacgtgcctgatctctgctgtgagtattcacagaatgacattcttgtggtggctcatcttgcctcgatacgaacttgatatatacgatcaatccggcaatggcaacgatctgacaagcgctcccccgggtggagccgcacagggacctggtccgaacgggtttgatgcgttggccgatgcaaccgctgcgaaggtgacactcggtggttcgactgtttatggagtatccgtctcgccggggatcggttatcgtaacgacaagacaaccaatatcccgactggggacgctccacagggcatctacgccgtgttagacggcacggattacaacggcgcttgctgcttcgattatggtaacgccgagacgaccaacaacgatgacggcgatacaacaatgcaggcgctgtacttcggactcggtaccacgggtggcaaggggagcggtgacggaccatgggtcatggccgacctcgagaatggcgtcttctctggctcagaccctggcgttgtcgacagcaacccgaccgctaacactcgcttcgtcactggcattgttaagggaatgcctaactattgggagatcatggtcggcgattccacgactggtgacttgactaccggctacgctggtgtgaggcccgcggggtacgaggttatgcatcaagaaggtgccattatccttggcataggtggcgataacagcaatagcgcccagggcacattctacgagggcgtgatgacggctggcttcccttccgacgatgttgaccagatggttcaggctgatattgtgtctgctgggtactcagtataa

SEQ ID NO: 9698 - protein, 356 aa, Muscodor strobelii
  misc_feature: SGI Peptide ID NO. 563044
  misc_feature (23)..(356): Pfam Id: PF09206 Pfam Desc: Alpha-L-arabinofuranosidase B, catalytic
  misc_feature (113)..(356): Pfam Id: PF09206 Pfam Desc: Alpha-L-arabinofuranosidase B, catalytic
  misc_feature (23)..(93): Pfam Id: PF09206 Pfam Desc: Alpha-L-arabinofuranosidase B, catalytic
  misc_feature (1)..(355): NCBI GI: 154314102 Blast Desc: BC1G_04994 [Botryotinia fuckeliana B05.10] gi|150849140|gb|EDN24333.1| BC1G_04994 [Botryotinia fuckeliana B05.10]
  misc_feature (1)..(356): NCBI GI: 242765885 Blast Desc: fungal alpha-L-arabinofuranosidase, [Talaromyces stipitatus ATCC 10500] gi|218724260|gb|EED23677.1| fungal alpha-L-arabinofuranosidase, [Talaromyces stipitatus ATCC 10500]
  misc_feature (1)..(356): NCBI GI: 3023257 Blast Desc: ABF1_TRIRE RecName: Full=Alpha-N-arabinofuranosidase; Short=Arabinosidase; Flags: Precursor gi|1580814|emb|CAA93243.1| alpha-L-arabinofuranosidase [Hypocrea jecorina]
  misc_feature (21)..(356): NCBI GI: 212538783 Blast Desc: alpha-N-arabinofuranosidase precursor, [Penicillium marneffei ATCC 18224] gi|210069289|gb|EEA23380.1| alpha-N-arabinofuranosidase precursor, [Penicillium marneffei
  misc_feature (1)..(356): NCBI GI: 212528630 Blast Desc: fungal alpha-L-arabinofuranosidase, [Penicillium marneffei ATCC 18224] gi|210073870|gb|EEA27957.1| fungal alpha-L-arabinofuranosidase, [Penicillium marneffei ATCC 18224]
  misc_feature (1)..(356): NCBI GI: 1351443 Blast Desc: XYL1_TRIKO RecName: Full=Arabinofuranosidase/B-xylosidase; Includes: RecName: Full=Alpha-N-arabinofuranosidase; Short=Arabinosidase; Includes:
  misc_feature (12)..(356): NCBI GI: 60416980 Blast Desc: alpha-L-arabinofuranosidase B [Fusarium oxysporum f. sp. dianthi]
  misc_feature (18)..(356): NCBI GI: 115401944 Blast Desc: alpha-N-arabinofuranosidase precursor [Aspergillus terreus NIH2624] gi|114190501|gb|EAU32201.1| alpha-N-arabinofuranosidase precursor [Aspergillus terreus
  misc_feature (12)..(356): NCBI GI: 209954737 Blast Desc: alfa-L-arabinofuranosidase [Fusarium oxysporum]
  misc_feature (1)..(356): NCBI GI: 238490130 Blast Desc: fungal alpha-L-arabinofuranosidase, [Aspergillus flavus NRRL3357] gi|220696715|gb|EED53056.1| fungal alpha-L-arabinofuranosidase, [Aspergillus flavus NRRL3357]
  misc_feature (24)..(356): SWISSPROT Homolog: EC 3.2.1.55 Alpha-N-arabinofuranosidase
MSPARSLAPALVAVLLPFVAAGPCDIYGSNGTPCVAAHSTTRALFSDFSSALYQVQRDDGTTQDISPVSPGGVADAGAQDTFCAGTTCLISAVSIHRMTFLWWLILPRYELDIYDQSGNGNDLTSAPPGGAAQGPGPNGFDALADATAAKVTLGGSTVYGVSVSPGIGYRNDKTTNIPTGDAPQGIYAVLDGTDYNGACCFDYGNAETTNNDDGDTTMQALYFGLGTTGGKGSGDGPWVMADLENGVFSGSDPGVVDSNPTANTRFVTGIVKGMPNYWEIMVGDSTTGDLTTGYAGVRPAGYEVMHQEGAIILGIGGDNSNSAQGTFYEGVMTAGFPSDDVDQMVQADIVSAGYSV

SEQ ID NO: 9699 - DNA, 975 bp, Muscodor strobelii
  misc_feature: SGI EST ID NO. CUFF.22950.0
  misc_feature: Variant of the nucleotide sequence at SEQ ID NO 9697
atcatattgacgtgtatattatatctgtagatatacgatcaatccggcaatggcaacgatctgacaagcgctcccccgggtggagccgcacagggacctggtccgaacgggtttgatgcgttggccgatgcaaccgctgcgaaggtgacactcggtggttcgactgtttatggagtatccgtctcgccggggatcggttatcgtaacgacaagacaaccaatatcccgactggggacgctccacagggcatctacgccgtgttagacggcacggattacaacggcgcttgctgcttcgattatggtaacgccgagacgaccaacaacgatgacggcgatacaacaatgcaggcgctgtacttcggactcggtaccacgggtggcaaggggagcggtgacggaccatgggtcatggccgacctcgagaatggcgtcttctctggctcagaccctggcgttgtcgacagcaacccgaccgctaacactcgcttcgtcactggcattgttaagggaatgcctaactattgggagatcatggtcggcgattccacgactggtgacttgactaccggctacgctggtgtgaggcccgcggggtacgaggttatgcatcaagaaggtgccattatccttggcataggtggcgataacagcaatagcgcccagggcacattctacgagggcgtgatgacggctggcttcccttccgacgatgttgaccagatggttcaggctgatattgtgtctgctgggtactcagtataatagtatatgggcagttaggcgcatgcaacgatgatattggcatcatacgaactatgacctacttatgtcgaacgattataagatagtagaaattcccaacccatgattggtctccagtgccttcacagctacttcaaaaatcttcgaataccttcatagttagaaatgacctagtgctggtcatatcatagtccagtatgtgaagctgaa

SEQ ID NO: 9700 - DNA, 666 bp, Muscodor strobelii
  misc_feature: SGI cDNA ID NO. 563045
  misc_feature: Encodes the peptide sequence at SEQ ID NO 9701
atgcttcgcgagctcgtgcttcgcgatttttatgcgaggtctatcatgagtgcgctgatcctcgtcggcagtggcggcggtgatggattcttggacatctgggccgtgcttcgcgacctcggtggtgggctgctcctcgggagacttggtggtggtagtctcctggccattgagggcttggctcggaacggcatcgaccgtgtgctcgacgcgagttatgttcacaatgatgtcgccacgaactgcggtgttgtaatacctggtatctgtaatcgccgttttaggtggccattacagctcagtattgtgatcaagtggctttacactccaacccccaagatcccgacattcaccaagctttttgtcgtgattaaagagttgctctcggtcgagcaggatacggacgagtttcataccatatccgaaactttcttggaagccgtagccgaggcctacgaaactaagctccctgacaagccagagaattccgacagaccacagaattcgatggcttcttgcgttgcgctctgcaaaattttccatctcgtcttcttagagatagatgataatcccgatagcggttcaagtcgtcccgatcctcaggatttagagatggccaacagagccatgatacttggcaagcttgttacccatggattcggctag

SEQ ID NO: 9701 - protein, 221 aa, Muscodor strobelii
  misc_feature: SGI Peptide ID NO. 563045
MLRELVLRDFYARSIMSALILVGSGGGDGFLDIWAVLRDLGGGLLLGRLGGGSLLAIEGLARNGIDRVLDASYVHNDVATNCGVVIPGICNRRFRWPLQLSIVIKWLYTPTPKIPTFTKLFVVIKELLSVEQDTDEFHTISETFLEAVAEAYETKLPDKPENSDRPQNSMASCVALCKIFHLVFLEIDDNPDSGSSRPDPQDLEMANRAMILGKLVTHGFG

SEQ ID NO: 9702 - DNA, 1314 bp, Muscodor strobelii
  misc_feature: SGI cDNA ID NO. 563046
  misc_feature: Reduced expression when VOC is produced
  misc_feature: Encodes the peptide sequence at SEQ ID NO 9703
atggcgacaagacgggagtcgaccttgggatctgaagacacgacccatgacgatgactcgagaaggcggccttcggtgtcgcttacagtcagcgacgtcatgatgctctcccgccgagattcggtcaactcggtcaggaccataggcatctggaatgtcgcgatcgcgcgcaggacgcttgggatctgtctattgctcgtcactgtttttctctggactgcatcgaatttcctagcaagctctatatttgccgacaatacctacgataagcccttcttcctcgtatacatcaacacatccgtcttcgccctatctctcgttccgatcggcattggacacataatcaagagcggtgggatgagacaggcaaagagtcaagcaatacaagcttggaaggagtatcggaatggagggagccggattaagagtcaagccgagagcgagtattccgttctcgaagagaggctcctgaacaatgacgaggacctagacgagagtcttgatctaccactccccgaacagaagctctcttttttcgagacggcccgcctcagcctcgaattcgctatgatatggttttggggaaactactttgcgtccgcgtgcctggagtacacgagcgtaggcagcgtgactatattgacgtcaacgagcagcgtctggacgcttattttctgcgccaccatgcgcatcgatccattttctgtcaggaaactgattggtgtgcttgcgtcactggcaggtgttatactcatatccctggtggatttatctggtagtggaaatgacgaaggcagaggagatttcccacataagagccaggcacaaattgcgattggagatgcgatggcgttcttcagcgcggtcatttatggcgtttacgtggtcgtcatgaagatgagggttggtaatgaggatagggttaatatgccgctgttctttggtctggtgggagtgtttaatattgcgctactctggccacttttccctttgctgcattatactgggatagaaccttttgagttcccgcccactgggcagatctggggcatcatatttttcaactccatgttctccttcatatccgacatgtcatgggcatacgccatgctcctcaccacaccactagtcgtcacagtcggcttgtcgctgaccatcccgctgtctttgatcggggaaatgatccagtataatcagtactcgagcttcgtatactggatcggtgccctggtcgttgtcgtttcattcttatttatcaatcatgagagccacgatgaggaacacgttaagactgtgaacgatggcgaaatttga

SEQ ID NO: 9703 - protein, 437 aa, Muscodor strobelii
  misc_feature: SGI Peptide ID NO. 563046
  misc_feature (203)..(254): Pfam Id: PF00892 Pfam Desc: Integral membrane protein DUF6
  misc_feature (22)..(426): NCBI GI: 116206516 Blast Desc: CHGG_02551 [Chaetomium globosum CBS 148.51] gi|88183148|gb|EAQ90616.1| CHGG_02551 [Chaetomium globosum CBS 148.51]
  misc_feature (54)..(431): NCBI GI: 171692349 Blast Desc: protein product [Podospora anserina] gi|170946123|emb|CAP72924.1| protein product [Podospora anserina]
  misc_feature (3)..(427): NCBI GI: 261355673 Blast Desc: thiamine-repressible mitochondrial transport protein THI74 [Verticillium albo-atrum VaMs.102]
  misc_feature (55)..(426): NCBI GI: 256731056 Blast Desc: NECHADRAFT_5290 [Nectria haematococca mpVI 77-13-4]
  misc_feature (51)..(426): NCBI GI: 12718295 Blast Desc: conserved [Neurospora crassa]
  misc_feature (16)..(430): NCBI GI: 145612179 Blast Desc: MGG_08143 [Magnaporthe grisea 70-15] gi|145019395|gb|EDK03623.1| MGG_08143 [Magnaporthe grisea 70-15]
  misc_feature (22)..(427): NCBI GI: 156058236 Blast Desc: SS1G_03129 [Sclerotinia sclerotiorum 1980] gi|154700917|gb|EDO00656.1| SS1G_03129 [Sclerotinia sclerotiorum 1980]
  misc_feature (56)..(426): NCBI GI: 121713786 Blast Desc: conserved [Aspergillus clavatus NRRL 1] gi|119402657|gb|EAW13078.1| conserved [Aspergillus clavatus NRRL 1]
  misc_feature (77)..(427): NCBI GI: 154309396 Blast Desc: BC1G_07592 [Botryotinia fuckeliana B05.10] gi|150852416|gb|EDN27608.1| BC1G_07592 [Botryotinia fuckeliana B05.10]
  misc_feature (51)..(426): NCBI GI: 164426834 Blast Desc: NCU03710 [Neurospora crassa OR74A] gi|157071495|gb|EAA32250.2| [Neurospora crassa OR74A]
  misc_feature: Useful for introducing or modulating the production of volatile compounds
MATRRESTLGSEDTTHDDDSRRRPSVSLTVSDVMMLSRRDSVNSVRTIGIWNVAIARRTLGICLLLVTVFLWTASNFLASSIFADNTYDKPFFLVYINTSVFALSLVPIGIGHIIKSGGMRQAKSQAIQAWKEYRNGGSRIKSQAESEYSVLEERLLNNDEDLDESLDLPLPEQKLSFFETARLSLEFAMIWFWGNYFASACLEYTSVGSVTILTSTSSVWTLIFCATMRIDPFSVRKLIGVLASLAGVILISLVDLSGSGNDEGRGDFPHKSQAQIAIGDAMAFFSAVIYGVYVVVMKMRVGNEDRVNMPLFFGLVGVFNIALLWPLFPLLHYTGIEPFEFPPTGQIWGIIFFNSMFSFISDMSWAYAMLLTTPLVVTVGLSLTIPLSLIGEMIQYNQYSSFVYWIGALVVVVSFLFINHESHDEEHVKTVNDGEI

SEQ ID NO: 9704 - DNA, 3185 bp, Muscodor strobelii
  misc_feature: SGI EST ID NO. CUFF.23062.0
  misc_feature: Variant of the nucleotide sequence at SEQ ID NO 9702
ggaatgtgcctggcgccaagctggcgcccgcattcttcaaaagacaggtgacttgcgtgccgtctcgccgcaaaggtgggtgggatgactgcgggcaagggtcttttggtgtcactttagtgccgataggtgtcttgtttcgctgtccgacacgaagcatcatgtgtttcaagcattgtcgaatcctgccgttgcactctgtcagcttgccagcagaaagctagacatgtcgcccttttcctttcttcctcaacaacgatagtgcgaaccacagcatttgcgacaaccacgcaacatctgaatcgacgtctctttgtttgcgcgtcaatgagtccaccttccgatgccgccgtagccgccatcccgcgatcgtctatacaccccacgtgagcctccacgctcggtagaccgttgaaatggcgacaagacgggagtcgaccttgggatctgaagacacgacccatgacgatgactcgagaaggcggccttcggtgtcgcttacagtcagcgacgtcatgatgctctcccgccgagattcggtcaactcggtcaggaccataggcatctggaatgtcgcgatcgcgcgcaggacgcttgggatctgtctattgctcgtcactgtttttctctggactgcatcgaatttcctagcaagctctatatttgccgacaatacctacgataagcccttcttcctcgtatacatcaacacatccgtcttcgccctatctctcgttccgatcggcattggacacataatcaagagcggtgggatgagacaggcaaagagtcaagcaatacaagcttggaaggagtatcggaatggagggagccggattaagagtcaagccgagagcgagtattccgttctcgaagagaggctcctgaacaatgacgaggacctagacgagagtcttgatctaccactccccgaacagaagctctcttttttcgagacggcccgcctcagcctcgaattcgctatgatatggttttggggaaactactttgcgtccgcgtgcctggagtacacgagcgtaggcagcgtgactatattgacgtcaacgagcagcgtctggacgcttattttctgcgccaccatgcgcatcgatccattttctgtcaggaaactgattggtgtgcttgcgtcactggcaggtgttatactcatatccctggtggatttatctggtagtggaaatgacgaaggcagaggagatttcccacataagagccaggcacaaattgcgattggagatgcgatggcgttcttcagcgcggtcatttatggcgtttacgtggtcgtcatgaagatgagggttggtaatgaggatagggttaatatgccgctgttctttggtctggtgggagtgtttaatattgcgctactctggccacttttccctttgctgcattatactgggatagaaccttttgagttcccgcccactgggcagatctggggcatcatatttgtaaggccgcaccaaaagcgtgaaggggtaccgcgactaacattgaggcaacagttcaactccatgttctccttcatatccgacatgtcatgggcatacgccatgctcctcaccacaccactagtcgtcacagtcggcttgtcgctgaccatcccgctgtctttgatcggggaaatgatccagtataatcagtactcgagcttcgtatactggatcggtgccctggtcgttgtcgtttcattcttatttatcaatcatgagagccacgatgaggaacacgttaagactgtgaacgatggcgaaatttgagaatatggtaagctggcgttttggaagaggttggaagtttagtaaggcgcatgttcaggacaggttctcgcattgaattttggagatacactacaactagatcttaagacgacggaaccatacttttcgaacatctctagagaacaatggatagaaaagcatcgtttcgaatatcaacatcccaaagaagctgtctaataatcttgggcatatcaatgatacgatctcagctattatgtattgacattgagaatacggtgcgaagctgcactaagggatgatgacagcgtctcggcgaatgagcgttttccccgctgacggttcaccgcatacggttgcccccgattataaatcacagtgcatgcattgtgcatgctcaatagcctataccagtctcgccaatcttgccagcatataagacatctaaaaacacacgacgtttacagtccaggaggaaaagacagagcatatactatccagcaactcctcactcatctccagacattcactcgctcacttacttgccatttactgacatcataaatgtgtcacagtttcctaatgacggcaacctcaacctcaacggtgcctctcaaatcggccggaggccctctattccgcagacccgatctctcacacgagcaattttgcgaggcatggcatagacatgcgaagattgtcacgccgtggtgtctgaagtttggggtttgggagtatgtccagatacatatgccctctgacacctcctctgtctctacctctcaggggcaaaatgaggaaatcatgaaggagattgggattgagggcgaggagctagagaaagcgaggaagatattaagacaagcggatggcgtggctattatgcgacggcatcaagttcctacggaaggtgggaataggtatttcatggagaaggttctcgtggatgaaaggacgtttttacacaatgagtcgggtgccgggggggttgttggggagaagcctgtttttgatgttccggtgttggaggttgatgtttggaggagggtggcgctggagattgttcatctcttaattgtgtctcttggggagttaatcctggagacgtgtgatagaaggacagtgagctattttctaatcgtcaatttagtgggcggcattgaatatgtcaagatcagggatgggaaggatgttgttggtgatggtgttgtggttaaatctgatgagtgggaggcgtgatttttgtagggaccagagctctctgtagcatcaagccccaatatttagcgctgggagattcttctcgggctcattgttggatatcggctagaatttccatcgtgaaggtggcatccatgatgtgttcaaatttatgaccatgataacaccaatgtattattctcttattccgctgcaacctgg

SEQ ID NO: 9705 - DNA, 1212 bp, Muscodor strobelii
  misc_feature: SGI cDNA ID NO. 563047
  misc_feature: Encodes the peptide sequence at SEQ ID NO 9706
atgctctcccgccgagattcggtcaactcggtcaggaccataggcatctggaatgtcgcgatcgcgcgcaggacgcttgggatctgtctattgctcgtcactgtttttctctggactgcatcgaatttcctagcaagctctatatttgccgacaatacctacgataagcccttcttcctcgtatacatcaacacatccgtcttcgccctatctctcgttccgatcggcattggacacataatcaagagcggtgggatgagacaggcaaagagtcaagcaatacaagcttggaaggagtatcggaatggagggagccggattaagagtcaagccgagagcgagtattccgttctcgaagagaggctcctgaacaatgacgaggacctagacgagagtcttgatctaccactccccgaacagaagctctcttttttcgagacggcccgcctcagcctcgaattcgctatgatatggttttggggaaactactttgcgtccgcgtgcctggagtacacgagcgtaggcagcgtgactatattgacgtcaacgagcagcgtctggacgcttattttctgcgccaccatgcgcatcgatccattttctgtcaggaaactgattggtgtgcttgcgtcactggcaggtgttatactcatatccctggtggatttatctggtagtggaaatgacgaaggcagaggagatttcccacataagagccaggcacaaattgcgattggagatgcgatggcgttcttcagcgcggtcatttatggcgtttacgtggtcgtcatgaagatgagggttggtaatgaggatagggttaatatgccgctgttctttggtctggtgggagtgtttaatattgcgctactctggccacttttccctttgctgcattatactgggatagaaccttttgagttcccgcccactgggcagatctggggcatcatatttttcaactccatgttctccttcatatccgacatgtcatgggcatacgccatgctcctcaccacaccactagtcgtcacagtcggcttgtcgctgaccatcccgctgtctttgatcggggaaatgatccagtataatcagtactcgagcttcgtatactggatcggtgccctggtcgttgtcgtttcattcttatttatcaatcatgagagccacgatgaggaacacgttaagactgtgaacgatggcgaaatttga

SEQ ID NO: 9706 - protein, 403 aa, Muscodor strobelii
  misc_feature: SGI Peptide ID NO. 563047
  misc_feature (169)..(220): Pfam Id: PF00892 Pfam Desc: Integral membrane protein DUF6
  misc_feature (3)..(392): NCBI GI: 116206516 Blast Desc: CHGG_02551 [Chaetomium globosum CBS 148.51] gi|88183148|gb|EAQ90616.1| CHGG_02551 [Chaetomium globosum CBS 148.51]
  misc_feature (20)..(397): NCBI GI: 171692349 Blast Desc: protein product [Podospora anserina] gi|170946123|emb|CAP72924.1| protein product [Podospora anserina]
  misc_feature (20)..(393): NCBI GI: 261355673 Blast Desc: thiamine-repressible mitochondrial transport protein THI74 [Verticillium albo-atrum VaMs.102]
  misc_feature (21)..(392): NCBI GI: 256731056 Blast Desc: NECHADRAFT_5290 [Nectria haematococca mpVI 77-13-4]
  misc_feature (17)..(392): NCBI GI: 12718295 Blast Desc: conserved [Neurospora crassa]
  misc_feature (5)..(402): NCBI GI: 145612179 Blast Desc: MGG_08143 [Magnaporthe grisea 70-15] gi|145019395|gb|EDK03623.1| MGG_08143 [Magnaporthe grisea 70-15]
  misc_feature (14)..(393): NCBI GI: 156058236 Blast Desc: SS1G_03129 [Sclerotinia sclerotiorum 1980] gi|154700917|gb|EDO00656.1| SS1G_03129 [Sclerotinia sclerotiorum 1980]
  misc_feature (22)..(392): NCBI GI: 121713786 Blast Desc: conserved [Aspergillus clavatus NRRL 1] gi|119402657|gb|EAW13078.1| conserved [Aspergillus clavatus NRRL 1]
  misc_feature (43)..(393): NCBI GI: 154309396 Blast Desc: BC1G_07592 [Botryotinia fuckeliana B05.10] gi|150852416|gb|EDN27608.1| BC1G_07592 [Botryotinia fuckeliana B05.10]
  misc_feature (17)..(392): NCBI GI: 164426834 Blast Desc: NCU03710 [Neurospora crassa OR74A] gi|157071495|gb|EAA32250.2| [Neurospora crassa OR74A]
MLSRRDSVNSVRTIGIWNVAIARRTLGICLLLVTVFLWTASNFLASSIFADNTYDKPFFLVYINTSVFALSLVPIGIGHIIKSGGMRQAKSQAIQAWKEYRNGGSRIKSQAESEYSVLEERLLNNDEDLDESLDLPLPEQKLSFFETARLSLEFAMIWFWGNYFASACLEYTSVGSVTILTSTSSVWTLIFCATMRIDPFSVRKLIGVLASLAGVILISLVDLSGSGNDEGRGDFPHKSQAQIAIGDAMAFFSAVIYGVYVVVMKMRVGNEDRVNMPLFFGLVGVFNIALLWPLFPLLHYTGIEPFEFPPTGQIWGIIFFNSMFSFISDMSWAYAMLLTTPLVVTVGLSLTIPLSLIGEMIQYNQYSSFVYWIGALVVVVSFLFINHESHDEEHVKTVNDGEI

SEQ ID NO: 9707 - DNA, 3185 bp, Muscodor strobelii; identical to SEQ ID NO: 9704
  misc_feature: SGI EST ID NO. CUFF.23062.0
  misc_feature: Variant of the nucleotide sequence at SEQ ID NO 9705

SEQ ID NO: 9708 - DNA, 567 bp, Muscodor strobelii
  misc_feature: SGI cDNA ID NO. 563048
  misc_feature: Encodes the peptide sequence at SEQ ID NO 9709
atgacggcaacctcaacctcaacggtgcctctcaaatcggccggaggccctctattccgcagacccgatctctcacacgagcaattttgcgaggcatggcatagacatgcgaagattgtcacgccgtggtgtctgaagtttggggtttgggagtatgtccagatacatatgccctctgacacctcctctgtctctacctctcaggggcaaaatgaggaaatcatgaaggagattgggattgagggcgaggagctagagaaagcgaggaagatattaagacaagcggatggcgtggctattatgcgacggcatcaagttcctacggaaggtgggaataggtatttcatggagaaggttctcgtggatgaaaggacgtttttacacaatgagtcgggtgccgggggggttgttggggagaagcctgtttttgatgttccggtgttggaggttgatgtttggaggagggtggcgctggagatgggcggcattgaatatgtcaagatcagggatgggaaggatgttgttggtgatggtgttgtggttaaatctgatgagtgggaggcgtga

SEQ ID NO: 9709 - protein, 188 aa, Muscodor strobelii
  misc_feature: SGI Peptide ID NO. 563048
MTATSTSTVPLKSAGGPLFRRPDLSHEQFCEAWHRHAKIVTPWCLKFGVWEYVQIHMPSDTSSVSTSQGQNEEIMKEIGIEGEELEKARKILRQADGVAIMRRHQVPTEGGNRYFMEKVLVDERTFLHNESGAGGVVGEKPVFDVPVLEVDVWRRVALEMGGIEYVKIRDGKDVVGDGVVVKSDEWEA

SEQ ID NO: 9710 - DNA, 3185 bp, Muscodor strobelii; identical to SEQ ID NO: 9704
  misc_feature: SGI EST ID NO. CUFF.23062.0
  misc_feature: Variant of the nucleotide sequence at SEQ ID NO 9708

SEQ ID NO: 9711 - DNA, 1101 bp, Muscodor strobelii
  misc_feature: SGI cDNA ID NO. 563049
  misc_feature: Reduced expression when VOC is produced
  misc_feature: Encodes the peptide sequence at SEQ ID NO 9712
atgcctcgcactctaggagacaccatcaatgcggcaacccgccctgtccatactaagctcaacaagcttattatggctcggctccctctagctttgccaccgcacgcaaaggacccatttcaatatgtatcgggtcttctacatattgcaactatatacacttgcttcgaggccgtgtggcgcgagtttatagattgtcctaaagctcgcgatggcatagatatgggtcgccaacccaataaacacactgtcgcagcttgcgatgttccgacaccccaacttatttactcaatagttcgttcagatacctggccctcggatgtcagaccggaattcttagacaatacaatagaggaagaccatagccgtgtacagtctatacttacaggcttacacttcaaggacctagaacgttcccaaacactgcagaaggaccttttaactttgacgcactggtcattaccgacgcttgaagaccagcttgctcgtactgcagaatcgcctgtcctcgaaaaatttctaggtcatattgtaaattctacccagagttctccacacgttctcattgcatacgcatgggtcctctacatggctctattctctgggggacgatttattcgagcggcgctcgaggatactagcccggacttctggaaaatgacaacatcccatcggacattacatcatgtcttaccttcatgcctgctcggcccggatccgtgcaccgctcctcgaccgtttaatttctaccgcttcaacgcgaagacgacggacggggaagacctcaagcaagccttcaaaagttgccttgccgaggccgaaaagttcttcaccgaatctgagcgtgaagacatcgttcaggaagccgttaaaatttttgagtttatgatacaaatcgtctcggagctggacaatgtctgtggtaccgacatagatgctgccagaccaggattactcagccttcgtagcagggacagcgtcgttgttgaaaaagagcgtagactgaattttgtcgaggcagtgaaaagggccgctgagaaaacagatcccgaggttaatgtaacggatctgggagaggggcatgtcaagtttaagtcatag

SEQ ID NO: 9712 - protein, 366 aa, Muscodor strobelii
  misc_feature: SGI Peptide ID NO. 563049
  misc_feature (3)..(327): NCBI GI: 261355672 Blast Desc: conserved [Verticillium albo-atrum VaMs.102]
  misc_feature (3)..(333): NCBI GI: 256731057 Blast Desc: NECHADRAFT_49409 [Nectria haematococca mpVI 77-13-4]
  misc_feature (5)..(342): NCBI GI: 85103282 Blast Desc: NCU03709 [Neurospora crassa OR74A] gi|12718296|emb|CAC28858.1| [Neurospora crassa] gi|28923031|gb|EAA32249.1| [Neurospora crassa OR74A]
  misc_feature (3)..(333): NCBI GI: 46123535 Blast Desc: FG06145.1 [Gibberella zeae PH-1]
  misc_feature (3)..(318): NCBI GI: 145612177 Blast Desc: MGG_08142 [Magnaporthe grisea 70-15] gi|145019394|gb|EDK03622.1| MGG_08142 [Magnaporthe grisea 70-15]
  misc_feature (5)..(306): NCBI GI: 171692351 Blast Desc: protein product [Podospora anserina] gi|170946124|emb|CAP72925.1| protein product [Podospora anserina]
  misc_feature (4)..(309): NCBI GI: 154309406 Blast Desc: BC1G_07597 [Botryotinia fuckeliana B05.10] gi|150852421|gb|EDN27613.1| BC1G_07597 [Botryotinia fuckeliana B05.10]
  misc_feature (1)..(315): NCBI GI: 189207483 Blast Desc: conserved [Pyrenophora tritici-repentis Pt-1C-BFP] gi|187976168|gb|EDU42794.1| conserved [Pyrenophora tritici-repentis Pt-1C-BFP]
  misc_feature (4)..(309): NCBI GI: 156058248 Blast Desc: SS1G_03135 [Sclerotinia sclerotiorum 1980] gi|154700923|gb|EDO00662.1| SS1G_03135 [Sclerotinia sclerotiorum 1980]
  misc_feature (2)..(309): NCBI GI: 169614476 Blast Desc: SNOG_10381 [Phaeosphaeria nodorum SN15] gi|160702748|gb|EAT81775.2| SNOG_10381 [Phaeosphaeria nodorum SN15]
  misc_feature: Useful for introducing or modulating the production of volatile compounds
MPRTLGDTINAATRPVHTKLNKLIMARLPLALPPHAKDPFQYVSGLLHIATIYTCFEAVWREFIDCPKARDGIDMGRQPNKHTVAACDVPTPQLIYSIVRSDTWPSDVRPEFLDNTIEEDHSRVQSILTGLHFKDLERSQTLQKDLLTLTHWSLPTLEDQLARTAESPVLEKFLGHIVNSTQSSPHVLIAYAWVLYMALFSGGRFIRAALEDTSPDFWKMTTSHRTLHHVLPSCLLGPDPCTAPRPFNFYRFNAKTTDGEDLKQAFKSCLAEAEKFFTESEREDIVQEAVKIFEFMIQIVSELDNVCGTDIDAARPGLLSLRSRDSVVVEKERRLNFVEAVKRAAEKTDPEVNVTDLGEGHVKFKS

SEQ ID NO: 9713 - DNA, 3436 bp, Muscodor strobelii
  misc_feature: SGI EST ID NO. CUFF.23015.0
  misc_feature: Variant of the nucleotide sequence at SEQ ID NO 9711
gcgtatccccgatctccggaacgatctgtgcaatgacgtacactaatcccagaaggtccagggatcgacacaagcaacaacttcaccaattttaaatcatgggaatcttggaatggcatgtgcaaagtgggcaagactggggcgcgttcctggggaggggaaagttgaaaaagcaactgggcattttagcttgtcgacttcttctattgcaccggtctatcgaatgttgggcagctttatgcgctttgcgatctcctacccactatttcgttccttgtaagagagttcgaccgccacactccacttccagagcgtcgggtgaaacggcttcaactttgcttcgagagtgtctctttttggacgtattgagctacgacaaaaagtataggggtctcaccgtatgcaaggcattgtcacgaatttgaagatcattcaacatcagcttgaggatcttcaaagaaaatcagctaagccttcgacctggtagaagaagattttcgcggctgagtcatttgacctgggttattccagatgacactgtcattccactttcacatggtgtaattttgtgtctcgtcaataattcgactccaggttggcaaaatcttatagacagatttgtccttctattcaagaacgcaaaggctatcgggcctcgtaatacgttcgcctcctggtgctacggctgcgcgtgaagaggagcctagtttctgtcaagctgactctagcgtactatcatcctataaggctcttcgccgttttattttggcgcacccgcgagcaggcagtcactaccgtattagatgaccacgagtattcttaccacaagatctcatctatcgggaaggagaaacaccttgtgaccgacacatgttgtgactggccaagactgacacaagtcaatcccgagtttggttgaggattcaaaaaggaagatagcccgacccgccaaccaagcctattctcagttgcaactgcacgacctccctgtcattcatttgcccatataacaaacacgacatagagactcgggccacatcagtcattcaaattggcaactatcatttctatatctctagtagattggtcatacttcctaaaactcagcatgccctctaagactgtcaacatgcctcgcactctaggagacaccatcaatgcggcaacccgccctgtccatactaagctcaacaagcttattatggctcggctccctctagctttgccaccgcacgcaaaggacccatttcaatatgtatcgggtcttctacatattgcaactatatacacttgcttcgaggccgtgtggcgcgagtttatagattgtcctaaagctcgcgatggcatagatatgggtcgccaacccaataaacacactgtcgcagcttgcgatgttccgacaccccaacttatttactcaatagttcgttcagatacctggccctcggatgtcagaccggaattcttagacaatacaatagaggaagaccatagccgtgtacagtctatacttacaggcttacacttcaaggacctagaacgttcccaaacactgcagaaggaccttttaactttgacgcactggtcattaccgacgcttgaagaccagcttgctcgtactgcagaatcgcctgtcctcgaaaaatttctaggtcatattgtaaattctacccagagttctccacacgttctcattgcatacgcatgggtcctctacatggctctattctctgggggacgatttattcgagcggcgctcgaggatactagcccggacttctggaaaatgacaacatcccatcggacattacatcatgtcttaccttcatgcctgctcggcccggatccgtgcaccgctcctcgaccgtttaatttctaccgcttcaacgcgaagacgacggacggggaagacctcaagcaagccttcaaaagttgccttgccgaggccgaaaagttcttcaccgaatctgagcgtgaagacatcgttcaggaagccgttaaaatttttgagtttatgatacaaatcgtctcggagctggacaatgtctgtggtaccgacatagatgctgccagaccaggattactcagccttcgtagcagggacagcgtcgttgttgaaaaagagcgtagactgaattttgtcgaggcagtgaaaagggccgctgagaaaacagatcccgaggttaatgtaacggatctgggagaggggcatgtcaagtttaagtcatagggattttcgccagaattgagcaaccgatgcatgggtgaggcgcaagtctgttctggaggttctgctaatacctaaggttaacatgatatcaatacgatgctattcacaagattgcatctgcattaaatcacttcttaatgtcacttcgctttggtgagtccgactacttcgaatgtgtctctagggctctcctcaatgctttaatcgcctcttccctgacactggcgagaatctcgcccgcaggcttgaaatcattgacgagaccaacaccggtcccagcccaaaccgctgctcttgttgagtatcccttgtctggaccagaggcagcctcagcacaccgtttgcgcaatgtctcaaggtctgcagtgccatcattccactcttgccaactttctgttgtcagcgcccgcccatcgtacccggttggccatatattcggacctcgtagctcatcaaacaccttagcccgcgccgtgcttagagctccgtccttggacaataggacttttgcaaggtacgcagggtgtatgtccgtctccttagcacctaggaatcgcgtccccattacaactccgtcagcaccgagtgctagggcgctcgccactccacgaccgtcagatattcctcccgcggctattagtatcacattacctccctcatcgttagtattagagggcaatggtagccgatcgcgggtctcggggaggagtgagatgatacccgctccacgctcgaagccatgcccacctgcatcagcaccttgaaggactataatgtcgggcctcgcggtgcgatatacttcttccgcggcgctcacattgcccacttgaatacagatgcgcgttcccggagccaaagctttccggagtctgcttgtgaactcagcatagtcgctcagctcacgggctgcgaatagccagactattgcgggcgggtcctccctcagagtctcaatcgcggtgtctatagacggtagcgcgaagaggaggaaacccacgcccagtggaagccgaccagtttggtcgtagaactctgcgcaggcattggcggatgcgtttgtcatggaaagatcgaggtccgaaaacttagctcgagcggcagctagatgggacgatagtaattccatgtcgttgacgctaccgatcatgccgattccgccagcctgtgaaacggagcatgctagtgcgctgccggcgaatccggcca

SEQ ID NO: 9714 - DNA, 1110 bp, Muscodor strobelii
  misc_feature: SGI cDNA ID NO. 563050
  misc_feature: Encodes the peptide sequence at SEQ ID NO 9715
atgccgtcctcctggctgcaaacacatttcccatggacgaccagtccggtcatcttcaacgcgccgatggccggattcgccggcagcgcactagcatgctccgtttcacaggctggcggaatcggcatgatcggtagcgtcaacgacatggaattactatcgtcccatctagctgccgctcgagctaagttttcggacctcgatctttccatgacaaacgcatccgccaatgcctgcgcagagttctacgaccaaactggtcggcttccactgggcgtgggtttcctcctcttcgcgctaccgtctatagacaccgcgattgagactctgagggaggacccgcccgcaatagtctggctattcgcagcccgtgagctgagcgactatgctgagttcacaagcagactccggaaagctttggctccgggaacgcgcatctgtattcaagtgggcaatgtgagcgccgcggaagaagtatatcgcaccgcgaggcccgacattatagtccttcaaggtgctgatgcaggtgggcatggcttcgagcgtggagcgggtatcatctcactcctccccgagacccgcgatcggctaccattgccctctaatactaacgatgagggaggtaatgtgatactaatagccgcgggaggaatatctgacggtcgtggagtggcgagcgccctagcactcggtgctgacggagttgtaatggggacgcgattcctaggtgctaaggagacggacatacaccctgcgtaccttgcaaaagtcctattgtccaaggacggagctctaagcacggcgcgggctaaggtgtttgatgagctacgaggtccgaatatatggccaaccgggtacgatgggcgggcgctgacaacagaaagttggcaagagtggaatgatggcactgcagaccttgagacattgcgcaaacggtgtgctgaggctgcctctggtccagacaagggatactcaacaagagcagcggtttgggctgggaccggtgttggtctcgtcaatgatttcaagcctgcgggcgagattctcgccagtgtcagggaagaggcgattaaagcattgaggagagccctagagacacattcgaagtag

SEQ ID NO: 9715 - protein, 369 aa, Muscodor strobelii
  misc_feature: SGI Peptide ID NO. 563050
  misc_feature (7)..(355): Pfam Id: PF03060 Pfam Desc: 2-nitropropane dioxygenase
  misc_feature (143)..(355): Pfam Id: PF03060 Pfam Desc: 2-nitropropane dioxygenase
  misc_feature (4)..(363): NCBI GI: 189192246 Blast Desc: conserved [Pyrenophora tritici-repentis Pt-1C-BFP] gi|187974068|gb|EDU41567.1| conserved [Pyrenophora tritici-repentis Pt-1C-BFP]
  misc_feature (4)..(365): NCBI GI: 169600373 Blast Desc: SNOG_03020 [Phaeosphaeria nodorum SN15] gi|111068631|gb|EAT89751.1| SNOG_03020 [Phaeosphaeria nodorum SN15]
  misc_feature (6)..(363): NCBI GI: 238483509 Blast Desc: 2-nitropropane dioxygenase precursor, [Aspergillus flavus NRRL3357] gi|220701043|gb|EED57381.1| 2-nitropropane dioxygenase precursor, [Aspergillus flavus NRRL3357]
  misc_feature (1)..(361): NCBI GI: 238844874 Blast Desc: 2-nitropropane dioxygenase [Microsporum canis CBS 113480]
  misc_feature (3)..(365): NCBI GI: 255712665 Blast Desc: KLTH0C08998p [Lachancea thermotolerans] gi|238933994|emb|CAR22177.1| KLTH0C08998p [Lachancea thermotolerans]
  misc_feature (14)..(360): NCBI GI: 225556049 Blast Desc: 2-nitropropane dioxygenase [Ajellomyces capsulatus G186AR]
  misc_feature (6)..(360): NCBI GI: 119176949 Blast Desc: CIMG_07488 [Coccidioides immitis RS]
  misc_feature (6)..(360): NCBI GI: 240107805 Blast Desc: 2-nitropropane dioxygenase precursor, [Coccidioides posadasii C735 delta SOWgp]
  misc_feature (10)..(355): NCBI GI: 154316949 Blast Desc: BC1G_03892 [Botryotinia fuckeliana B05.10] gi|150845504|gb|EDN20697.1| BC1G_03892 [Botryotinia fuckeliana B05.10]
  misc_feature (10)..(354): NCBI GI: 242792288 Blast Desc: oxidoreductase, 2-nitropropane dioxygenase family, [Talaromyces stipitatus ATCC 10500] gi|218718510|gb|EED17930.1| oxidoreductase, 2-nitropropane dioxygenase family, [Talaromyces
  misc_feature (6)..(362): SWISSPROT Homolog: EC 1.13.11.32 2-nitropropane dioxygenase
MPSSWLQTHFPWTTSPVIFNAPMAGFAGSALACSVSQAGGIGMIGSVNDMELLSSHLAAARAKFSDLDLSMTNASANACAEFYDQTGRLPLGVGFLLFALPSIDTAIETLREDPPAIVWLFAARELSDYAEFTSRLRKALAPGTRICIQVGNVSAAEEVYRTARPDIIVLQGADAGGHGFERGAGIISLLPETRDRLPLPSNTNDEGGNVILIAAGGISDGRGVASALALGADGVVMGTRFLGAKETDIHPAYLAKVLLSKDGALSTARAKVFDELRGPNIWPTGYDGRALTTESWQEWNDGTADLETLRKRCAEAASGPDKGYSTRAAVWAGTGVGLVNDFKPAGEILASVREEAIKALRRALETHSK

SEQ ID NO: 9716 - DNA, 3726 bp, Muscodor strobelii
  misc_feature: SGI EST ID NO. CUFF.23016.1
  misc_feature: Variant of the nucleotide sequence at SEQ ID NO 9714
cagcgacgtatctgaattaagcattcactcagagaaaaatccaattcacgatatcgaaacccatattctatgtagttgagaatcataagagctttcaatttgagcaaataaccgagtagcaagtcaagtctccataggaatccaaagatgccgtcctcctggctgcaaacacatttcccatggacgaccagtccggtcatcttcaacgcgccgatggccggattcgccggcagcgcactagcatgctccgtttcacaggctggcggaatcggcatgatcggtagcgtcaacgacatggaattactatcgtcccatctagctgccgctcgagctaagttttcggacctcgatctttccatgacaaacgcatccgccaatgcctgcgcagagttctacgaccaaactggtcggcttccactgggcgtgggtttcctcctcttcgcgctaccgtctatagacaccgcgattgagactctgagggaggacccgcccgcaatagtctggctattcgcagcccgtgagctgagcgactatgctgagttcacaagcagactccggaaagctttggctccgggaacgcgcatctgtattcaagtgggcaatgtgagcgccgcggaagaagtatatcgcaccgcgaggcccgacattatagtccttcaaggtgctgatgcaggtgggcatggcttcgagcgtggagcgggtatcatctcactcctccccgagacccgcgatcggctaccattgccctctaatactaacgatgagggaggtaatgtgatactaatagccgcgggaggaatatctgacggtcgtggagtggcgagcgccctagcactcggtgctgacggagttgtaatggggacgcgattcctaggtgctaaggagacggacatacaccctgcgtaccttgcaaaagtcctattgtccaaggacggagctctaagcacggcgcgggctaaggtgtttgatgagctacgaggtccgaatatatggccaaccgggtacgatgggcgggcgctgacaacagaaagttggcaagagtggaatgatggcactgcagaccttgagacattgcgcaaacggtgtgctgaggctgcctctggtccagacaagggatactcaacaagagcagcggtttgggctgggaccggtgttggtctcgtcaatgatttcaagcctgcgggcgagattctcgccagtgtcagggaagaggcgattaaagcattgaggagagccctagagacacattcgaagtagtcggactcaccaaagcgaagtgacattaagaagtgatttaatgcagatgcaatcttgtgaatagcatcgtattgatatcatgttaaccttaggtattagcagaacctccagaacagacttgcgcctcacccatgcatcggttgctcaattctggcgaaaatccctatgacttaaacttgacatgcccctctcccagatccgttacattaacctcgggatctgttttctcagcggcccttttcactgcctcgacaaaattcagtctacgctctttttcaacaacgacgctgtccctgctacgaaggctgagtaatcctggtctggcagcatctatgtcggtaccacagacattgtccagctccgagacgatttgtatcataaactcaaaaattttaacggcttcctgaacgatgtcttcacgctcagattcggtgaagaacttttcggcctcggcaaggcaacttttgaaggcttgcttgaggtcttccccgtccgtcgtcttcgcgttgaagcggtagaaattaaacggtcgaggagcggtgcacggatccgggccgagcaggcatgaaggtaagacatgatgtaatgtccgatgggatgttgtcattttccagaagtccgggctagtatcctcgagcgccgctcgaataaatcgtcccccagagaatagagccatgtagaggacccatgcgtatgcaatgagaacgtgtggagaactctgggtagaatttacaatatgacctagaaatttttcgaggacaggcgattctgcagtacgagcaagctggtcttcaagcgtcggtaatgaccagtgcgtcaaagttaaaaggtccttctgcagtgtttgggaacgttctaggtccttgaagtgtaagcctgtaagtatagactgtacacggctatggtcttcctctattgtattgtctaagaattccggtctgacatccgagggccaggtatctgaacgaactattgagtaaataagttggggtgtcggaacatcgcaagctgcgacagtgtgtttattgggttggcgacccatatctatgccatcgcgagctttaggacaatctataaactcgcgccacacggcctcgaagcaagtgtatatagttgcaatatgtagaagacccgatacatattgaaatgggtcctttgcgtgcggtggcaaagctagagggagccgagccataataagcttgttgagcttagtatggacagggcgggttgccgcattgatggtgtctcctagagtgcgaggcatgttgacagtcttagagggcatgctgagttttaggaagtatgaccaatctactagagatatagaaatgatagttgccaatttgaatgactgatgtggcccgagtctctatgtcgtgtttgttatatgggcaaatgaatgacagggaggtcgtgcagttgcaactgagaataggcttggttggcgggtcgggctatcttcctttttgaatcctcaaccaaactcgggattgacttgtgtcagtcttggccagtcacaacatgtgtcggtcacaaggtgtttctccttcccgatagatgagatcttgtggtaagaatactcgtggtcatctaatacggtagtgactgcctgctcgcgggtgcgccaaaataaaacggcgaagagccttataggatgatagtacgctagagtcagcttgacagaaactaggctcctcttcacgcgcagccgtagcaccaggaggcgaacgtattacgaggcccgatagcctttgcgttcttgaatagaaggacaaatctgtctataagattttgccaacctggagtcgaattattgacgagacacaaaattacaccatgtgaaagtggaatgacagtgtcatctggaataacccaggtcaaatgactcagccgcgaaaatcttcttctaccaggtcgaaggcttagctgattttctttgaagatcctcaagctgatgttgaatgatcttcaaattcgtgacaatgccttgcatacggtgagacccctatactttttgtcgtagctcaatacgtccaaaaagagacactctcgaagcaaagttgaagccgtttcacccgacgctctggaagtggagtgtggcggtcgaactctagacctcaccaggcattagtcaaaactctcagaacaccgattgacgcaggtactgcgatctcaggcacacttacctcttacaaggaacgaaatagtgggtaggagatcgcaaagcgcataaagctgcccaacattcgatagaccggtgcaatagaagaagtcgacaagctaaaatgcccagttgctttttcaactttcccctccccaggaacgcgccccagtcttgcccactttgcacatgccattccaagattcccatgatttaaaattggtgaagttgttgcttgtgtcgatccctggaccttctgggattagtgtacgtcattgcacagatcgttccggagatcggggatacgc

SEQ ID NO: 9717 - DNA, 1038 bp, Muscodor strobelii
  misc_feature: SGI cDNA ID NO. 563051
  misc_feature: Encodes the peptide sequence at SEQ ID NO 9718
atgacagcggcactacgctccgtgcccagtctacaaacgggtttaaacctactgagcctcgcgacagcatcctatgtgtcgctccgcatattcaatgaaatcctcatatatctccggccgtccggtttaaaacgctacgcgcataagtcagaaaatggtgaagcgccatgggcgatggtcaccggcgcaaccggtggaatcggcagagcgtttgccgaagagctggcagccgatgggttcaatgttgtgctacacggtcgtgggggcgagaagctgtctagagtaatggccgagtttcaagcaacgtttcccgctcagagcttcaaaatcatcgccgcagaccccgaagcagtgcaaagcaagcaagatttagaatccgggcgtgccgatgggaaaacatcgaatacgcccgatttccaggccatacagcgagagctcgaatgcattcggttaacggtactcatcaacaatgtcggagccggacctacgaacccgcattttctaccgctcgccgattcatccgaggccaggataacagcaaatatcagtttaaatgcactattcccaattcacttgacacgcgtcctactgccgactttgaagcggcactcaccatcacttgtgatcaacattagctcattagcagacaaaggactaccgaatctgctctcgtacggcgccagcaaggcagcgatgatgacggcgacaacggcgttaagactagaagccatgacagaaaagagcgacatcgagttcttaggcatacgcgtagggcagtgtacaggagcagctggcctagacacggagaaagtcccagagtctttgttttgcccaagtgcaaaaacaatggcaaaagctgctttggcgagagctggacatggcaatggtgtaattatgggttattggggacatgcgctacagcagtggttattatggccattatggtttctgccgcagtccgttgaagacagagttatggtctattttttgtcaagagcaaaagagcaggatatacatggagatgagaaggcaaagtag

SEQ ID NO: 9718 - protein, 345 aa, Muscodor strobelii
  misc_feature: SGI Peptide ID NO. 563051
  misc_feature (56)..(244): Pfam Id: PF00106 Pfam Desc: short chain dehydrogenase
  misc_feature (56)..(90): Pfam Id: PF00106 Pfam Desc: short chain dehydrogenase
  misc_feature (138)..(244): Pfam Id: PF00106 Pfam Desc: short chain dehydrogenase
  misc_feature (5)..(307): NCBI GI: 70996520 Blast Desc: short chain dehydrogenase/reductase [Aspergillus fumigatus Af293] gi|66850650|gb|EAL90977.1| short chain dehydrogenase/reductase, [Aspergillus fumigatus Af293] short
  misc_feature (11)..(307): NCBI GI: 121700733 Blast Desc: short chain dehydrogenase/reductase, [Aspergillus clavatus NRRL 1] gi|119396774|gb|EAW07205.1| short chain dehydrogenase/reductase, [Aspergillus clavatus NRRL 1]
  misc_feature (11)..(307): NCBI GI: 119494437 Blast Desc: short chain dehydrogenase/reductase, [Neosartorya fischeri NRRL 181] gi|119412276|gb|EAW22217.1| short chain dehydrogenase/reductase, [Neosartorya fischeri NRRL 181]
  misc_feature (15)..(345): NCBI GI: 255957031 Blast Desc: Pc21g23010 [Penicillium chrysogenum Wisconsin 54-1255] gi|211590979|emb|CAP97198.1| Pc21g23010 [Penicillium chrysogenum Wisconsin 54-1255]
  misc_feature (25)..(325): NCBI GI: 240111243 Blast Desc: oxidoreductase,short chain dehydrogenase, [Coccidioides posadasii C735 delta SOWgp]
  misc_feature (25)..(328): NCBI GI: 119189415 Blast Desc: CIMG_04755 [Coccidioides immitis RS]
  misc_feature (10)..(328): NCBI GI: 258566091 Blast Desc: [Uncinocarpus reesii 1704] gi|237907491|gb|EEP81892.1| [Uncinocarpus reesii 1704]
  misc_feature (25)..(328): NCBI GI: 261196452 Blast Desc: short chain dehydrogenase/reductase [Ajellomyces dermatitidis SLH14081] gi|239595874|gb|EEQ78455.1| short chain dehydrogenase/reductase [Ajellomyces dermatitidis SLH14081]
  misc_feature (25)..(328): NCBI GI: 239609447 Blast Desc: short chain dehydrogenase/reductase [Ajellomyces dermatitidis ER-3]
  misc_feature (36)..(345): NCBI GI: 225677848 Blast Desc: estradiol 17-beta-dehydrogenase [Paracoccidioides brasiliensis Pb03] gi|226287415|gb|EEH42928.1| estradiol 17-beta-dehydrogenase 12-A [Paracoccidioides brasiliensis Pb18]
  misc_feature (15)..(229): SWISSPROT Homolog: EC 1.1.1.62 Estradiol 17-beta-dehydrogenase
MTAALRSVPSLQTGLNLLSLATASYVSLRIFNEILIYLRPSGLKRYAHKSENGEAPWAMVTGATGGIGRAFAEELAADGFNVVLHGRGGEKLSRVMAEFQATFPAQSFKIIAADPEAVQSKQDLESGRADGKTSNTPDFQAIQRELECIRLTVLINNVGAGPTNPHFLPLADSSEARITANISLNALFPIHLTRVLLPTLKRHSPSLVINISSLADKGLPNLLSYGASKAAMMTATTALRLEAMTEKSDIEFLGIRVGQCTGAAGLDTEKVPESLFCPSAKTMAKAALARAGHGNGVIMGYWGHALQQWLLWPLWFLPQSVEDRVMVYFLSRAKEQDIHGDEKAK

SEQ ID NO: 9719 - DNA, 1987 bp, Muscodor strobelii
  misc_feature: SGI EST ID NO. CUFF.22964.0
  misc_feature: Variant of the nucleotide sequence at SEQ ID NO 9717
cacggtaccactttcgccccatttggggccgctcactccggtcgagataacatctagggcatagcgccaataacactgggtcatcttctttcattgacagtttacagaaaaaatgttcaatgatcgttacaattgcctaaagtagaccgtaaatcagatattgggtgtagctgactacaatcacgcgactatactcgccggcgactgactactggacgactgagagaccgactcaatgcgtccttacaccaccggcttgacagcgcaggctctcggcatttgaccccagagccgcgctaaaatcgacttgccgaatccttcgcagggtacggaccgagtacgggatgacgcaaatgcagctataacactttttggaatgatttgaattgagacataggcagttcctggccaccaaggaacacttgcattgtagatcgctgcagaaaattacatcgtacaggagctcggaatcgaatgcagctcaccgattgataggcagatacattaaagactttcttacgccttttcccttgaattaaagatacatgtgaaattgttcttgctactccggctgaattggagtgcttaatatacccctcagttcgcgacactgatcttgggtcactttggaccctttatttacgtcatgctgaaaaccatacactgaacacaatcgacaagtatatatgcactcgcatgacaatgacagcggcactacgctccgtgcccagtctacaaacgggtttaaacctactgagcctcgcgacagcatcctatgtgtcgctccgcatattcaatgaaatcctcatatatctccggccgtccggtttaaaacgctacgcgcataagtcagaaaatggtgaagcgccatgggcgatggtcaccggcgcaaccggtggaatcggcagagcgtttgccgaagagctggcagccgatgggttcaatgttgtgctacacggtcgtgggggcgagaagctgtctagagtaatggccgagtttcaagcaacgtttcccgctcagagcttcaaaatcatcgccgcagaccccgaagcagtgcaaagcaagcaagatttagaatccgggcgtgccgatgggaaaacatcgaatacgcccgatttccaggccatacagcgagagctcgaatgcattcggttaacggtactcatcaacaatgtcggagccggacctacgaacccgcattttctaccgctcgccgattcatccgaggccaggataacagcaaatatcagtttaaatgcactattcccaattcacttgacacgcgtcctactgccgactttgaagcggcactcaccatcacttgtgatcaacattagctcattagcagacaaaggactaccgaatctgctctcgtacggcgccagcaaggcagcgatgatgacggcgacaacggcgttaagactagaagccatgacagaaaagagcgacatcgagttcttaggcatacgcgtagggcagtgtacaggagcagctggcctagacacggagaaagtcccagagtctttgttttgcccaagtgcaaaaacaatggcaaaagctgctttggcgagagctggacatggcaatggtgtaattatgggttattggggacatgcgctacagcagtggttattatggccattatggtttctgccgcagtccgttgaagacagagttatggtctattttttgtcaagagcaaaagagcaggatatacatggagatgagaaggcaaagtagtatagtgtcactcagatcatttctgatgggatatcgaatccaagtcttttaacgacactattttactacccatatcatcgggagtacgagccttatatacccttgttagtcgcacaacatcccattacagctaagccacaaggtactttctggcttgctagagagtttgctgtccgcagtaagactgtgatgataggtatatcccagtagtgtcaagtctcgcctgtcatcatggctcccattagac

SEQ ID NO: 9720 - DNA, 810 bp, Muscodor strobelii
  misc_feature: SGI cDNA ID NO. 563052
  misc_feature: Elevated expression when VOC is produced
  misc_feature: Encodes the peptide sequence at SEQ ID NO 9721
atggcgacaccagcacagaagtctcaggccgggttgaccatcgtccacgtggcgctgtatcgcatgggaacgaagtccatggccgaagcctatcagatactaggatatcaagcccatcacgtccataatggcaacgttctgaaccaaccttggcaaattgtagaacaggcggccgaagcgacttggcctgaggtgccaggaggagtcactcgtcccaaattcaaccgaggagattgggagcagctttgggacccgaagtatgatgtcgtaacggatcttgtatctccctttgccgatcaactcgcgtccatatatcccgaggccaaagtcgttatagtccagagggatttcgactcgtggtggtcaagctacgaagtcgagtgcatagactcagtcttttcacccgtaggtcgactagttgtatttgctctcgggcacatattgggcaacagagggggctatgccgctcacaaaattcatctcggattcttcaatgtcagacgtcgctcacatatcactaaagaaaaggcacgcgagggatatgacagatacttcaatagagtacgtgaagctgtctctcccgagcggaggctcgacttcaagctcagcgatggctggggtcctctatgtgccttccttgggaaagagatcccaaatgtgccattcccacacctgaacgatcgacagatacactacaaacaaacaacagatgcatctagaaaggttcttgtggactccgcgatgaagatcgcgcctttcgggctggcggtattactcccaattgttgcatattggtatatgtgggcatag

SEQ ID NO: 9721 - protein, 269 aa, Muscodor strobelii
  misc_feature: SGI Peptide ID NO. 563052
  misc_feature (3)..(266): NCBI GI: 46116006 Blast Desc: FG03845.1 [Gibberella zeae PH-1]
  misc_feature (5)..(227): NCBI GI: 154304931 Blast Desc: BC1G_09051 [Botryotinia fuckeliana B05.10] gi|150853913|gb|EDN29105.1| BC1G_09051 [Botryotinia fuckeliana B05.10]
  misc_feature (1)..(265): NCBI GI: 189196286 Blast Desc: conserved [Pyrenophora tritici-repentis Pt-1C-BFP] gi|187980360|gb|EDU46986.1| conserved [Pyrenophora tritici-repentis Pt-1C-BFP]
  misc_feature (75)..(266): NCBI GI: 116179296 Blast Desc: CHGG_00276 [Chaetomium globosum CBS 148.51] gi|88184573|gb|EAQ92041.1| CHGG_00276 [Chaetomium globosum CBS 148.51]
  misc_feature (12)..(227): NCBI GI: 116198675 Blast Desc: CHGG_07493 [Chaetomium globosum CBS 148.51] gi|88178772|gb|EAQ86240.1| CHGG_07493 [Chaetomium globosum CBS 148.51]
  misc_feature (7)..(250): NCBI GI: 256728010 Blast Desc: NECHADRAFT_45960 [Nectria haematococca mpVI 77-13-4]
  misc_feature (33)..(235): NCBI GI: 169605543 Blast Desc: SNOG_05797 [Phaeosphaeria nodorum SN15] gi|160706786|gb|EAT86861.2| SNOG_05797 [Phaeosphaeria nodorum SN15]
  misc_feature (12)..(251): NCBI GI: 256728993 Blast Desc: NECHADRAFT_93184 [Nectria haematococca mpVI 77-13-4]
  misc_feature (14)..(234): NCBI GI: 145607804 Blast Desc: MGG_10067 [Magnaporthe grisea 70-15] gi|145015300|gb|EDJ99836.1| MGG_10067 [Magnaporthe grisea 70-15]
  misc_feature (12)..(227): NCBI GI: 238837557 Blast Desc: conserved [Microsporum canis CBS 113480]
  misc_feature: Useful for introducing or modulating the production of volatile compounds
MATPAQKSQAGLTIVHVALYRMGTKSMAEAYQILGYQAHHVHNGNVLNQPWQIVEQAAEATWPEVPGGVTRPKFNRGDWEQLWDPKYDVVTDLVSPFADQLASIYPEAKVVIVQRDFDSWWSSYEVECIDSVFSPVGRLVVFALGHILGNRGGYAAHKIHLGFFNVRRRSHITKEKAREGYDRYFNRVREAVSPERRLDFKLSDGWGPLCAFLGKEIPNVPFPHLNDRQIHYKQTTDASRKVLVDSAMKIAPFGLAVLLPIVAYWYMWA

SEQ ID NO: 9722 - DNA, 583 bp, Muscodor strobelii
  misc_feature: SGI EST ID NO. CUFF.22971.0
  misc_feature: Variant of the nucleotide sequence at SEQ ID NO 9720
agggaatgcacgtgagctcacagcaaattgttccgcattctccaaatggcgacaccagcacagaagtctcaggccgggttgaccatcgtccacgtggcgctgtatcgcatgggaacgaagtccatggccgaagcctatcagatactaggatatcaagcccatcacgtccataatggcaacgttctgaaccaaccttggcaaattgtagaacaggcggccgaagcgacttggcctgaggtgccaggaggagtcactcgtcccaaattcaaccgaggagattgggagcagctttgggacccgaagtatgatgtcgtaacggatcttgtatctccctttgccgatcaactcgcgtccatatatcccgaggccaaagtcgttatagtccagagggatttcgactcgtggtggtcaagctacgaagtcgagtgcatagactcagtcttttcacccgtaggtcgactagttgtatttgctctcgggcacatattgggcaacagagggggctatgccgctcacaaaattcatctcggattcttcaatgtcagacgtcgctcacatatcactaaagaaaaggcacgcgagg

SEQ ID NO: 9723 - DNA, 795 bp, Muscodor strobelii
  misc_feature: SGI cDNA ID NO. 563053
  misc_feature: Encodes the peptide sequence at SEQ ID NO 9724
atggcagatgcgacaagacccgacattctagtcatcgcagatggcgcatggagtttcgaatacttcggcctttctgattttggtcagatcacgaagcaagccaacgcccacaaggcaaatctagaaatacctggcgaagcttcacagttgattcagcagtatccctccgctaaggcaatcttgatcgtcactgctaccattatgcagccccagcacttcctggtcactgtacagctggtcaactactgcaagagaggcggcagagtcgtgcttgcaacaagcgggattgtcggtgccactaacggtgacctgttcgacccatggatgcgagatgcatggcagctaccctgggaatgtgacgctggtaattatggaaagatcgatgcagtactcaacgactcacatgtcggacctggtggagacgctacttggagaactggtcttctgcaagatttctatctcaaaggcatgcctctcacgaacgttgccccttcagattcactctacgacgtttcgcgagaacacgtttcctattattggagattcgaggacaagatcaagaagtacactactgtggcattcgcgaagctcggtgatggttggttgggatacgtaggggatacgaacactgaacctcagagcggtgacatcatcatagccatgatgggcttgcagatcgaggctaatccgtccgtagagcgttgtgacaaagccacgctcgacgatgctatattgcaggcgtatagagacgtaggagctcagcctccttctttcttctcgtctcgcagagcttga

SEQ ID NO: 9724 - protein, 264 aa, Muscodor strobelii
  misc_feature: SGI Peptide ID NO. 563053
  misc_feature (44)..(224): NCBI GI: 238488175 Blast Desc: conserved [Aspergillus flavus NRRL3357] gi|220697713|gb|EED54053.1| conserved [Aspergillus flavus NRRL3357]
  misc_feature (1)..(225): NCBI GI: 242814093 Blast Desc: transcription factor Rba50, [Talaromyces stipitatus ATCC 10500] gi|218714640|gb|EED14063.1| transcription factor Rba50, [Talaromyces stipitatus ATCC 10500]
  misc_feature (44)..(219): NCBI GI: 169762402 Blast Desc: [Aspergillus oryzae RIB40] gi|83770129|dbj|BAE60262.1| protein product [Aspergillus oryzae]
  misc_feature (42)..(224): NCBI GI: 171685566 Blast Desc: protein product [Podospora anserina] gi|170942744|emb|CAP68397.1| protein product [Podospora anserina]
  misc_feature (51)..(224): NCBI GI: 154305870 Blast Desc: BC1G_08166 [Botryotinia fuckeliana B05.10] gi|150853051|gb|EDN28243.1| BC1G_08166 [Botryotinia fuckeliana B05.10]
  misc_feature (85)..(223): NCBI GI: 242216552 Blast Desc: [Postia placenta Mad-698-R] gi|220726815|gb|EED80753.1| [Postia placenta Mad-698-R]
  misc_feature (38)..(224): NCBI GI: 261361602 Blast Desc: conserved [Verticillium albo-atrum VaMs.102]
  misc_feature (17)..(223): NCBI GI: 256730423 Blast Desc: NECHADRAFT_82905 [Nectria haematococca mpVI 77-13-4]
  misc_feature (6)..(224): NCBI GI: 116179140 Blast Desc: CHGG_00198 [Chaetomium globosum CBS 148.51] gi|88184495|gb|EAQ91963.1| CHGG_00198 [Chaetomium globosum CBS 148.51]
  misc_feature (59)..(224): NCBI GI: 85100673 Blast Desc: NCU06693 [Neurospora crassa OR74A] gi|28922544|gb|EAA31772.1| [Neurospora crassa OR74A] gi|28949931|emb|CAD70917.1| related to triacylglycerol lipase
MADATRPDILVIADGAWSFEYFGLSDFGQITKQANAHKANLEIPGEASQLIQQYPSAKAILIVTATIMQPQHFLVTVQLVNYCKRGGRVVLATSGIVGATNGDLFDPWMRDAWQLPWECDAGNYGKIDAVLNDSHVGPGGDATWRTGLLQDFYLKGMPLTNVAPSDSLYDVSREHVSYYWRFEDKIKKYTTVAFAKLGDGWLGYVGDTNTEPQSGDIIIAMMGLQIEANPSVERCDKATLDDAILQAYRDVGAQPPSFFSSRRA

SEQ ID NO: 9725 - DNA, 811 bp, Muscodor strobelii
  misc_feature: SGI EST ID NO. CUFF.22980.0
  misc_feature: Variant of the nucleotide sequence at SEQ ID NO 9723
cgtttccaagagtaactcactttcagtaacgcaaggttatcatccgacccaggtccactataccaagtgacgctcaacaagcatcatacgcttgcgctaatttccacaccacctgttgctcttcgcattaccagcgctagtgcatcaaccacactctggcatgatggcagatgcgacaagacccgacattctagtcatcgcagatggcgcatggagtttcgaatacttcggcctttctgattttggtcagatcacgaagcaagccaacgcccacaaggcaaatctagaaatacctggcgaagcttcacagttgattcagcagtatccctccgctaaggcaatcttgatcgtcactgctaccattatgcagccccagcacttcctggtcactgtacagctggtcaactactgcaagagaggcggcagagtcgtgcttgcaacaagcgggattgtcggtgccactaacggtgacctgttcgacccatggatgcgagatgcatggcagctaccctgggaatgtgacgctggtaattatggaaagatcgatgcagtactcaacgactcacatgtcggacctggtggagacgctacttggagaactggtcttctgcaagatttctatctcaaaggcatgcctctcacgaacgttgccccttcagattcactctacgacgtttcgcgagaacacgtttcctattattggagattcgaggacaagatcaagaagtacactactgtggcattcgcgaagctcggtgatggttggttgggatacgtaggggatacgaacactgaacctcagagcggtgac

SEQ ID NO: 9726 - DNA, 2994 bp, Muscodor strobelii
  misc_feature: SGI cDNA ID NO. 563054
  misc_feature: Encodes the peptide sequence at SEQ ID NO 9727
atggctttatcaggcggcagcgtcttctccgagacgcttcaggagatcactaatgccaaactcgaggagctctcgaaacgaaggtccgagttcgaaaacgccaaagcacagattctagcagatcttgacaatgaaaaggtaccactcgagcgtctacggattttgagtcgaggtgtgaaagaatgctactcaatgaagacaacagagaccggcgagatacttactggccactccagaacgccagagttagagctggaactaaagcacctggatagcttcttggcacaatcgaaatatgacccatctgtctcaagtcacacaatggtcaattgggaggagtcattactacgacatctcggcacgcagtcgtccaaatttcagtacgcatcgctgtatgctcagctagtcactgaatggctgtcgacagagaaagccgcagccgaccctggtgaggatatcgccatgtccgagggcttcgaggatgtcggagactctatgaagaagagttaccgtgctcaatgggaaaaagttgtgtttgaatctgcagacgtgaacgacactgaccttaagacctatctggctcgtctcttcggtttgggacatgccgaaaagtctgctaaggtcaaggctctggacaagctacgtgaggaagtcaaagccttcgaaatctccatggctatgcctaaccaattcaacgcaagcactctcggctgggtgattaggggactgttggcttcagatctattgactgacgacaaaagagaggtactacgggattttgagggcaatcagaccatattgaatgaagtgtccgacgtcttgaacatgcgccttgcggccctaagcaattggtcttggggcgagagcgtatctctcgagcaacgacgcaaaatcacaggcatctacaacgtgctcatgcatgaagatgttctgcaggctatctttcttcattacattggtgtgaagtggtctgtgtttctcaagcgcgcgttccgcaacttccgcaagtttgccggtgcttggaacatgacgagcaggtcgattcccaagatcgatcagaagcgtcgggaatattacctggactcgttcaagcgcaatggctcggtccagtctgcaaggaataagctctaccgccagcattacttcgtcaaggcgctttgggccaatgagactcaacagagcgctgcgttggagggtgaggaggaggcccaaccccatcaattgcaggacttccaaatgcagcttatgcttttggaacaacagaataaaaagcgattgatgatggcgcgacaggaaccacattatgcccgggcgatgcccatgcagcaggcgcagggagctccgatgcctgcgccggcacctccaccaccaggcaggggccagggtaggggcggcggcgctatgagacatcggaaaatagtgcaggagaaacctggtgattccagtggcgatgaatcggatgccgattcagaagctaatgcaaatgaagttcgccgaccgatggaggataagcagcggttaattcgtctcgtgtcgacagaaattgccattaacaccaaattgcacggcgagatcactgttctccacgcagcattcgagggctggctctctcttcttccacatgaagcaattctggtcgttatcaaacttctgggtgtatcctcttattggctagatttcttcaccaaattcctcaaagcaccgcttaagttccttgacgataccccgtctacggcaccccgagtgcgagaacgaggcacgcccgcatctcacgtcttgagcgaggtcttcggcgaatcaatactattctgtctcgacttcgctgttaatcaagccactaacgggcacaacatccatcgcatgcacgatgatttttggttctggtcacgggaccatgaggtcgtcaagacgatgtggaaggccgtcgaggactttacaaatgctacacgcacttacatctcaacggccaagtccggcactgtgcgtatttcgagcgatccatcgacgacactcgagatcgatgagaagctgcctataggcgacatccgcttcgggttcttgaagctctccgcacaaactgggaatttcgagatcgatcaagcagtggtcgataagcacatcatcgaccttcgacgtcagctagccgacaagcgcaagagcgttatatctttcatccaaacctggaatgcgatcgccgccacattcttcacatctaacttcggcaaacccgcaaactgctttgggaaatcacatgtcgaccaaatgctagcaactcaccaacgaatccaggcggaggtattttcatcgtcttcatctcccctcctcgagggtgaagttgcgcctagcaaaccaatcacgagtgttgtggggtatctcaagcatcttctccgcagccgctttggtgtaaccgacatccccgatgcctatctattttttcctgtcgagttaggaggtctagacttagtatccccttttatctcaatcctccctctgcgtgactccgtgcttgccgacccctcaaaagagctcgacaaattcctcgacttagaacgagacagttacgcagaagctaaacgcgccttcgagcgtggactacagtctcacacatacgccgatacttgggctcctgagaaacctgaagaccgagaaaacttcttctccttcgcggaattcgccaaatatcgcgaggacatcgggtatgagttctccggcaacctcaaggaagtattcgagaaattactcgaagtcccacccacccacagcggtggcatagagaacccgagcacgaagttgaacagtgcactgcaaagtgtggggaatggggggaagatcggcaattggtgggggatggaaccttattggagatgggttgcgcagatgtatggtcccgaggctatggataggtttggtggattgaatattgttgagcctggattattgcctatggggatggttagtattttcagggagaaaagggttcggtgggaaggttaa

SEQ ID NO: 9727 - protein, 997 aa, Muscodor strobelii
  misc_feature: SGI Peptide ID NO. 563054
  misc_feature (3)..(997): NCBI GI: 46126351 Blast Desc: FG07553.1 [Gibberella zeae PH-1]
  misc_feature (7)..(996): NCBI GI: 39951443 Blast Desc: MGG_01364 [Magnaporthe grisea 70-15] gi|145020812|gb|EDK04941.1| MGG_01364 [Magnaporthe grisea 70-15]
  misc_feature (1)..(997): NCBI GI: 28629058 Blast Desc: [Leptosphaeria maculans]
  misc_feature (1)..(997): NCBI GI: 189189732 Blast Desc: conserved [Pyrenophora tritici-repentis Pt-1C-BFP] gi|187972811|gb|EDU40310.1| conserved [Pyrenophora tritici-repentis Pt-1C-BFP]
  misc_feature (6)..(997): NCBI GI: 156053403 Blast Desc: SS1G_06869 [Sclerotinia sclerotiorum 1980] gi|154704647|gb|EDO04386.1| SS1G_06869 [Sclerotinia sclerotiorum 1980]
  misc_feature (5)..(993): NCBI GI: 115402793 Blast Desc: conserved [Aspergillus terreus NIH2624] gi|114189319|gb|EAU31019.1| conserved [Aspergillus terreus NIH2624]
  misc_feature (6)..(997): NCBI GI: 169608035 Blast Desc: SNOG_07083 [Phaeosphaeria nodorum SN15] gi|160701543|gb|EAT85734.2| SNOG_07083 [Phaeosphaeria nodorum SN15]
  misc_feature (3)..(997): NCBI GI: 154314480 Blast Desc: BC1G_03949 [Botryotinia fuckeliana B05.10] gi|150848571|gb|EDN23764.1| BC1G_03949 [Botryotinia fuckeliana B05.10]
  misc_feature (498)..(995): NCBI GI: 256724673 Blast Desc: NECHADRAFT_48219 [Nectria haematococca mpVI 77-13-4]
  misc_feature (501)..(997): NCBI GI: 261361532 Blast Desc: conserved [Verticillium albo-atrum VaMs.102]
MALSGGSVFSETLQEITNAKLEELSKRRSEFENAKAQILADLDNEKVPLERLRILSRGVKECYSMKTTETGEILTGHSRTPELELELKHLDSFLAQSKYDPSVSSHTMVNWEESLLRHLGTQSSKFQYASLYAQLVTEWLSTEKAAADPGEDIAMSEGFEDVGDSMKKSYRAQWEKVVFESADVNDTDLKTYLARLFGLGHAEKSAKVKALDKLREEVKAFEISMAMPNQFNASTLGWVIRGLLASDLLTDDKREVLRDFEGNQTILNEVSDVLNMRLAALSNWSWGESVSLEQRRKITGIYNVLMHEDVLQAIFLHYIGVKWSVFLKRAFRNFRKFAGAWNMTSRSIPKIDQKRREYYLDSFKRNGSVQSARNKLYRQHYFVKALWANETQQSAALEGEEEAQPHQLQDFQMQLMLLEQQNKKRLMMARQEPHYARAMPMQQAQGAPMPAPAPPPPGRGQGRGGGAMRHRKIVQEKPGDSSGDESDADSEANANEVRRPMEDKQRLIRLVSTEIAINTKLHGEITVLHAAFEGWLSLLPHEAILVVIKLLGVSSYWLDFFTKFLKAPLKFLDDTPSTAPRVRERGTPASHVLSEVFGESILFCLDFAVNQATNGHNIHRMHDDFWFWSRDHEVVKTMWKAVEDFTNATRTYISTAKSGTVRISSDPSTTLEIDEKLPIGDIRFGFLKLSAQTGNFEIDQAVVDKHIIDLRRQLADKRKSVISFIQTWNAIAATFFTSNFGKPANCFGKSHVDQMLATHQRIQAEVFSSSSSPLLEGEVAPSKPITSVVGYLKHLLRSRFGVTDIPDAYLFFPVELGGLDLVSPFISILPLRDSVLADPSKELDKFLDLERDSYAEAKRAFERGLQSHTYADTWAPEKPEDRENFFSFAEFAKYREDIGYEFSGNLKEVFEKLLEVPPTHSGGIENPSTKLNSALQSVGNGGKIGNWWGMEPYWRWVAQMYGPEAMDRFGGLNIVEPGLLPMGMVSIFREKRVRWEG

SEQ ID NO: 9728 - DNA, 3948 bp, Muscodor strobelii
  misc_feature: SGI EST ID NO. CUFF.22985.0
  misc_feature: Variant of the nucleotide sequence at SEQ ID NO 9726
tactacgccgcccaactgcgctgagttggaggcaaacaggagcctggtggccgcgatgtggggtttccgccttaggtcgctcggtgtgcgcacctgttgtaggttggcctgaggccactaaccttcgtcctgtctgccttgtcttccgtctataaaagggtcgcccatcccccctcctcgaaatccaatttcttgatcagagatctaagacaatcaaacctcgctcagccagttgctattcatgtctagatgatttgtaggattaccaccaacgttctatcgctgtatggtgtagccgggctatcgatgtctattgcttagcttagctgccataaccccttattctacccagtcacgacattgatagtcaagccactcattaggatctcgatatcccggtcctcttctattcattttctctccgtcagttgatcatggctttatcaggcggcagcgtcttctccgagacgcttcaggagatcactaatgccaaactcgaggagctctcgaaacgaaggtccgagttcgaaaacgccaaagcacagattctagcagatcttgacaatgaaaaggtaccactcgagcgtctacggattttgagtcgaggtgtgaaagaatgctactcaatgaagacaacagagaccggcgagatacttactggccactccagaacgccagagttagagctggaactaaagcacctggatagcttcttggcacaatcgaaatatgacccatctgtctcaagtcacacaatggtcaattgggaggagtcattactacgacatctcggcacgcagtcgtccaaatttcagtacgcatcgctgtatgctcagctagtcactgaatggctgtcgacagagaaagccgcagccgaccctggtgaggatatcgccatgtccgagggcttcgaggatgtcggagactctatgaagaagagttaccgtgctcaatgggaaaaagttgtgtttgaatctgcagacgtgaacgacactgaccttaagacctatctggctcgtctcttcggtttgggacatgccgaaaagtctgctaaggtcaaggctctggacaagctacgtgaggaagtcaaagccttcgaaatctccatggctatgcctaaccaattcaacgcaagcactctcggctgggtgattaggggactgttggcttcagatctattgactgacgacaaaagagaggtactacgggattttgagggcaatcagaccatattgaatgaagtgtccgacgtcttgaacatgcgccttgcggccctaagcaattggtcttggggcgagagcgtatctctcgagcaacgacgcaaaatcacaggcatctacaacgtgctcatgcatgaagatgttctgcaggctatctttcttcattacattggtgtgaagtggtctgtgtttctcaagcgcgcgttccgcaacttccgcaagtttgccggtgcttggaacatgacgagcaggtcgattcccaagatcgatcagaagcgtcgggaatattacctggactcgttcaagcgcaatggctcggtccagtctgcaaggaataagctctaccgccagcattacttcgtcaaggcgctttgggccaatgagactcaacagagcgctgcgttggagggtgaggaggaggcccaaccccatcaattgcaggacttccaaatgcagcttatgcttttggaacaacagaataaaaagcgattgatgatggcgcgacaggaaccacattatgcccgggcgatgcccatgcagcaggcgcagggagctccgatgcctgcgccggcacctccaccaccaggcaggggccagggtaggggcggcggcgctatgagacatcggaaaatagtgcaggagaaacctggtgattccagtggcgatgaatcggatgccgattcagaagctaatgcaaatgaagttcgccgaccgatggaggataagcagcggttaattcgtctcgtgtcgacagaaattgccattaacaccaaattgcacggcgagatcactgttctccacgcagcattcgagggctggctctctcttcttccacatgaagcaattctggtcgttatcaaacttctgggtgtatcctcttattggctagatttcttcaccaaattcctcaaagcaccgcttaagttccttgacgataccccgtctacggcaccccgagtgcgagaacgaggcacgcccgcatctcacgtcttgagcgaggtcttcggcgaatcaatactattctgtctcgacttcgctgttaatcaagccactaacgggcacaacatccatcgcatgcacgatgatttttggttctggtcacgggaccatgaggtcgtcaagacgatgtggaaggccgtcgaggactttacaaatgctacacgcacttacatctcaacggccaagtccggcactgtgcgtatttcgagcgatccatcgacgacactcgagatcgatgagaagctgcctataggcgacatccgcttcgggttcttgaagctctccgcacaaactgggaatttcgagatcgatcaagcagtggtcgataagcacatcatcgaccttcgacgtcagctagccgacaagcgcaagagcgttatatctttcatccaaacctggaatgcgatcgccgccacattcttcacatctaacttcggcaaacccgcaaactgctttgggaaatcacatgtcgaccaaatgctagcaactcaccaacgaatccaggcggaggtattttcatcgtcttcatctcccctcctcgagggtgaagttgcgcctagcaaaccaatcacgagtgttgtggggtatctcaagcatcttctccgcagccgctttggtgtaaccgacatccccgatgcctatctattttttcctgtcgagttaggaggtctagacttagtatccccttttatctcaatcctccctctgcgtgactccgtgcttgccgacccctcaaaagagctcgacaaattcctcgacttagaacgagacagttacgcagaagctaaacgcgccttcgagcgtggactacagtctcacacatacgccgatacttgggctcctgagaaacctgaagaccgagaaaacttcttctccttcgcggaattcgccaaatatcgcgaggacatcgggtatgagttctccggcaacctcaaggaagtattcgagaaattactcgaagtcccacccacccacagcggtggcatagagaacccgagcacgaagttgaacagtgcactgcaaagtgtggggaatggggggaagatcggcaattggtgggggatggaaccttattggagatgggttgcgcagatgtatggtcccgaggctatggataggtttggtggattgaatattgttgagcctggattattgcctatggggatggttagtattttcagggagaaaagggttcggtgggaaggttaaatgagaaggcttccaggggcagaggggagttgagcacaaggcgtgaggtagtctgtgactgcaaactgtgcaagtgtgtgtactacgattgtaagtccgtgatgagttatagttatttcgcgcatgttgattttatgaggtactgcaacgtgggcactgttgggttacgggacggcccgctggattttcccgtcttagagatttggcgacccctggttttgggcccggtattggaatgtgcgagtatctctggctgcgattgcgtgacctggggttctgatcaggcaatatgaccgctactttagaatgaatccgcgtttgggaaatcatgtcatatctctacagttcatgtccaaatgctccaatactaggttcaagactcctatcgaataatagaataggtgagacggggttgcacggctgcgttttgtcagtacgtaacaatattgccgtcgagcatctaattgtcaatgattcatcgtcgctcccaatggcacacaaaaatgggaattgatcagct

SEQ ID NO: 9729 - DNA, 471 bp, Muscodor strobelii
  misc_feature: SGI cDNA ID NO. 563055
  misc_feature: Elevated expression when VOC is produced
  misc_feature: Encodes the peptide sequence at SEQ ID NO 9730
atgggagtcacttgtaggttacagtccaagcccactctcgagggagttgaatacaagtccgccgtgacacatcccaaaataccctacacgatctatgtgcacgacacgtacctgctcctcgtgccccgcgacgtagcccaaaaacaccgggcgtttccccaattccccactcccgacacggccaccagacgcttcacgctacaactcaacgaccacactctgagcaattacaaagacttgtgtggaaagacagcatctttcgaggctcaacatgtggatttcggttatgaggaggatgagggcgtggtggtcgctgccttgcttccacggagtgggatgattccgtactgggcgttccgcgacatgtttgcagacaactcggcagtctttaagggtcatttcaccgacgagtcgcccgatcctcaggagggatataagatgatgatgtgggatttacaagcttgtgagtag

SEQ ID NO: 9730 - protein, 156 aa, Muscodor strobelii
  misc_feature: SGI Peptide ID NO. 563055
  misc_feature (12)..(152): NCBI GI: 242812790 Blast Desc: TSTA_100370 [Talaromyces stipitatus ATCC 10500] gi|218714369|gb|EED13792.1| TSTA_100370 [Talaromyces stipitatus ATCC 10500]
  misc_feature: Useful for introducing or modulating the production of volatile compounds
MGVTCRLQSKPTLEGVEYKSAVTHPKIPYTIYVHDTYLLLVPRDVAQKHRAFPQFPTPDTATRRFTLQLNDHTLSNYKDLCGKTASFEAQHVDFGYEEDEGVVVAALLPRSGMIPYWAFRDMFADNSAVFKGHFTDESPDPQEGYKMMMWDLQACE

SEQ ID NO: 9731 - DNA, 1017 bp, Muscodor strobelii
  misc_feature: SGI EST ID NO. CUFF.22989.0
  misc_feature: Variant of the nucleotide sequence at SEQ ID NO 9729
cgcaagacaccaagcatttgggctgaccgaatcatgagcagatgtttctctattgccccatactcttatatacggtagcaacctatcaatggaatccataggtatactcaccgcccatttacgcaggatggcttttatgtgtttcgcaacaaggaattaacctctgccaatggttccatttgaagagcggtaggaccacgtgaataagtttcgatgtcattcgcttttggattccccaacccaagtatgtgagttggttttcaagaagaactgaacttcagtctgaattctgctaccccatcttctactctatacttggacaagtagctcggagaccaaattagtgttacaaatataagtgatcgaagcatttattatcgcgatgggagtcactttcgagggagttgaatacaagtccgccgtgacacatcccaaaataccctacacgatctatgtgcacgacacgtacctgctcctcgtgccccgcgacgtagcccaaaaacaccgggcgtttccccaattccccactcccgacacggccaccagacgcttcacgctacaactcaacgaccacactctgagcaattacaaagacttgtgtggaaagacagcatctttcgaggctcaacatgtggatttcggttatgaggaggatgagggcgtggtggtcgctgccttgcttccacggagtgggatgattccgtactgggcgttccgcgacatgtttgcagacaactcggcagtctttaagggtcatttcaccgacgagtcgcccgatcctcaggagggatataagatgatgatgtgggatttacaagcttgtgagtagctgatctcgtgcaggggagcaaatgaactgagggcgatatgatgttgagcggctccaggtcaattgttaatcgtcacaaatgatacgggatatgggaatgtgggaggatgtcttgaatacaactaagtcttcgggtcgttgtggattcgaaatatcatggaacgacaagtcatagtaatgaaattaag

SEQ ID NO: 9732 - DNA, 936 bp, Muscodor strobelii
  misc_feature: SGI cDNA ID NO. 563056
  misc_feature: Encodes the peptide sequence at SEQ ID NO 9733
atgggctgctgcttctcgaggcccgaaggcccccatgcgccttaccccggagacgcctcgtcatcgccctcggctcgagctatcaacccacagcccagacactccagtgctgcagacgagcccgctggccgaccgtcaatagcccagagccaccgcttccgccagcaacagcccctctcgcagcacatcgacaagcccctgcgcttccaccactggatctccaccgaccgcgcctggacgcgcaacaacctcgaccagcagcgcatcgagttcttcgacacccgagtcaccggccgtcaggaggtctggcaggtcatcagaggcgctctcgaggtgctgtggggagcagacatccagagggcagccaacggcgagtccgcaagcgaagaggctccgtcagaactgacagacggcttggccacagcccagagtatcttgaccgcggctgaagtcaccctccctactggcgatctggcgaacggcgtctacgactcactgggcaactactatgcgcttcccgagtggattgtcagcgatcccgccaacatcgccgaagacagcggggctcggagcaagcccatcaagaaggacgacgaggcggaggatgacctgaccggtgaggacacggcggaggagctcgaccgggataaagcccagcagcggcgcgaagagaagggcaaagaggtcgtcaacgtcaagaacctaatcaaagtccgcgcaagactcagcgagaactatcctgatgtgacgatccggatagacgcagacgccaccgtgcgaagtctggcaaagaagatcgccgacgaatcatttctacctccatcaaagcggatccgcgtcgcctacatgggcaagattattaaggagaacatgaccctggagagtcagggatggcagaaggaccacatcgtcaacgcatttgtcttcgaccggtag

SEQ ID NO: 9733 - protein, 311 aa, Muscodor strobelii
  misc_feature: SGI Peptide ID NO. 563056
  misc_feature (1)..(310): NCBI GI: 46111795 Blast Desc: FG02779.1 [Gibberella zeae PH-1]
  misc_feature (1)..(311): NCBI GI: 256721976 Blast Desc: [Nectria haematococca mpVI 77-13-4]
  misc_feature (1)..(311): NCBI GI: 171690970 Blast Desc: protein product [Podospora anserina] gi|170945433|emb|CAP71545.1| protein product [Podospora anserina]
  misc_feature (1)..(270): NCBI GI: 116195714 Blast Desc: CHGG_04455 [Chaetomium globosum CBS 148.51] gi|88180368|gb|EAQ87836.1| CHGG_04455 [Chaetomium globosum CBS 148.51]
  misc_feature (59)..(308): NCBI GI: 40882218 Blast Desc: [Neurospora crassa]
  misc_feature (1)..(270): NCBI GI: 145605806 Blast Desc: MGG_06853 [Magnaporthe grisea 70-15] gi|145013589|gb|EDJ98230.1| MGG_06853 [Magnaporthe grisea 70-15]
  misc_feature (1)..(310): NCBI GI: 156053119 Blast Desc: SS1G_06727 [Sclerotinia sclerotiorum 1980] gi|154704505|gb|EDO04244.1| SS1G_06727 [Sclerotinia sclerotiorum 1980]
  misc_feature (1)..(310): NCBI GI: 154318327 Blast Desc: BC1G_03331 [Botryotinia fuckeliana B05.10] gi|150842854|gb|EDN18047.1| BC1G_03331 [Botryotinia fuckeliana B05.10]
  misc_feature (1)..(311): NCBI GI: 119184229 Blast Desc: CIMG_06938 [Coccidioides immitis RS]
  misc_feature (2)..(311): NCBI GI: 240109819 Blast Desc: CPC735_033240 [Coccidioides posadasii C735 delta SOWgp]
MGCCFSRPEGPHAPYPGDASSSPSARAINPQPRHSSAADEPAGRPSIAQSHRFRQQQPLSQHIDKPLRFHHWISTDRAWTRNNLDQQRIEFFDTRVTGRQEVWQVIRGALEVLWGADIQRAANGESASEEAPSELTDGLATAQSILTAAEVTLPTGDLANGVYDSLGNYYALPEWIVSDPANIAEDSGARSKPIKKDDEAEDDLTGEDTAEELDRDKAQQRREEKGKEVVNVKNLIKVRARLSENYPDVTIRIDADATVRSLAKKIADESFLPPSKRIRVAYMGKIIKENMTLESQGWQKDHIVNAFVFDR

SEQ ID NO: 9734 - DNA, 3706 bp, Muscodor strobelii
  misc_feature: SGI EST ID NO. CUFF.23140.0
  misc_feature: Variant of the nucleotide sequence at SEQ ID NO 9732
gcaagtggtcccctccgattgcaggtcgtgtttccttagctctgccgaccgtcaagatgagttcttgcctccgtcttcaatcgtttcaaattggtctctacgttgagagcagcaactgtcaaataggtgcgtggatctgtgtaagacacggggacaagtctagactggcgcgtgtctctgcagcttccctcagcttagcttagctactcttcagcctcacctgtgctcggtattacaaggtgagagagttgggaatcgctctggcgatcgtgggagcacgcgactcaggccttgcaggtctcaacagcggacagcaggagggtcgaatctcaaaaagatagctgctgcatcgccacatgtcgggagcggtcgctagtggcgggtggtatttgtgactattctgcgatttggtcatcactaacaattgctcgtctctgactggcctcggcatacaaacttctcacatctcacgccgcggctctcacgcactcccttgcctgctcattcctcgagcctcaaactacctatacgacacggcttccactcactcatagtacacggccgagacaatgctctgagcctgtgcggccgtgtctagctacccccaatctgcgattttgatcggccctttggcgcccgcacttgagctatgggctgctgcttctcgaggcccgaaggcccccatgcgccttaccccggagacgcctcgtcatcgccctcggctcgagctatcaacccacagcccagacactccagtgctgcagacgagcccgctggccgaccgtcaatagcccagagccaccgcttccgccagcaacagcccctctcgcagcacatcgacaagcccctgcgcttccaccactggatctccaccgaccgcgcctggacgcgcaacaacctcgaccagcagcgcatcgagttcttcgacacccgagtcaccggccgtcaggaggtctggcaggtcatcagaggcgctctcgaggtgctgtggggagcagacatccagagggcagccaacggcgagtccgcaagcgaagaggctccgtcagaactgacagacggcttggccacagcccagagtatcttgaccgcggctgaagtcaccctccctactggcgatctggcgaacggcgtctacgactcactgggcaactactatgcgcttcccgagtggattgtcagcgatcccgccaacatcgccgaagacagcggggctcggagcaagcccatcaagaaggacgacgaggcggaggatgacctgaccggtgaggacacggcggaggagctcgaccgggataaagcccagcagcggcgcgaagagaagggcaaagaggtcgtcaacgtcaagaacctaatcaaagtccgcgcaagactcagcgagaactatcctgatgtgacgatccggatagacgcagacgccaccgtgcgaagtctggcaaagaagatcgccgacgaatcatttctacctccatcaaagcggatccgcgtcgcctacatgggcaagattattaaggagaacatgaccctggagagtcagggatggcagaaggaccacatcgtcaacgcatttgtcttcgaccggtaggaacggctgtcgacctcgcgcgacgatccggacgccagctgttacgagataatggctgaattcccatgggcccaaggtgttgccgcaaattgacaccacggagattcaatctccgtatgtcgataaaaaaaatacactcgactttaagctccttctccgcggcaacttgaccaaatgatggaaccgatatccatccgcccccttcgcatcgatgtccttgtttcttcctcacgactgttctcctataattctacatttcggactgctaataatacccccgctctgattatcggttgcttttcccccaaggagcgtacgcatttgccagtggcgtttcaggttggatggtttggttaggtgtttatgagattgttggtttgcgtcatgattgtgtatattgcgccgactattcgggctgagctgattattagctagtatatagtcaacttctgtattaatgcccatattctaggcaatgatttcaatatgagtctcgttgtaatcaccttcgctattccgacgctgatgggcattgcccgagctcaacgagttgacaacgaacatcaaagtgcagcaaccttccaagctcaagcgaaacaatagactagtgctgctgtcgccttgaataccggaccatatatcaaaatgaacaggcttgagagctacgtagcctcattcttcaagtgcatcagcgagcgtagcgtggaggaatgttgttagggtgggcttaatcatcatgcaagaccatgtacgactatgaaagttaccctaatcaagtgtatcccctaggcttgtaattgcctcattcgaggcgatgtgatgcgcatacaagttgaaatgcattgagtaaactagtgtggaaagtctttgcattattcaagtcgatgcagcatcgagctggtgtgacttttagcttgtaatgctagttctcgatcatcgtactaagacctccctcaaggttcattcctctcatctgaatgcatgcatagcacgtgagcaaataccactgctacttcttcgaatcatcatgtaaagcttcgtcagtgatcaggggcgtatgaagctagatgatatgctgtagtcccttgaagtctgttatgtcgtcgtcgttcagccctatcacgagtacccccgatcaacctcctggcgctccttcccccacagcgtattgcaggctcgtattcaccaaagatatccccgacagttctcgctcccgcaaagacatttcgtcatatccttctgtttctcaggatccaatgcatccatctccgagtcatccaccccatccacataatcaaacgtgagttcttcacctcggggtatatcgcggatagcgaagaaagcaagatcatgacagtgtttctccgcatggtcaccgacgcgcgcaaagatgcgtaaactggggtcgcaagagtgattaataaagcggctcggtccagacatgaactcgccatctacctcgagcgggggaccgcgaagtcgctcgtcgtaagattcgggatcggagaacttatcgagggcgaagaggtagacgtctttcttctgcgtgatgtgcgattcattgcggcgacggttggcttcctctgctgtgatgatctccccgatgtacgtatcaacgaactgtcccttcttgatgtctacgggactccgaacaccccatcctctattccccgtgtagaatatctgaagcggaatctgccgacctctctccacgacacggttggggcaggtggggggacatttgcactccttgtgacactcgtagatcgggttccggctcgtcaagatcttcgagcgcaagtgtcccgctcttgctccgtgagtgtggtaagcatagaccttctttctggcttgaaaatcaacctcgtagtcctcgtcatcgtcggaactgtcatcctccacatcctggaggcaggtgcagtcattatactggcagttatcaccgttcttgcaatcgcagcccgacagaaactctttgttagttggcttcacgtccgaaccgcggattgaagtctccctgaattgaaagctgggttgtagtatagagttgtgggtagggtccgtcacgatagagatggggtatttttcgtgcgtcttaaaggcacggatttggcaccaatg

SEQ ID NO: 9735 - DNA, 1017 bp, Muscodor strobelii
  misc_feature: SGI cDNA ID NO. 563057
  misc_feature: Encodes the peptide sequence at SEQ ID NO 9736
atggaggaaaccatgcgcgcccacttctggaatgggtcatcaaatagtagcggtgaaccacacgaccaaaagaactgtcattggtgccaaatccgtgcctttaagacgcacgaaaaataccccatctctatcgtgacggaccctacccacaactctatactacaacccagctttcaattcagggagacttcaatccgcggttcggacgtgaagccaactaacaaagagtttctgtcgggctgcgattgcaagaacggtgataactgccagtataatgactgcacctgcctccaggatgtggaggatgacagttccgacgatgacgaggactacgaggttgattttcaagccagaaagaaggtctatgcttaccacactcacggagcaagagcgggacacttgcgctcgaagatcttgacgagccggaacccgatctacgagtgtcacaaggagtgcaaatgtccccccacctgccccaaccgtgtcgtggagagaggtcggcagattccgcttcagatattctacacggggaatagaggatggggtgttcggagtcccgtagacatcaagaagggacagttcgttgatacgtacatcggggagatcatcacagcagaggaagccaaccgtcgccgcaatgaatcgcacatcacgcagaagaaagacgtctacctcttcgccctcgataagttctccgatcccgaatcttacgacgagcgacttcgcggtcccccgctcgaggtagatggcgagttcatgtctggaccgagccgctttattaatcactcttgcgaccccagtttacgcatctttgcgcgcgtcggtgaccatgcggagaaacactgtcatgatcttgctttcttcgctatccgcgatataccccgaggtgaagaactcacgtttgattatgtggatggggtggatgactcggagatggatgcattggatcctgagaaacagaaggatatgacgaaatgtctttgcgggagcgagaactgtcggggatatctttggtga

SEQ ID NO: 9736 - protein, 338 aa, Muscodor strobelii
  misc_feature: SGI Peptide ID NO. 563057
  misc_feature (32)..(161): Pfam Id: PF05033 Pfam Desc: Pre-SET motif
  misc_feature (163)..(311): Pfam Id: PF00856 Pfam Desc: SET domain
  misc_feature (69)..(161): Pfam Id: PF05033 Pfam Desc: Pre-SET motif
  misc_feature (1)..(338): NCBI GI: 116195712 Blast Desc: CHGG_04454 [Chaetomium globosum CBS 148.51] gi|88180367|gb|EAQ87835.1| CHGG_04454 [Chaetomium globosum CBS 148.51]
  misc_feature (1)..(338): NCBI GI: 171690968 Blast Desc: protein product [Podospora anserina] gi|170945432|emb|CAP71544.1| protein product [Podospora anserina]
  misc_feature (1)..(338): NCBI GI: 164429447 Blast Desc: NCU04402 [Neurospora crassa OR74A] gi|166203479|sp|Q8X225.2|DIM5_NEUCR RecName: Full=Histone-lysine N-methyltransferase, H3 lysine-9 specific dim-5; AltName: H3-K9
  misc_feature (1)..(338): NCBI GI: 256722007 Blast Desc: SET domain protein [Nectria haematococca mpVI 77-13-4]
  misc_feature (1)..(338): NCBI GI: 17063801 Blast Desc: AF419248_1 histone H3 methyltransferase DIM-5 [Neurospora crassa] gi|40882219|emb|CAF06044.1| histone H3 methyltransferase DIM-5 [Neurospora crassa]
  misc_feature (1)..(338): NCBI GI: 46111793 Blast Desc: FG02778.1 [Gibberella zeae PH-1]
  misc_feature (31)..(338): NCBI GI: 24987775 Blast Desc: FG02778.1 [Gibberella zeae PH-1]
  misc_feature (1)..(338): NCBI GI: 39977935 Blast Desc: MGG_06852 [Magnaporthe grisea 70-15] gi|145013590|gb|EDJ98231.1| MGG_06852 [Magnaporthe grisea 70-15]
  misc_feature (1)..(338): NCBI GI: 156062868 Blast Desc: SS1G_01550 [Sclerotinia sclerotiorum 1980] gi|154696886|gb|EDN96624.1| SS1G_01550 [Sclerotinia sclerotiorum 1980]
  misc_feature (1)..(338): NCBI GI: 154299998 Blast Desc: BC1G_11188 [Botryotinia fuckeliana B05.10] gi|150856801|gb|EDN31993.1| BC1G_11188 [Botryotinia fuckeliana B05.10]
  misc_feature (1)..(338): SWISSPROT Homolog: EC 2.1.1.43 Histone-lysine N-methyltransferase
MEETMRAHFWNGSSNSSGEPHDQKNCHWCQIRAFKTHEKYPISIVTDPTHNSILQPSFQFRETSIRGSDVKPTNKEFLSGCDCKNGDNCQYNDCTCLQDVEDDSSDDDEDYEVDFQARKKVYAYHTHGARAGHLRSKILTSRNPIYECHKECKCPPTCPNRVVERGRQIPLQIFYTGNRGWGVRSPVDIKKGQFVDTYIGEIITAEEANRRRNESHITQKKDVYLFALDKFSDPESYDERLRGPPLEVDGEFMSGPSRFINHSCDPSLRIFARVGDHAEKHCHDLAFFAIRDIPRGEELTFDYVDGVDDSEMDALDPEKQKDMTKCLCGSENCRGYLW

SEQ ID NO: 9737 - DNA, 2993 bp, Muscodor strobelii
  misc_feature: SGI EST ID NO. CUFF.23141.2
  misc_feature: Variant of the nucleotide sequence at SEQ ID NO 9735
gtggtatctagcgacagcattacatgcctattgtagtattggaacgcgctcaatctcggtctgcgttttttcacgaaatggccttcttgtacggcttcctctaggaggtaatgcggtatgagctcttcaatatgatctaaagatgtaaagggcgtgcgtgtcctaactttgctggcaagtgaaccggcaattgattaggaaacatcattctcttatcaatctatttttagaagcgtgatcaacgtttatgaaagcttccacgatcagttgtctcgctctctcgtgagcgcactggaatgagaccccaataggctgtgaagcccccaagatgaattaccagccacaccatagctagcctacatgctagcccgcgcctgcccttgcatacctacccaaaggaaaccgtacctacctatattgtgagtctcgaaatgggcaaatgcgtgtaaacatgtatattttagaatcggggcaattaacgcgtctaatgtccacccacgcgacgacaatatgaaagcactacactctctcatataacgatctttgacgacaagaaccatctcatcagtagttatggagctgctccgcgactctgcaacaaccccacttcctcacctgctctcatgacatccgtccacttctgcattgttgcgtcaactgaaatatcaagatggaggaaaccatgcgcgcccacttctggaatgggtcatcaaatagtagcggtgaaccacacgaccaaaagaactgtcattggtgccaaatccgtgcctttaagacgcacgaaaaataccccatctctatcgtgacggaccctacccacaactctatactacaacccagctttcaattcagggagacttcaatccgcggttcggacgtgaagccaactaacaaagagtttctgtcgggctgcgattgcaagaacggtgataactgccagtataatgactgcacctgcctccaggatgtggaggatgacagttccgacgatgacgaggactacgaggttgattttcaagccagaaagaaggtctatgcttaccacactcacggagcaagagcgggacacttgcgctcgaagatcttgacgagccggaacccgatctacgagtgtcacaaggagtgcaaatgtccccccacctgccccaaccgtgtcgtggagagaggtcggcagattccgcttcagatattctacacggggaatagaggatggggtgttcggagtcccgtagacatcaagaagggacagttcgttgatacgtacatcggggagatcatcacagcagaggaagccaaccgtcgccgcaatgaatcgcacatcacgcagaagaaagacgtctacctcttcgccctcgataagttctccgatcccgaatcttacgacgagcgacttcgcggtcccccgctcgaggtagatggcgagttcatgtctggaccgagccgctttattaatcactcttgcgaccccagtttacgcatctttgcgcgcgtcggtgaccatgcggagaaacactgtcatgatcttgctttcttcgctatccgcgatataccccgaggtgaagaactcacgtttgattatgtggatggggtggatgactcggagatggatgcattggatcctgagaaacagaaggatatgacgaaatgtctttgcgggagcgagaactgtcggggatatctttggtgaatacgagcctgcaatacgctgtgggggaaggagcgccaggaggttgatcgggggtactcgtgatagggctgaacgacgacgacataacagacttcaagggactacagcatatcatctagcttcatacgcccctgatcactgacgaagctttacatgatgattcgaagaagtagcagtggtatttgctcacgtgctatgcatgcattcagatgagaggaatgaaccttgagggaggtcttagtacgatgatcgagaactagcattacaagctaaaagtcacaccagctcgatgctgcatcgacttgaataatgcaaagactttccacactagtttactcaatgcatttcaacttgtatgcgcatcacatcgcctcgaatgaggcaattacaagcctaggggatacacttgattagggtaactttcatagtcgtacatggtcttgcatgatgattaagcccaccctaacaacattcctccacgctacgctcgctgatgcacttgaagaatgaggctacgtagctctcaagcctgttcattttgatatatggtccggtattcaaggcgacagcagcactagtctattgtttcgcttgagcttggaaggttgctgcactttgatgttcgttgtcaactcgttgagctcgggcaatgcccatcagcgtcggaatagcgaaggtgattacaacgagactcatattgaaatcattgcctagaatatgggcattaatacagaagttgactatatactagctaataatcagctcagcccgaatagtcggcgcaatatacacaatcatgacgcaaaccaacaatctcataaacacctaaccaaaccatccaacctgaaacgccactggcaaatgcgtacgctccttgggggaaaagcaaccgataatcagagcgggggtattattagcagtccgaaatgtagaattataggagaacagtcgtgaggaagaaacaaggacatcgatgcgaagggggcggatggatatcggttccatcatttggtcaagttgccgcggagaaggagcttaaagtcgagtgtattttttttatcgacatacggagattgaatctccgtggtgtcaatttgcggcaacaccttgggcccatgggaattcagccattatctcgtaacagctggcgtccggatcgtcgcgcgaggtcgacagccgttcctaccggtcgaagacaaatgcgttgacgatgtggtccttctgccatccctgactctccagggtcatgttctccttaataatcttgcccatgtaggcgacgcggatccgctttgatggaggtagc

SEQ ID NO: 9738 - DNA, 1131 bp, Muscodor strobelii
  misc_feature: SGI cDNA ID NO. 563058
  misc_feature: Encodes the peptide sequence at SEQ ID NO 9739
atggcgtccggtacttttgagatctacttcggctttgagcacgaggctccaatgctagctgtggacgacgtcggcaatacgagctttcaagagagagtcgccacaatggagtccttatgccatagactcaatatggtgcaagactttgaggcatatattgatacaatgagcactgataagaaatacgaaaaatggtgtgtctcgacagatagcacaattgatcctaaccgttggattgaaaggcagggaaggggaatacccattgaaatcaagtcgcccaaattgaaacttgattatgaacgatatgcgaacaaaatcgcaagttactggtgggccatcgaaccggcgcttgtaccaaatgatatcgatgcatataagatgtgttccacacatttccactttagcattagtccaatgacacttgcactgaaacaagtcctcgcctttgcattcatctattgcgagaaagacatcgatgacatgatgccggcgatgacgcatcagagcagtacacagcggcgagggggttggagtaactgtgatcaatatgcagcaagagtgcaggtcaaaccggcacctgggatacaagtcgggagagacgaggagcttcgagagccactagatgatctgcaaagaatctggaaagcgataagatcaacaagaagctacggagaattacacgaattagtgaactttgacacgagttactatagaagaactcatggtaacacacttaaaaacttcaaagtcaaccttaatggactaaagggtaaaacaatcgaatttcgtcaatggtatccagctcgatcacaggtagaaatgatggacatgatcacattcctacacgagtttctcaagtttacgatcggaattgatcctacagatctcgacagggcggccgagggagagattttatttgctgaagctctaggattcacggtaataccggaggaaagagacgtatacgagggctatgagcagtgttggggagactatgaacagcgagcgatcatgaatatgagtcctcttcgcgctcttatgcctgtgacttacgacgaaaacttttggcctagactggactatgcgaaggccaagatggaagcagaccttgcgtccctcaatgagtcatga

SEQ ID NO: 9739 - protein, 376 aa, Muscodor strobelii
  misc_feature: SGI Peptide ID NO. 563058
MASGTFEIYFGFEHEAPMLAVDDVGNTSFQERVATMESLCHRLNMVQDFEAYIDTMSTDKKYEKWCVSTDSTIDPNRWIERQGRGIPIEIKSPKLKLDYERYANKIASYWWAIEPALVPNDIDAYKMCSTHFHFSISPMTLALKQVLAFAFIYCEKDIDDMMPAMTHQSSTQRRGGWSNCDQYAARVQVKPAPGIQVGRDEELREPLDDLQRIWKAIRSTRSYGELHELVNFDTSYYRRTHGNTLKNFKVNLNGLKGKTIEFRQWYPARSQVEMMDMITFLHEFLKFTIGIDPTDLDRAAEGEILFAEALGFTVIPEERDVYEGYEQCWGDYEQRAIMNMSPLRALMPVTYDENFWPRLDYAKAKMEADLASLNES

SEQ ID NO: 9740 - DNA, 1797 bp, Muscodor strobelii
  misc_feature: SGI cDNA ID NO. 563059
  misc_feature: Encodes the peptide sequence at SEQ ID NO 9741
atgttctcgcaattgagcattgcccttttcctattgggagttcttcccacctctccctttgtgcagggtgaaggagcatgcggtgatctcagatgcgacggcttatacccactttggttgaaccaaggtgatcagcaaagcggtcacccatccacctgtgtggtcgacccaaatgacaactcgtatcttgaggttgtggtcgagatatgtccgtgcaaagctcaaactcaggttgcccaggcaaagtataccggtacaaatggatacatcactactgccaaacagatcggatccgacgtacttgccgcaagcaccgtgtacacacttacacagtcttttccgattgcatatacggcattggctcctggctctcaagtgtctgtacagccaacttattcatccaagggtaaagcatatccttaccaatcagcatggttatggtatcaatcgttccaagtaacgaagacaactgtcaaggcgacaacgaccgtgacggtacctctgacatcaactactgttacaactacgacatcgacatccacaaacaccatttccgttcctcagtccacttcttcgacagagtgtgcagcagccacatcgacagtaacggctcccacgtcaaccagcacgactacatccaccacactaccccctgctgtcaccgttactgcaactgtatcagacacgacaacgcagacaaatactattacatcaacagattatgtcgagcaatcgacgagtacggaagcctgcgtcaccgggactgcgacaatcagctctacttcgaccacagtcgaggtctctgtcatcactcccgaggctacgacttcgacaaagcacactcgcacgacacaaattgttacttcaacttcagcgacgacagtcaccttgccacagtcatctgtcactcaagattgtccgggcaaaaccgtgacgaagaagacaacgtcaaccgttctggtctcaaacaccccagcagctcgaactgttactgaaacatcctacactgtggtcgatactactctgtcatgcattccaacaggcaagagccagaagggacacaagatgctggcaagagctgcaaagcaatccccaagtcgcgcatttgcaacaccatactgcagccccccagcatctaccacaaccatcacggagggccttgagatctcttcagtcagctctactctgttcactacaaccaatactgtaacgtcaactgaaacgacatctacttctgtctactccgacccagcaacaactactgtatgctcctattcaacgcccatcacaacgtatacaccggtcaccgtctcgacagaattcgcagcttcacctacgcccaccgagtccactacttcaacagttcttatttacactacacagacctcgacggtccctgagactgtttaccccacgccccttactacgactgtatgctctgatgtcgagactaccgtcaccaccaccacaacctccaccagcactgcgtttaccactgcggcgcggcctacttcaacaaagactgtaactcacacgaagaccgcaacaacagtttctcgcaccactgttcaagtgacccccacgcccgcgacaacgacggtctgtcattacacgccgacaacgacgatcttgacttccaccgtgacgaaaacaactactgttgaaagaccaacatcaacgactactaagactatcaccatgacaaacacacaatatgcacctcaagcgactagctgtggcagtacccctgctgcgccgcctgccgtacccgggacacctaacaaccctacagcttaa

SEQ ID NO: 9741 - protein, 598 aa, Muscodor strobelii
  misc_feature: SGI Peptide ID NO. 563059
MFSQLSIALFLLGVLPTSPFVQGEGACGDLRCDGLYPLWLNQGDQQSGHPSTCVVDPNDNSYLEVVVEICPCKAQTQVAQAKYTGTNGYITTAKQIGSDVLAASTVYTLTQSFPIAYTALAPGSQVSVQPTYSSKGKAYPYQSAWLWYQSFQVTKTTVKATTTVTVPLTSTTVTTTTSTSTNTISVPQSTSSTECAAATSTVTAPTSTSTTTSTTLPPAVTVTATVSDTTTQTNTITSTDYVEQSTSTEACVTGTATISSTSTTVEVSVITPEATTSTKHTRTTQIVTSTSATTVTLPQSSVTQDCPGKTVTKKTTSTVLVSNTPAARTVTETSYTVVDTTLSCIPTGKSQKGHKMLARAAKQSPSRAFATPYCSPPASTTTITEGLEISSVSSTLFTTTNTVTSTETTSTSVYSDPATTTVCSYSTPITTYTPVTVSTEFAASPTPTESTTSTVLIYTTQTSTVPETVYPTPLTTTVCSDVETTVTTTTTSTSTAFTTAARPTSTKTVTHTKTATTVSRTTVQVTPTPATTTVCHYTPTTTILTSTVTKTTTVERPTSTTTKTITMTNTQYAPQATSCGSTPAAPPAVPGTPNNPTA

SEQ ID NO: 9742 - DNA, 735 bp, Muscodor strobelii
  misc_feature: SGI cDNA ID NO. 563060
  misc_feature: Encodes the peptide sequence at SEQ ID NO 9743
atggacaccataacctctataggctccgtcgcctctaccctgggcatacttagcagcaccggtttttttgctatgaacagcactatcaactaccttacaatgccaacattgctacttggctcaccaattaagcctagtgctaaaaaggatacccctacattcttctccaccactctcggtgaacccttacgctccagtcatccccaagccagtcgcgaggccattgtaccctccacatcaatccctgtatccagtgtgagccatctgaacaggcaatggaaggagatatactggcgtggtcatcgttacgggccagcaagcgcgatatttagcacggcttgctttcttaccgccgcctggtcatctcgcctaccggctcttgcttcgagccctgatacagtcctcgcaaggatagcgggcgtggacatcaatttaaaaatgggcctctatatcgctgcggcggccggtgctctgttcgctgcgccatacacacgagtcgttatggttccaggggccaatgacgagttacatgccagaggagaccgtgttgcaatcagaattggcttaggggatgggagcaatggaaacgagcctgtaaaagaaagcgaaggtgaatctgaggctatggataaggaaacactccaattgatcaggaaatggactggctatagtcaggttcgagcagcagcggcaggagtagcagtgattttaggcgttatagctagtcatctctga

SEQ ID NO: 9743 - protein, 244 aa, Muscodor strobelii
  misc_feature: SGI Peptide ID NO. 563060
  misc_feature (1)..(242): NCBI GI: 255942657 Blast Desc: Pc18g02540 [Penicillium chrysogenum Wisconsin 54-1255] gi|211586830|emb|CAP94478.1| Pc18g02540 [Penicillium chrysogenum Wisconsin 54-1255]
  misc_feature (91)..(226): NCBI GI: 115397717 Blast Desc: conserved [Aspergillus terreus NIH2624] gi|114192641|gb|EAU34341.1| conserved [Aspergillus terreus NIH2624]
MDTITSIGSVASTLGILSSTGFFAMNSTINYLTMPTLLLGSPIKPSAKKDTPTFFSTTLGEPLRSSHPQASREAIVPSTSIPVSSVSHLNRQWKEIYWRGHRYGPASAIFSTACFLTAAWSSRLPALASSPDTVLARIAGVDINLKMGLYIAAAAGALFAAPYTRVVMVPGANDELHARGDRVAIRIGLGDGSNGNEPVKESEGESEAMDKETLQLIRKWTGYSQVRAAAAGVAVILGVIASHL

SEQ ID NO: 9744 - DNA, 1233 bp, Muscodor strobelii
  misc_feature: SGI EST ID NO. CUFF.23009.0
  misc_feature: Variant of the nucleotide sequence at SEQ ID NO 9742
gcgcgctctcgatttagcagcatcaatgctctctaaccatagacgaaaagaaaaacgacaatatctgcacactcaattcacgagcatctttattttaaacatggacaccataacctctataggctccgtcgcctctaccctgggcatacttagcagcaccggtttttttgctatgaacagcactatcaactaccttacaatgccaacattgctacttggctcaccaattaagcctagtgctaaaaaggatacccctacattcttctccaccactctcggtgaacccttacgctccagtcatccccaagccagtcgcgaggccattgtaccctccacatcaatccctgtatccagtgtgagccatctgaacaggcaatggaaggagatatactggcgtggtcatcgttacgggccagcaagcgcgatatttagcacggcttgctttcttaccgccgcctggtcatctcgcctaccggctcttgcttcgagccctgatacagtcctcgcaaggatagcgggcgtggacatcaatttaaaaatgggcctctatatcgctgcggcggccggtgctctgttcgctgcgccatacacacgagtcgttatggttccaggggccaatgacgagttacatgccagaggagaccgtgttgcaatcagaattggcttaggggatgggagcaatggaaacgagcctgtaaaagaaagcgaaggtgaatctgaggctatggataaggaaacactccaattgatcaggaaatggactggctatagtcaggttcgagcagcagcggcaggagtagcagtgattttaggcgttatagctagtcatctctgatgagagtgggatgtcatgaaatccccgaaatacactgtgcaaaggcttgattttgattccaatccatacgatctatacagtatttcttttcttcttctttttggatagaaactggaatgaacagcaaagtttaaatggtattgatattaacgagccctaatgaccctaaaagagacgatttatcgctcgcatctaataacatatgcgttagatattgctagtcagcttggcccacgatgcatctattaatgtagtgttcaccgccaccgtagacgagattcagacggtcgccacgggtagatgccttgcttgggatcatagaaaggggtttatacgccgccgctccatttttgtgccgtcatataattctacgagttaagattgtatgtcagtatcgc

SEQ ID NO: 9745 - DNA, 834 bp, Muscodor strobelii
  misc_feature: SGI cDNA ID NO. 563061
  misc_feature: Reduced expression when VOC is produced
  misc_feature: Encodes the peptide sequence at SEQ ID NO 9746
atggcgccgtcggacacatttgggcagatcaacagggagttctggaatgagcacgcccatacaatctacaacgaagattgggtgcataaaatcaaccatcaagtgcgcaactgcattcaacaaaacgcagaatggatcaatatacgaggaaagtcgctagatactgcttctccggtcaagctgcttgactatgcctgtggctttggatcggcctcaatagcgctatcagagtccgttgatataactcgaggcatcgacatctctgagtctatggttaatggatacaacgaatatgccaagaagatgggtcggtatcccgattgtatggctgctgtccaaggtaatctacttgacgaacccagcgatcgcattattgacggcgctgagttctttgatgccgacgctattattatgaccatggcactacatcacattaagtatcctgcggctcttctagctagaatggtccagcgtctgaagactgatggcgttgttataatcgttgattggctcgaccaatcgccaacgttgactctagccggaactgacacggaactcagctcaatatctgtggccccccaatctcaagcaaaccatgatcattcccattatcactcccacggtgaacctcaccagcacgctcatacaacgatcgcgcgtgcaggattctcagagcaagacctgcgacttctattcaagctggctggatgcgaagagagctcttccggcgttcgagcatatcatgagatcagcttcatcccagaacgcagctcgggtgtcagtgggggaatgaaaagaactttgtttgttgcaaaggcccgaaaggctacatag

SEQ ID NO: 9746 - protein, 277 aa, Muscodor strobelii
  misc_feature: SGI Peptide ID NO. 563061
  misc_feature (62)..(167): Pfam Id: PF08241 Pfam Desc: Methyltransferase domain
  misc_feature (62)..(165): Pfam Id: PF08242 Pfam Desc: Methyltransferase domain
  misc_feature (9)..(275): NCBI GI: 238844558 Blast Desc: conserved [Microsporum canis CBS 113480]
  misc_feature (3)..(275): NCBI GI: 256731084 Blast Desc: NECHADRAFT_84968 [Nectria haematococca mpVI 77-13-4]
  misc_feature (7)..(276): NCBI GI: 119181583 Blast Desc: CIMG_05892 [Coccidioides immitis RS]
  misc_feature (7)..(276): NCBI GI: 240108997 Blast Desc: CPC735_025020 [Coccidioides posadasii C735 delta SOWgp]
  misc_feature (6)..(275): NCBI GI: 121700134 Blast Desc: conserved [Aspergillus clavatus NRRL 1] gi|119396474|gb|EAW06906.1| conserved [Aspergillus clavatus NRRL 1]
  misc_feature (2)..(171): NCBI GI: 239609967 Blast Desc: conserved [Ajellomyces dermatitidis ER-3]
  misc_feature (7)..(276): NCBI GI: 70992615 Blast Desc: conserved [Aspergillus fumigatus Af293] gi|66848789|gb|EAL89118.1| conserved [Aspergillus fumigatus Af293] gi|159124727|gb|EDP49845.1| conserved [Aspergillus A1163]
  misc_feature (22)..(241): NCBI GI: 46123133 Blast Desc: FG05944.1 [Gibberella zeae PH-1]
  misc_feature (2)..(171): NCBI GI: 261198715 Blast Desc: conserved [Ajellomyces dermatitidis SLH14081] gi|239594911|gb|EEQ77492.1| conserved [Ajellomyces dermatitidis SLH14081]
  misc_feature (7)..(274): NCBI GI: 119472802 Blast Desc: NFIA_058740 [Neosartorya fischeri NRRL 181] gi|119406572|gb|EAW16523.1| conserved [Neosartorya fischeri NRRL 181]
  misc_feature: Useful for introducing or modulating the production of volatile compounds
MAPSDTFGQINREFWNEHAHTIYNEDWVHKINHQVRNCIQQNAEWINIRGKSLDTASPVKLLDYACGFGSASIALSESVDITRGIDISESMVNGYNEYAKKMGRYPDCMAAVQGNLLDEPSDRIIDGAEFFDADAIIMTMALHHIKYPAALLARMVQRLKTDGVVIIVDWLDQSPTLTLAGTDTELSSISVAPQSQANHDHSHYHSHGEPHQHAHTTIARAGFSEQDLRLLFKLAGCEESSSGVRAYHEISFIPERSSGVSGGMKRTLFVAKARKAT

SEQ ID NO: 9747 - DNA, 2898 bp, Muscodor strobelii
  misc_feature: SGI EST ID NO. CUFF.23144.1
  misc_feature: Variant of the nucleotide sequence at SEQ ID NO 9745
tactacttttcattcaagataccggagtcaatccatatcctctgtttcatctcatataagactctagttccgttgtttttgagtacccttgtactttctgctccttgcctggctatcttgcccttcagtattcaacatggcgccgtcggacacatttgggcagatcaacagggagttctggaatgagcacgcccatacaatctacaacgaagattgggtgcataaaatcaaccatcaagtgcgcaactgcattcaacaaaacgcagaatggatcaatatacgaggaaagtcgctagatactgcttctccggtcaagctgcttgactatgcctgtggctttggatcggcctcaatagcgctatcagagtccgttgatataactcgaggcatcgacatctctgagtctatggttaatggatacaacgaatatgccaagaagatgggtcggtatcccgattgtatggctgctgtccaaggtaatctacttgacgaacccagcgatcgcattattgacggcgctgagttctttgatgccgacgctattattatgaccatggcactacatcacattaagtatcctgcggctcttctagctagaatggtccagcgtctgaagactgatggcgttgttataatcgttgattggctcgaccaatcgccaacgttgactctagccggaactgacacggaactcagctcaatatctgtggccccccaatctcaagcaaaccatgatcattcccattatcactcccacggtgaacctcaccagcacgctcatacaacgatcgcgcgtgcaggattctcagagcaagacctgcgacttctattcaagctggctggatgcgaagagagctcttccggcgttcgagcatatcatgagatcagcttcatcccagaacgcagctcgggtgtcagtgggggaatgaaaagaactttgtttgttgcaaaggcccgaaaggctacatagcgtctctagtgtcatgagcagagcgtgaaacacgagactcaatacccggcgtgctgggtgatacatacaaaatatgcaatgcagagagtccttgattcttctttacgagagatctcgatgttctcgggttggtgactgtatacctaggtatatagggaggaagtaagtgagttgaattacgagggtaaagaagaactgatgcactgtgctttatgcctctgggtagaggccgcgagtgaaaaagtaagtagcttggcggtaataactcgatggattgtgaccgtctgccccaacaccatttgtgttaatggaccgactagtaatgaagactatgaagaccagctctcttgctatagacaggacaacaagagaggtagtaagatgattgcaaggtcatgcgagacttagacactagaacggaggcagttaagtagattacgtctaacacatcccttaaaaaggatgttgttatacaatattaattgtcctactgctttgatttgctagcattacgtcgaatactagtcaccaaggatcgatatgctgctagatcgtcgcctctcacataatgctcaaagtcgtcttcatccgcttccatgaagtcaccatacttatgagtacatgtgccgtacgagaacgccattgtatccggctcttgtcgaagtttttccaatttccgggctttggcgaggtctgattcttctgttgctccggaccagaagtcgtgttcaaacacaggcagactatagtcgtactctacttttacatctgtcaatctctgctcatccgaatctagacgtccgaaaaactcagcccacgtttgtggattttcataattgagggactcggcgcggcaattgtgtagtatgagtgtatgcaaatacgaatttggacgtaacacgaagtcagacaactcggaactgatgaacatatttcgtagctccaggtatcgcaagtttgggaggtcttgaagtgcaaagggtaaagcgcagttgtgaaattccgcgttcttgcatccaaacggagcgtattcgtgcccggcaagcactagagagttcaaagatctcgcatgttttaggaagtagtcatgcaaacgttcttcgaattcggtatagcccgccattgtgttcgaataccatccaacgccattgtctgctgctgacatggatatctcgattttttcgaggcgttgaaggcaatcaacccagtttttagtgtaaaatgtcgaagtcggctttgcgagtgtatcttttgcaatgagagtactgaaatgcttgttttcagctacagtcgcccatgtttcggccatgagcttgcgccaatgatatctagcttccttttccaggataatgcgttcctcaagctctggaacatcaaatggatatatggaagttacctcgtccggctccaagccaacgctggattcatgttcccagtagcctccttcggttggcaagttctcgaagtcgaagttaaaaccgatctcaattgtgctggcctgggtgaatatctgacccgagagggcctggtgcaccacgtcaggtatgaatgggtgcaccgggcgcactgttctcatattgacacttccactgcggccaggtggtgatggatgggagcgatcgctttgctcatgctccatcggccagacaccgcctatgaagctcacttttcgcacaagatgtgaatattgctgcattactctctgaaaagtctcagaatcattgtttggtttgttagttatcttcaagattcgaaatacaagctgtgccaggatacggcgaagacgagaattggcacaactgagcgcaatttggtctttccggggtagcaggtcaataattcctagtagaagctccgcaggaagcgcctggagacctctagtgacgctcattgtgaatgacacaggtttgcatggggactgattgata

SEQ ID NO: 9748 - DNA, 1404 bp, Muscodor strobelii
  misc_feature: SGI cDNA ID NO. 563062
  misc_feature: Elevated expression when VOC is produced
  misc_feature: Encodes the peptide sequence at SEQ ID NO 9749
atgagcgtcactagaggtctccaggcgcttcctgcggagcttctactaggaattattgacctgctaccccggaaagaccaaattgcgctcagttgtgccaattctcgtcttcgccgtatcctggcacagcttgtatttcgaatcttgaagataactaacaaaccaaacaatgattctgagacttttcagagagtaatgcagcaatattcacatcttgtgcgaaaagtgagcttcataggcggtgtctggccgatggagcatgagcaaagcgatcgctcccatccatcaccacctggccgcagtggaagtgtcaatatgagaacagtgcgcccggtgcacccattcatacctgacgtggtgcaccaggccctctcgggtcagatattcacccaggccagcacaattgagatcggttttaacttcgacttcgagaacttgccaaccgaaggaggctactgggaacatgaatccagcgttggcttggagccggacgaggtaacttccatatatccatttgatgttccagagcttgaggaacgcattatcctggaaaaggaagctagatatcattggcgcaagctcatggccgaaacatgggcgactgtagctgaaaacaagcatttcagtactctcattgcaaaagatacactcgcaaagccgacttcgacattttacactaaaaactgggttgattgccttcaacgcctcgaaaaaatcgagatatccatgtcagcagcagacaatggcgttggatggtattcgaacacaatggcgggctataccgaattcgaagaacgtttgcatgactacttcctaaaacatgcgagatctttgaactctctagtgcttgccgggcacgaatacgctccgtttggatgcaagaacgcggaatttcacaactgcgctttaccctttgcacttcaagacctcccaaacttgcgatacctggagctacgaaatatgttcatcagttccgagttgtctgacttcgtgttacgtccaaattcgtatttgcatacactcatactacacaattgccgcgccgagtccctcaattatgaaaatccacaaacgtgggctgagtttttcggacgtctagattcggatgagcagagattgacagatgtaaaagtagagtacgactatagtctgcctgtgtttgaacacgacttctggtccggagcaacagaagaatcagacctcgccaaagcccggaaattggaaaaacttcgacaagagccggatacaatggcgttctcgtacggcacatgtactcataagtatggtgacttcatggaagcggatgaagacgactttgagcattatgtgagaggcgacgatctagcagcatatcgatccttggtgactagtattcgacgtaatgctagcaaatcaaagcagtag

SEQ ID NO: 9749 - protein, 467 aa, Muscodor strobelii
  misc_feature: SGI Peptide ID NO. 563062
  misc_feature (5)..(52): Pfam Id: PF00646 Pfam Desc: F-box domain
  misc_feature (6)..(465): NCBI GI: 46115846 Blast Desc: FG03765.1 [Gibberella zeae PH-1]
  misc_feature (3)..(463): NCBI GI: 256730173 Blast Desc: NECHADRAFT_45286 [Nectria haematococca mpVI 77-13-4]
  misc_feature (26)..(465): NCBI GI: 238506767 Blast Desc: conserved [Aspergillus flavus NRRL3357] gi|220689298|gb|EED45649.1| conserved [Aspergillus flavus NRRL3357]
  misc_feature (26)..(465): NCBI GI: 169785861 Blast Desc: [Aspergillus oryzae RIB40] gi|83776139|dbj|BAE66258.1| protein product [Aspergillus oryzae]
  misc_feature (248)..(463): NCBI GI: 238495686 Blast Desc: conserved [Aspergillus flavus NRRL3357] gi|220695729|gb|EED52072.1| conserved [Aspergillus flavus NRRL3357]
  misc_feature (248)..(463): NCBI GI: 169778375 Blast Desc: [Aspergillus oryzae RIB40] gi|83772390|dbj|BAE62520.1| protein product [Aspergillus oryzae]
  misc_feature (191)..(331): NCBI GI: 169618187 Blast Desc: SNOG_12282 [Phaeosphaeria nodorum SN15] gi|111058975|gb|EAT80095.1| SNOG_12282 [Phaeosphaeria nodorum SN15]
  misc_feature (7)..(458): NCBI GI: 145611648 Blast Desc: [Magnaporthe grisea 70-15] gi|145018906|gb|EDK03185.1| [Magnaporthe grisea 70-15]
  misc_feature (184)..(461): NCBI GI: 239610623 Blast Desc: [Ajellomyces dermatitidis ER-3]
  misc_feature (184)..(461): NCBI GI: 261195224 Blast Desc: [Ajellomyces dermatitidis SLH14081] gi|239587888|gb|EEQ70531.1| [Ajellomyces dermatitidis SLH14081]
  misc_feature: Useful for introducing or modulating the production of volatile compounds
MSVTRGLQALPAELLLGIIDLLPRKDQIALSCANSRLRRILAQLVFRILKITNKPNNDSETFQRVMQQYSHLVRKVSFIGGVWPMEHEQSDRSHPSPPGRSGSVNMRTVRPVHPFIPDVVHQALSGQIFTQASTIEIGFNFDFENLPTEGGYWEHESSVGLEPDEVTSIYPFDVPELEERIILEKEARYHWRKLMAETWATVAENKHFSTLIAKDTLAKPTSTFYTKNWVDCLQRLEKIEISMSAADNGVGWYSNTMAGYTEFEERLHDYFLKHARSLNSLVLAGHEYAPFGCKNAEFHNCALPFALQDLPNLRYLELRNMFISSELSDFVLRPNSYLHTLILHNCRAESLNYENPQTWAEFFGRLDSDEQRLTDVKVEYDYSLPVFEHDFWSGATEESDLAKARKLEKLRQEPDTMAFSYGTCTHKYGDFMEADEDDFEHYVRGDDLAAYRSLVTSIRRNASKSKQ

SEQ ID NO: 9750 - DNA, 2961 bp, Muscodor strobelii
  misc_feature: SGI EST ID NO. CUFF.23144.0
  misc_feature: Variant of the nucleotide sequence at SEQ ID NO 9748
tatcaatcagtccccatgcaaacctgtgtcattcacaatgagcgtcactagaggtctccaggcgcttcctgcggagcttctactaggaattattgacctgctaccccggaaagaccaaattgcgctcagttgtgccaattctcgtcttcgccgtatcctggcacagcttgtatttcgaatcttgaagataactaacaaaccaaacaatgattctgagacttttcagagagtaatgcagcaatattcacatcttgtgcgaaaagtgagcttcataggcggtgtctggccgatggagcatgagcaaagcgatcgctcccatccatcaccacctggccgcagtggaagtgtcaatatgagaacagtgcgcccggtgcacccattcatacctgacgtggtgcaccaggccctctcgggtcagatattcacccaggccagcacaattgagatcggttttaacttcgacttcgagaacttgccaaccgaaggaggctactgggaacatgaatccagcgttggcttggagccggacgaggtaacttccatatatccatttgatgttccagagcttgaggaacgcattatcctggaaaaggaagctagatatcattggcgcaagctcatggccgaaacatgggcgactgtagctgaaaacaagcatttcagtactctcattgcaaaagatacactcgcaaagccgacttcgacattttacactaaaaactgggttgattgccttcaacgcctcgaaaaaatcgagatatccatgtcagcagcagacaatggcgttggatggtattcgaacacaatggcgggctataccgaattcgaagaacgtttgcatgactacttcctaaaacatgcgagatctttgaactctctagtgcttgccgggcacgaatacgctccgtttggatgcaagaacgcggaatttcacaactgcgctttaccctttgcacttcaagacctcccaaacttgcgatacctggagctacgaaatatgttcatcagttccgagttgtctgacttcgtgttacgtccaaattcgtatttgcatacactcatactacacaattgccgcgccgagtccctcaattatgaaaatccacaaacgtgggctgagtttttcggacgtctagattcggatgagcagagattgacagatgtaaaagtagagtacgactatagtctgcctgtgtttgaacacgacttctggtccggagcaacagaagaatcagacctcgccaaagcccggaaattggaaaaacttcgacaagagccggatacaatggcgttctcgtacggcacatgtactcataagtatggtgacttcatggaagcggatgaagacgactttgagcattatgtgagaggcgacgatctagcagcatatcgatccttggtgactagtattcgacgtaatgctagcaaatcaaagcagtaggacaattaatattgtataacaacatcctttttaagggatgtgttagacgtaatctacttaactgcctccgttctagtgtctaagtctcgcatgaccttgcaatcatcttactacctctcttgttgtcctgtctatagcaagagagctggtcttcatagtcttcattactagtcggtccattaacacaaatggtgttggggcagacggtcacaatccatcgagttattaccgccaagctacttactttttcactcgcggcctctacccagaggcataaagcacagtgcatcagttcttctttaccctcgtaattcaactcacttacttcctccctatatacctaggtatacagtcaccaacccgagaacatcgagatctctcgtaaagaagaatcaaggactctctgcattgcatattttgtatgtatcacccagcacgccgggtattgagtctcgtgtttcacgctctgctcatgacactagagacgctatgtagcctttcgggcctttgcaacaaacaaagttcttttcattcccccactgacacccgagctgcgttctgggatgaagctgatctcatgatatgctcgaacgccggaagagctctcttcgcatccagccagcttgaatagaagtcgcaggtcttgctctgagaatcctgcacgcgcgatcgttgtatgagcgtgctggtgaggttcaccgtgggagtgataatgggaatgatcatggtttgcttgagattggggggccacagatattgagctgagttccgtgtcagttccggctagagtcaacgttggcgattggtcgagccaatcaacgattataacaacgccatcagtcttcagacgctggaccattctagctagaagagccgcaggatacttaatgtgatgtagtgccatggtcataataatagcgtcggcatcaaagaactcagcgccgtcaataatgcgatcgctgggttcgtcaagtagattaccttggacagcagccatacaatcgggataccgacccatcttcttggcatattcgttgtatccattaaccatagactcagagatgtcgatgcctcgagttatatcaacggactctgatagcgctattgaggccgatccaaagccacaggcatagtcaagcagcttgaccggagaagcagtatctagcgactttcctcgtatattgatccattctgcgttttgttgaatgcagttgcgcacttgatggttgattttatgcacccaatcttcgttgtagattgtatgggcgtgctcactaccgaatggatcaatatgaattagctgtacttttttcttttaccgaagttgaaccactcacttccagaactccctgttgatctgcccaaatgtgtccgacggcgccatgttgaatactgaagggcaagatagccaggcaaggagcagaaagtacaagggtactcaaaaacaacggaactagagtcttatatgagatgaaacagaggatatggattgactccggtatcttgaatgaaaagtagta

SEQ ID NO: 9751 - DNA, 1020 bp, Muscodor strobelii
  misc_feature: SGI cDNA ID NO. 563063
  misc_feature: Elevated expression when VOC is produced
  misc_feature: Encodes the peptide sequence at SEQ ID NO 9752
atggacccagtgactgccgttggtgttgcatcagcagcaatccaattcgcagatttcagcatcaaagcattctcactttatcaggaactcaaagacagcaaagatgcagcaacagaacaataccaacgcctcgaacaacagatcaaagcggctcaaaaggtcagagaagaccccaggctggctgtgaacggcaatgtggccagttctgatccaatagacgaggccactcgtagatgtactcagactggctcccaactgctggatgccttgcagtacattcgaggatctggcgaggatatcaacgctctcagagcaacgtttcgtgtattaagaaaacacaaagctatcacaaaactccacagctccctggaagcagacgaaaaggcattggcactgcttctcaacgaaagaatctcgcgatctattgaccgtcttgaccgtaacttgatccgagaacttaccggtaacaatcatatcagtcaagaagtactgaagctattggccaaacaaattcaagtactggaagatcaggaaaaggctcgtaaacaggaccatgaagcattgtccggaaaggtggatgccacccagaaacttgtacaatttggctacgatgaagcagaacgcttacagaagcacgaaaagtttctcgaaactttgttttttccagaaatgcagcagcgccagagtgagatcaaacatccggcaccgcaaactttcgaatggctgttccagaatgaacagcagattcagaagtctcgacagggcaacttgccgaagtggtcaaattttcgaaactggctgcgtgagggtaacggcatttattggatttctggaaaagccggctccggaaagtcgacattgatggctagtattgtcggtgacaagcgaacacttgaagaattgcgaaggtggagtcaaacacaaaaacttcaagtcctatcattttttttctggcgtgccggagcgactctccaacaaagcatactgtcctttccgaatcacgacctcatgcccgaatag

SEQ ID NO: 9752 - protein, 339 aa, Muscodor strobelii
  misc_feature: SGI Peptide ID NO. 563063
  misc_feature (1)..(326): NCBI GI: 226284602 Blast Desc: conserved [Paracoccidioides brasiliensis Pb01]
  misc_feature (1)..(326): NCBI GI: 226293863 Blast Desc: conserved [Paracoccidioides brasiliensis Pb18]
  misc_feature (1)..(326): NCBI GI: 225684243 Blast Desc: conserved [Paracoccidioides brasiliensis Pb03]
  misc_feature (1)..(331): NCBI GI: 239606312 Blast Desc: conserved [Ajellomyces dermatitidis ER-3]
  misc_feature (1)..(326): NCBI GI: 261190024 Blast Desc: conserved [Ajellomyces dermatitidis SLH14081] gi|239591250|gb|EEQ73831.1| conserved [Ajellomyces dermatitidis SLH14081]
  misc_feature (7)..(327): NCBI GI: 116206184 Blast Desc: CHGG_02385 [Chaetomium globosum CBS 148.51] gi|88182982|gb|EAQ90450.1| CHGG_02385 [Chaetomium globosum CBS 148.51]
  misc_feature (7)..(327): NCBI GI: 256730066 Blast Desc: NECHADRAFT_82694 [Nectria haematococca mpVI 77-13-4]
  misc_feature (1)..(328): NCBI GI: 46111055 Blast Desc: FG02409.1 [Gibberella zeae PH-1]
  misc_feature (2)..(331): NCBI GI: 255956529 Blast Desc: Pc21g20270 [Penicillium chrysogenum Wisconsin 54-1255] gi|211590728|emb|CAP96924.1| Pc21g20270 [Penicillium chrysogenum Wisconsin 54-1255]
  misc_feature (1)..(327): NCBI GI: 256726514 Blast Desc: NECHADRAFT_79534 [Nectria haematococca mpVI 77-13-4]
  misc_feature: Useful for introducing or modulating the production of volatile compounds
MDPVTAVGVASAAIQFADFSIKAFSLYQELKDSKDAATEQYQRLEQQIKAAQKVREDPRLAVNGNVASSDPIDEATRRCTQTGSQLLDALQYIRGSGEDINALRATFRVLRKHKAITKLHSSLEADEKALALLLNERISRSIDRLDRNLIRELTGNNHISQEVLKLLAKQIQVLEDQEKARKQDHEALSGKVDATQKLVQFGYDEAERLQKHEKFLETLFFPEMQQRQSEIKHPAPQTFEWLFQNEQQIQKSRQGNLPKWSNFRNWLREGNGIYWISGKAGSGKSTLMASIVGDKRTLEELRRWSQTQKLQVLSFFFWRAGATLQQSILSFPNHDLMPE

SEQ ID NO: 9753 - DNA, 3868 bp, Muscodor strobelii
  misc_feature: SGI EST ID NO. CUFF.23020.0
  misc_feature: Variant of the nucleotide sequence at SEQ ID NO 9751
gcaaggcgatgtctataattactcatatgatgggctcaggtttagtcgctgtcatttgttggtgattcgctatgttatgcatgttggtcgctgttgcagacttggcaatgcacgtggttcacgagggaggaactcacatccccactacgaagttcaccgtagttcacctccgctcgaagatcttgcaataactttcaaagcagcgagtagaacacacggtacaatggacccagtgactgccgttggtgttgcatcagcagcaatccaattcgcagatttcagcatcaaagcattctcactttatcaggaactcaaagacagcaaagatgcagcaacagaacaataccaacgcctcgaacaacagatcaaagcggctcaaaaggtcagagaagaccccaggctggctgtgaacggcaatgtggccagttctgatccaatagacgaggccactcgtagatgtactcagactggctcccaactgctggatgccttgcagtacattcgaggatctggcgaggatatcaacgctctcagagcaacgtttcgtgtattaagaaaacacaaagctatcacaaaactccacagctccctggaagcagacgaaaaggcattggcactgcttctcaacgaaagaatctcgcgatctattgaccgtcttgaccgtaacttgatccgagaacttaccggtaacaatcatatcagtcaagaagtactgaagctattggccaaacaaattcaagtactggaagatcaggaaaaggctcgtaaacaggaccatgaagcattgtccggaaaggtggatgccacccagaaacttgtacaatttggctacgatgaagcagaacgcttacagaagcacgaaaagtttctcgaaactttgttttttccagaaatgcagcagcgccagagtgagatcaaacatccggcaccgcaaactttcgaatggctgttccagaatgaacagcagattcagaagtctcgacagggcaacttgccgaagtggtcaaattttcgaaactggctgcgtgagggtaacggcatttattggatttctggaaaagccggctccggaaagtcgacattgatggctagtattgtcggtgacaagcgaacacttgaagaattgcgaaggtggagtcaaacacaaaaacttcaagtcctatcattttttttctggcgtgccggagcgactctccaacaaagcatagtgggactgctacgttcactactctaccaactttgtgagactcgctcatccgtcacggaagctgtcctttccgaatcacgacctcatgcccgaataggctcatcttggaccgaaaagactctactccatttcatcacaaaagtgatccaagcatgcaatgatactcgtttttgcatttttgctgatggtcttgatgagtttaccggaaactatcatgatataatagattatatatctgaactaagtgaactaagtcacgtcaaattctgtgtttccagtcgacaacagtctcagtttagagaaagatttacgaaggctccgcaacttcgacttgaagatctaaaccgtcacgacatcgagcttttcgtctcacaagctctgtcaaagacagaaatggatgacaaatttcaaaaatcgttgactgagaaaatcaccgaacgctcagaaggcatgtttttgtgggcggctctcgtgaccaagtcgcttctgagcggactttcagataaagacggcccggaaatattacttcaacgcttgaagagcaagcctagagaactagggaagttatttgagcaaatgcttgagtctattcaggatgtccatctggagtcattcgctgtttacctccagctgatgaaactatggagcatgctcggccccagcgttgaaaaatatcttcatccagcggcattaatgcgtttcacgtctatcccaatcctcactacgatattcctggaaaaatctattagttcctacgaagagttctcaaaaatgtgcgaactcaatgagactagggctgttgcacgcagcgctggcctgctggaagtaaagcaagttcaagtgttcagtgattatagtgattcactagcggcgagggttaatccatccacattgaccagattcgctacgagtgagcccaagttctctaatggagtcatttgtcgccgagagtgtgcagattccgaatcacacactacaatgcttgattacgaactgaaatacgttggctggatccatcgatcggctttcgattatttttcggaccattatggcaagagcccatcgtatactagcaagcaagatgacgagacactcttgaagcgcattggtgaaagctggatcaattattttgcatcagctccatcatacggggacgaaaaatttggcagaagcacatcctggtccctttcacaactaatctcttggattgctgagtgttaccgacactatcctaatactgcttcggcactattagacaagcttatggcagtagttgtgcacttggaatgctgcgatattggacgcttattcactggtcacctactaagctttccatatgattggcttaaagaaagacgtaacggatccttgttattctggagtcgatgttcgaggcagtactcattgcataaatacataagttgctggatggatcgcttcttaccccaggatttgtcctgcgcttggatcgtccattacctatgttcgtctttggatgcaatgggcaacttgattgatgattcatttccagagtcgagccgacgtcggcgtccaagggcacattttgatcatcaaattctagataagtcggtacatcgccacaattgtgattgggaactctttcaatcggtcatgaagaacattcaagcccttatacaaagacttgaaagtttctttcccgaagataattcctctgagacatatctcagatgtggctatagcaatagtgaatttctgagaccattcatgggcatcatttcctggaagcatagagatatcactggtcctctatcacttgatctgccgctaatctgcgcacttgcctctgtcatagcagtgctcgctggggtggacgactgcctggactggacagaaagagagcaaactctcagtgactttccagaaaactggatacgtaccgtttcgaaacccatactccagctcgtcacgtctcttgacattatgactttcctaaccacacattttgaccgaatgcatgtgcacgtgcccgcagagatcatttacttcgatcattcgggcctctcgaggtcgaagtacactgaggatcttcgacggctaagccgaactgaacaggtctttaggattatttgtgttcccacgcttaaaaagaatcagataagcctggaagctttgacatcccttaatttcgagtcttgcttcgctgaattcgaatcatcccagttcatcgggattacgacaagcagagccatcattaagctactagtacatgatgacagatctggacccgtctgcgaagtggtctgtcgagagattcaattggatcgacagaatctgaatgccacgcaacagctatttgtcagagcttgtatcagagtcaccctactgagtatggaaaacaggccattatacctgaaaaaatattacattggctcacttaggaagtttctggagaccgttacggtgatcacaaattttctaaataacaattccgattgaaggactatcacctgactatcttttagcaaaaacgttatttgtacggggttgatttttagcgttaaagatgtttttaaaaattaaaaacgatttctgtacggtagaaaaaacggcaaaagaaatatcgctatattaaatgtataaaaagaatgcttattaaagactatatagcgttaattcgat

SEQ ID NO: 9754 - DNA, 1200 bp, Muscodor strobelii
  misc_feature: SGI cDNA ID NO. 563064
  misc_feature: Encodes the peptide sequence at SEQ ID NO 9755
atgtcgctgaaacgcgaaaacgacacagacctacatatcgaacccccggctaaacgtccacggcccgaggtagatctatactcccctgaagttaacacgagtagcgatgagtttggcagcgaatacagcgactacggaggattctaccccaaagatgctaagccgaccgtgccggatatggatgtggttgtaggcaatacgctacattatcagggtaccgttgatccagatcctatcagtgaaagattcggtcaggagtatcccaagaagcaattcaaggatttacaagagattactgaggagagggagagtaaagtcaagatggaagacgaagacgatgagttagagagtttgttcgtgagtaggaatgggagtcgaagcgcaacaagttcagcatcgagtcgttctgaagacggggaccgggacgcagaaggcgagccggatgaggatattccgattcatgggattgcgatggcgactacgcttcatcctatgcctgcgttagtggatgatcggatcgcggggattgctccgaatttatctcctgtgctcgtggctgatgcatttacttcgccatatcctgtgccgtatcaggttccgcagccgttgcctatacgtgctgttgcgtcggactcggcgtcgtctgtgagctctagttcgagtggagaatccgagtctgcgccgtatagaccttatcggagttcggaaacttatagggataatactatgtatgatcttgcgtcgtcggacgaggaatctgacctggcaccatcacgtgagcctcgtaggagttcggaagccgttcgggataatactggtcatggatctgcgtcttcgcgttcttcatcggaggaagggacatcgtttatagaaccatctgaaatctcgacaactctacgccaatctcacgaagaaggtgggccatcaacgcagatgcagatgcagaccgttgcgaaggttctccatttcatgacgaaggcgcagaggcatgggattaatctcgagagtgcggagacaattgctgaggtggaggagaaaacttggaagaagatacggaagacgatggctaagaaggttgaggagtatgtcgatattacgttggatgctgtgatgagtttgagtatgagggagttctgtgtcgttgctgagagggcggaggagctagtagcggagttggagagtgttggggtgactatttga

SEQ ID NO: 9755 - protein, 399 aa, Muscodor strobelii
  misc_feature: SGI Peptide ID NO. 563064
MSLKRENDTDLHIEPPAKRPRPEVDLYSPEVNTSSDEFGSEYSDYGGFYPKDAKPTVPDMDVVVGNTLHYQGTVDPDPISERFGQEYPKKQFKDLQEITEERESKVKMEDEDDELESLFVSRNGSRSATSSASSRSEDGDRDAEGEPDEDIPIHGIAMATTLHPMPALVDDRIAGIAPNLSPVLVADAFTSPYPVPYQVPQPLPIRAVASDSASSVSSSSSGESESAPYRPYRSSETYRDNTMYDLASSDEESDLAPSREPRRSSEAVRDNTGHGSASSRSSSEEGTSFIEPSEISTTLRQSHEEGGPSTQMQMQTVAKVLHFMTKAQRHGINLESAETIAEVEEKTWKKIRKTMAKKVEEYVDITLDAVMSLSMREFCVVAERAEELVAELESVGVTI

SEQ ID NO: 9756 - DNA, 908 bp, Muscodor strobelii
  misc_feature: SGI EST ID NO. CUFF.23029.0
  misc_feature: Variant of the nucleotide sequence at SEQ ID NO 9754
ggatgatcggatcgcggggattgctccgaatttatctcctgtgctcgtggctgatgcatttacttcgccatatcctgtgccgtatcaggttccgcagccgttgcctatacgtgctgttgcgtcggactcggcgtcgtctgtgagctctagttcgagtggagaatccgagtctgcgccgtatagaccttatcggagttcggaaacttatagggataatactatgtatgatcttgcgtcgtcggacgaggaatctgacctggcaccatcacgtgagcctcgtaggagttcggaagccgttcgggataatactggtcatggatctgcgtcttcgcgttcttcatcggaggaagggacatcgtttatagaaccatctgaaatctcgacaactctacgccaatctcacgaagaaggtgggccatcaacgcagatgcagatgcagaccgttgcgaaggttctccatttcatgacgaaggcgcagaggcatgggattaatctcgagagtgcggagacaattgctgaggtggaggagaaaacttggaagaagatacggaagacgatggctaagaaggttgaggagtatgtcgatattacgttggatgctgtgatgagtttgagtatgagggagttctgtgtcgttgctgagagggcggaggagctagtagcggagttggagagtgttggggtgactatttgagggtagtcttaagtgtgttgctgaatcgagcggccgtttggtcgatgtattgtgtgtgtgcgtaattgagcgtgctcagcaactctagttgttcaatcttcaatgcatctattccctcaaacgttatcatattcacctatcatattgacctatcatattcacccatcccatcctagagtcaaaaactgcctgcctgattcccttgcagtttgtg

SEQ ID NO: 9757 - DNA, 1191 bp, Muscodor strobelii
  misc_feature: SGI cDNA ID NO. 563065
  misc_feature: Encodes the peptide sequence at SEQ ID NO 9758
atgccccccaagaaggccgccgcggaggagaagatcctcttgggccgccccggtaataacttgaaagccggcatcgtgggcctggccaacgttggtaaatcgaccttgttccaggccatcaccaagtgcacgctcggtaaccccgccaacttcccgtatgccaccattgagcccgaggaatcccgtgtcatcgtgcccgacgagcgttacgaatggctgtgcgaaaagtacaatccgaagtcgcgagtgccagctcacttgactgtctacgatattgccggcctaactcgcggctcctcgaccggcgctggcttgggcaatgctttcttgtcgcacatccaggctgtcgatgcaattttccaggtcgtccgctgcttcgatgatgccgagatcattcacgtcgagggcgacgtcgatcccgtccgtgacttggatctgattggcgaagagctgcgtctcaaggacattgagttcactgagaaggcattggagaaccagaagaagaagacccgcccgggcggccacagtctcgagatgaagaaggctcgagaagacgaggctacaatagaaaaagtgctcaagtggttgcaagacggcaatgacgtccggaagggcaactggctcgtaagagaggttgaagtcatcaacagtctattcttgctatctgctaagccagttgtgtatctcgtgaatatgtcagagaatgactatgtccgcaacaaaggcaagagagagcgtatggccaaaatcatggaatggagagagaagaacgccaaaaccgacacattcctcagaatctctatcgcttttgaggagcggttgactcgattcgagaccgaggccgaagctctggaagagtgcaagaatcttggtacggaatctgcccttcccaagctcgtaacggcgatgcgaaaagcattgcaattaggcagcttttttacgaccggtaccgatgaggtccggcaatggaccataagaaacggcaccaaagctccccaagctgccggtgtcattcacaccgactttgagaagaccttcatccaggctatcgtatacaactttagtgtcttgaaggagcttggcgatgaagcggaggtcaaagcgaaggggaaagtcatgaccaagggtaaggactatgttgtcgaggatggagatatcctcttaatcaaggcgggtgctgccaagggctag

SEQ ID NO: 9758 - protein, 396 aa, Muscodor strobelii
  misc_feature: SGI Peptide ID NO. 563065
  misc_feature (309)..(392): Pfam Id: PF06071 Pfam Desc: Domain of function (DUF933)
  misc_feature (21)..(157): Pfam Id: PF01926 Pfam Desc: GTPase of function
  misc_feature (21)..(172): Pfam Id: PF01926 Pfam Desc: GTPase of function
  misc_feature (1)..(396): NCBI GI: 156052647 Blast Desc: conserved [Sclerotinia sclerotiorum 1980] gi|154704269|gb|EDO04008.1| conserved [Sclerotinia sclerotiorum 1980]
  misc_feature (1)..(396): NCBI GI: 116180782 Blast Desc: conserved [Chaetomium globosum CBS 148.51] gi|88185316|gb|EAQ92784.1| conserved [Chaetomium globosum CBS 148.51]
  misc_feature (1)..(396): NCBI GI: 115391711 Blast Desc: ATEG_04182 [Aspergillus terreus NIH2624] gi|114194284|gb|EAU35984.1| ATEG_04182 [Aspergillus terreus NIH2624]
  misc_feature (1)..(396): NCBI GI: 240111893 Blast Desc: GTP-binding family protein [Coccidioides posadasii C735 delta SOWgp]
  misc_feature (1)..(396): NCBI GI: 119173683 Blast Desc: conserved [Coccidioides immitis RS]
  misc_feature (1)..(396): NCBI GI: 256721968 Blast Desc: [Nectria haematococca mpVI 77-13-4]
  misc_feature (1)..(396): NCBI GI: 70995164 Blast Desc: GTP-binding protein YchF [Aspergillus fumigatus Af293] gi|66849982|gb|EAL90309.1| GTP-binding protein YchF [Aspergillus fumigatus Af293] gi|159131104|gb|EDP56217.1| GTP-binding protein
  misc_feature (1)..(396): NCBI GI: 145239267 Blast Desc: An08g01610 [Aspergillus niger] gi|134076786|emb|CAK39841.1| protein product [Aspergillus niger]
  misc_feature (1)..(396): NCBI GI: 119496025 Blast Desc: GTP-binding protein YchF [Neosartorya fischeri NRRL 181] gi|119412948|gb|EAW22889.1| GTP-binding protein YchF [Neosartorya fischeri NRRL 181]
  misc_feature (1)..(395): NCBI GI: 164429660 Blast Desc: NCU02044 [Neurospora crassa OR74A] gi|38566909|emb|CAE76213.1| GTP-binding protein [Neurospora crassa] gi|157073567|gb|EAA35430.2| NCU02044 [Neurospora crassa
MPPKKAAAEEKILLGRPGNNLKAGIVGLANVGKSTLFQAITKCTLGNPANFPYATIEPEESRVIVPDERYEWLCEKYNPKSRVPAHLTVYDIAGLTRGSSTGAGLGNAFLSHIQAVDAIFQVVRCFDDAEIIHVEGDVDPVRDLDLIGEELRLKDIEFTEKALENQKKKTRPGGHSLEMKKAREDEATIEKVLKWLQDGNDVRKGNWLVREVEVINSLFLLSAKPVVYLVNMSENDYVRNKGKRERMAKIMEWREKNAKTDTFLRISIAFEERLTRFETEAEALEECKNLGTESALPKLVTAMRKALQLGSFFTTGTDEVRQWTIRNGTKAPQAAGVIHTDFEKTFIQAIVYNFSVLKELGDEAEVKAKGKVMTKGKDYVVEDGDILLIKAGAAKG

SEQ ID NO: 9759 - DNA, 2411 bp, Muscodor strobelii
  misc_feature: SGI EST ID NO. CUFF.23033.0
  misc_feature: Variant of the nucleotide sequence at SEQ ID NO 9757
cagctgcccctcccaaagggccgcagtaaaaaaattccaaggccacagcactactatttctcctcacatggtcagcctttggtcacatccagaagccaaaaaacggcaagctgtaaacctgatcaagtagtaatcccccacttgttccaactctaagggctgcggctggtccacagccgatcgccttcacaacgtctccctccaccattcgacccctccctttcgtttctctcacacgcatttttcgccctgtcgcagctagctctgcttttttctcccccctcactcgagtgcctagctgcaccccgccaacaccgccctctctactcatcaccacccgcacatacgccagtcggcgcactcccaagaagatgccccccaagaaggccgccgcggaggagaagatcctcttgggccgccccggtaataacttgaaagccggcatcgtgggcctggccaacgttggtaaatcgaccttgttccaggccatcaccaagtgcacgctcggtaaccccgccaacttcccgtatgccaccattgagcccgaggaatcccgtgtcatcgtgcccgacgagcgttacgaatggctgtgcgaaaagtacaatccgaagtcgcgagtgccagctcacttgactgtctacgatattgccggcctaactcgcggctcctcgaccggcgctggcttgggcaatgctttcttgtcgcacatccaggctgtcgatgcaattttccaggtcgtccgctgcttcgatgatgccgagatcattcacgtcgagggcgacgtcgatcccgtccgtgacttggatctgattggcgaagagctgcgtctcaaggacattgagttcactgagaaggcattggagaaccagaagaagaagacccgcccgggcggccacagtctcgagatgaagaaggctcgagaagacgaggctacaatagaaaaagtgctcaagtggttgcaagacggcaatgacgtccggaagggcaactggctcgtaagagaggttgaagtcatcaacagtctattcttgctatctgctaagccagttgtgtatctcgtgaatatgtcagagaatgactatgtccgcaacaaaggcaagagagagcgtatggccaaaatcatggaatggagagagaagaacgccaaaaccgacacattcctcagaatctctatcgcttttgaggagcggttgactcgattcgagaccgaggccgaagctctggaagagtgcaagaatcttggtacggaatctgcccttcccaagctcgtaacggcgatgcgaaaagcattgcaattaggcagcttttttacgaccggtaccgatgaggtccggcaatggaccataagaaacggcaccaaagctccccaagctgccggtgtcattcacaccgactttgagaagaccttcatccaggctatcgtatacaactttagtgtcttgaaggagcttggcgatgaagcggaggtcaaagcgaaggggaaagtcatgaccaagggtaaggactatgttgtcgaggatggagatatcctcttaatcaaggcgggtgctgccaagggctagactatacgcgccttacttggccattggccagatttgacaccactactaataaaacaaaacggtggatgttccaccgatgagacccaaatcacatgttttcatctatttagttctgactattgctgagtgacaagcacatcttagcgcaaattgcgtcttgagcaaagaggtcgttaggctagaaggaaatgaatttcgtctctggaatgctccctggctgatccagcgcactgttcccacattcttcacattgttcttacccgctttgttcaagtccgtcccacaatcgtcattgtctcacttatttgctgttttctagatccggtatgatttgagtagtttccggaaacaattggacttagctctgaaatacatctgcaaagcaaacgacatctcttgggagcgtccccttttatcatgtgttcatacctacttcccctagcagttggtgctgctccatgttcagcccttgaggcgcaacctacctacctataccacacgaggcctcgaacaacacggaacaaatcaaagacataaaagaacaacgcgatcgtcaaaatgtcgctgaaacgcgaaaacgacacagacctacatatcgaacccccggctaaacgtccacggcccgaggtagatctatactcccctgaagttaacacgagtagcgatgagtttggcagcgaatacagcgactacggaggattctaccccaaagatgctaagccgaccgtgccggatatggatgtggttgtaggcaatacgctacattatcagggtaccgttgatccagatcctatcagtgaaagattcggtcaggagtatcccaagaagcaattcaaggatttacaagag

SEQ ID NO: 9760 - DNA, 750 bp, Muscodor strobelii
  misc_feature: SGI cDNA ID NO. 563066
  misc_feature: Encodes the peptide sequence at SEQ ID NO 9761
atgtcctccaccaagaaatcttcctcgaccagaacgtcgaggcagtcgcatagatcgacgctgtctttgacgagaaccgaaatcgtcatcaacgtctacgatctcttacctccaggccgcatgtccagcgtcctatggaccttcggcacatccctgctgcactcaggcgtcgtcataaacggcaaagaataccaatatggtgggcacgacaagcgagggctcacaggcgtatactggacgcagcccaagaccgagccaccgggcggcaccttccgcaccgagatcctgcacggcttcaccttcgcaacgcagtccgagatcgaggacataatccgcaaagcctcggctgagttcgacggcgcatcctacaatctgctcacgcgcaactgcaaccacttcacatcgtacctctgccagaaactcaccggccgtgcgggcccgggctggctcaaccgagcggcgagcatcggcgttgcgctcccgtgcatggtcccgagagactggatcgagcccccggacttcgagacggcggacggcgagctgctggacgacgacagcgatggatacgacgcccacgagggctcgcgtatgctgcggcccgagtccaggaggacgttgacgagctcgagccacgatatggagtccgacgaggatgatggcgacaacaaccgccgcaagggcaagaagaagcaagatgcacgcgacagcagcgggagacggttgcctgcggccgagcgagcgccgagatag

SEQ ID NO: 9761 - protein, 249 aa, Muscodor strobelii
  misc_feature: SGI Peptide ID NO. 563066
  misc_feature (26)..(168): Pfam Id: PF05903 Pfam Desc: PPPDE peptidase domain
  misc_feature (26)..(249): NCBI GI: 46111763 Blast Desc: FG02763.1 [Gibberella zeae PH-1]
  misc_feature (15)..(248): NCBI GI: 116180780 Blast Desc: CHGG_01018 [Chaetomium globosum CBS 148.51] gi|88185315|gb|EAQ92783.1| CHGG_01018 [Chaetomium globosum CBS 148.51]
  misc_feature (11)..(248): NCBI GI: 171687431 Blast Desc: protein product [Podospora anserina] gi|170943677|emb|CAP69329.1| protein product [Podospora anserina]
  misc_feature (20)..(248): NCBI GI: 156052645 Blast Desc: SS1G_06489 [Sclerotinia sclerotiorum 1980] gi|154704268|gb|EDO04007.1| SS1G_06489 [Sclerotinia sclerotiorum 1980]
  misc_feature (1)..(248): NCBI GI: 169607707 Blast Desc: SNOG_06912 [Phaeosphaeria nodorum SN15] gi|111064443|gb|EAT85563.1| SNOG_06912 [Phaeosphaeria nodorum SN15]
  misc_feature (2)..(248): NCBI GI: 189189056 Blast Desc: conserved [Pyrenophora tritici-repentis Pt-1C-BFP] gi|187972473|gb|EDU39972.1| conserved [Pyrenophora tritici-repentis Pt-1C-BFP]
  misc_feature (17)..(184): NCBI GI: 85114252 Blast Desc: NCU02043 [Neurospora crassa OR74A] gi|28926455|gb|EAA35429.1| conserved [Neurospora crassa OR74A] gi|38566910|emb|CAE76214.1| conserved [Neurospora crassa]
  misc_feature (23)..(146): NCBI GI: 154314871 Blast Desc: BC1G_04777 [Botryotinia fuckeliana B05.10] gi|150848315|gb|EDN23508.1| BC1G_04777 [Botryotinia fuckeliana B05.10]
  misc_feature (12)..(165): NCBI GI: 217074408 Blast Desc: [Medicago truncatula]
  misc_feature (27)..(208): NCBI GI: 115450095 Blast Desc: Os03g0100900 [Oryza sativa (japonica cultivar-group)] gi|108705678|gb|ABF93473.1| UPF0326 protein CGI-146, , expressed [Oryza sativa (japonica cultivar-group)] Os03g0100900 [Oryza
MSSTKKSSSTRTSRQSHRSTLSLTRTEIVINVYDLLPPGRMSSVLWTFGTSLLHSGVVINGKEYQYGGHDKRGLTGVYWTQPKTEPPGGTFRTEILHGFTFATQSEIEDIIRKASAEFDGASYNLLTRNCNHFTSYLCQKLTGRAGPGWLNRAASIGVALPCMVPRDWIEPPDFETADGELLDDDSDGYDAHEGSRMLRPESRRTLTSSSHDMESDEDDGDNNRRKGKKKQDARDSSGRRLPAAERAPR

SEQ ID NO: 9762 - DNA, 2699 bp, Muscodor strobelii
  misc_feature: SGI EST ID NO. CUFF.23038.0
  misc_feature: Variant of the nucleotide sequence at SEQ ID NO 9760
gccgagccaaccccatggaaaccctctccaagtcccccaaggttacttaacttcatccgtcactgagtgcgtcacagctgttcgaatgggaggatttgcagggtgtcttttcacattgatgtttcattcgcggctgaagctgacgggcgagtgacgagtccctaaatagacaatttcttcttatcaatctcacctatgatctgcatcattgtctcactacagtgttcctgacacaggaccagctcatcagccaagtcgtggagcgtagccggcaccgtctctgccttgccttgcctcgtcttcctatcctcggagcctgagtgggatacgtgacctactctcgtcaactcagtcacatggccggtcgcgagtaatgcgctcacaatagtcattcttaacacattgtcctccagtctaggttaatagaattgctacaacgaccatcattgatgctcgagctggactaagtaactgctgtgcctcttgtcaccgcattcagctcccacccccgccacacttaccacacccagctacattctcagcacatacctacctccagacctcagctggtcgtctcacaacaccacgtcttttctttgtccaacaaagatatctccgtctcgccatcatgtcctccaccaagaaatcttcctcgaccagaacgtcgaggcagtcgcatagatcgacgctgtctttgacgagaaccgaaatcgtcatcaacgtctacgatctcttacctccaggccgcatgtccagcgtcctatggaccttcggcacatccctgctgcactcaggcgtcgtcataaacggcaaagaataccaatatggtgggcacgacaagcgagggctcacaggcgtatactggacgcagcccaagaccgagccaccgggcggcaccttccgcaccgagatcctgcacggcttcaccttcgcaacgcagtccgagatcgaggacataatccgcaaagcctcggctgagttcgacggcgcatcctacaatctgctcacgcgcaactgcaaccacttcacatcgtacctctgccagaaactcaccggccgtgcgggcccgggctggctcaaccgagcggcgagcatcggcgttgcgctcccgtgcatggtcccgagagactggatcgagcccccggacttcgagacggcggacggcgagctgctggacgacgacagcgatggatacgacgcccacgagggctcgcgtatgctgcggcccgagtccaggaggacgttgacgagctcgagccacgatatggagtccgacgaggatgatggcgacaacaaccgccgcaagggcaagaagaagcaagatgcacgcgacagcagcgggagacggttgcctgcggccgagcgagcgccgagatagagtatagagtacgtcattgagaaagcccgcattacggcacggagatcagagatgagtttcggcttcccggcgttgaggtatgagattgcagggtatgtgtgcgtttgatggcggcgtttacggctgggagatggggcgtttgtgatttgattgcgaaattgtgctttttgcgggcgtacggcagcatggagtccgattgtatttgtttgacagtagcagattggacagacaacggggccacgtctcgatggtcccccgaaatcgtacagaagaatgtacatggctgacgattttttatcacatatgatacaaatgttctcgtgagaatccacaagtctctaggccgacaaaggccattattccccccctctctatatctacacagcctcatactctacacaactataccatccgccaacccatccaaaggccgtctacaacctcctaggcttgggactcctggtaccaccaaacttcaacctcgtagcatcggcgactttggtgatatggggcctcaagagtcttccctcgttgcccagcaggaccttcgtggccgcctcacggccctggccaaaccctctcagcacaacctccaaagccttgatgttcttgtgccaaccgccctggttcaacttatcgaggacgtaggccatgagctggtaggcggcgtcgtaggagccgcgcttggccttcttgaagccgaggttgcccgtggacatgctgacgatggcgttgcggttgggcttggtgacggtgacgtgggtgttgcgcttgtgggcgtagatgtggaagtggaagggctcgtgcagcggcccccattcgagacgtttcgcgtccgagacggcgtcttcgtcggccttctcgacgggcaggttacgggcggagcggatggtgctgttgacgaggacgcgcgagatgctagccatgtctttggtgcccgatgccggccggggcgcgggcgatgcgctgcttttctgtgatgggctcctcatggggaatctgtcgaggagggaggggctgcgcttgggcggaggggcgtcggcgaggcggaggcatgtttgggagaagtgccgtgtgggttgttggctggcagagagggagagggatgagagcttggaggtggtcttcgccaggaggcgagtggttggttgggtcatgttgacggcatcaacgtctctgtcggaaacgaggaagctagacagagcccgcttgtctgtttaaaaatttagaaactctcgctattgaagttgatcgccaatcgcccatgcccagtatcgtcgatgtttgtgctgggccactacgacgacgaggtacgtgtaga

SEQ ID NO: 9763 - DNA, 723 bp, Muscodor strobelii
  misc_feature: SGI cDNA ID NO. 563067
  misc_feature: Reduced expression when VOC is produced
  misc_feature: Encodes the peptide sequence at SEQ ID NO 9764
atgacccaaccaaccactcgcctcctggcgaagaccacctccaagctctcatccctctccctctctgccagccaacaacccacacggcacttctcccaaacatgcctccgcctcgccgacgcccctccgcccaagcgcagcccctccctcctcgacagattccccatgaggagcccatcacagaaaagcagcgcatcgcccgcgccccggccggcatcgggcaccaaagacatggctagcatctcgcgcgtcctcgtcaacagcaccatccgctccgcccgtaacctgcccgtcgagaaggccgacgaagacgccgtctcggacgcgaaacgtctcgaatgggggccgctgcacgagcccttccacttccacatctacgcccacaagcgcaacacccacgtcaccgtcaccaagcccaaccgcaacgccatcgtcagcatgtccacgggcaacctcggcttcaagaaggccaagcgcggctcctacgacgccgcctaccagctcatggcctacgtcctcgataagttgaaccagggcggttggcacaagaacatcaaggctttggaggttgtgctgagagggtttggccagggccgtgaggcggccacgaaggtcctgctgggcaacgagggaagactcttgaggccccatatcaccaaagtcgccgatgctacgaggttgaagtttggtggtaccaggagtcccaagcctaggaggttgtag

SEQ ID NO: 9764 - protein, 240 aa, Muscodor strobelii
  misc_feature: SGI Peptide ID NO. 563067
  misc_feature (124)..(239): Pfam Id: PF00411 Pfam Desc: Ribosomal protein S11
  misc_feature (124)..(202): Pfam Id: PF00411 Pfam Desc: Ribosomal protein S11
  misc_feature (119)..(240): NCBI GI: 85117800 Blast Desc: NCU03230 [Neurospora crassa OR74A] gi|28927137|gb|EAA36094.1| [Neurospora crassa OR74A]
  misc_feature (71)..(240): NCBI GI: 171694972 Blast Desc: protein product [Podospora anserina] gi|170947728|emb|CAP59891.1| protein product [Podospora anserina]
  misc_feature (119)..(240): NCBI GI: 46111761 Blast Desc: FG02762.1 [Gibberella zeae PH-1]
  misc_feature (119)..(240): NCBI GI: 256721967 Blast Desc: NECHADRAFT_94184 [Nectria haematococca mpVI 77-13-4]
  misc_feature (120)..(235): NCBI GI: 238843737 Blast Desc: mitochondrial ribosomal protein subunit S18 [Microsporum canis CBS 113480]
  misc_feature (119)..(240): NCBI GI: 156052643 Blast Desc: SS1G_06488 [Sclerotinia sclerotiorum 1980] gi|154704267|gb|EDO04006.1| SS1G_06488 [Sclerotinia sclerotiorum 1980]
  misc_feature (97)..(240): NCBI GI: 240111898 Blast Desc: CPC735_013610 [Coccidioides posadasii C735 delta SOWgp]
  misc_feature (97)..(240): NCBI GI: 119173703 Blast Desc: CIMG_10278 [Coccidioides immitis RS]
  misc_feature (85)..(240): NCBI GI: 154314869 Blast Desc: BC1G_04776 [Botryotinia fuckeliana B05.10] gi|150848314|gb|EDN23507.1| BC1G_04776 [Botryotinia fuckeliana B05.10]
  misc_feature (128)..(232): NCBI GI: 145614778 Blast Desc: MGG_10381 [Magnaporthe grisea 70-15] gi|145021663|gb|EDK05792.1| MGG_10381 [Magnaporthe grisea 70-15]
  misc_feature: Useful for introducing or modulating the production of volatile compounds
MTQPTTRLLAKTTSKLSSLSLSASQQPTRHFSQTCLRLADAPPPKRSPSLLDRFPMRSPSQKSSASPAPRPASGTKDMASISRVLVNSTIRSARNLPVEKADEDAVSDAKRLEWGPLHEPFHFHIYAHKRNTHVTVTKPNRNAIVSMSTGNLGFKKAKRGSYDAAYQLMAYVLDKLNQGGWHKNIKALEVVLRGFGQGREAATKVLLGNEGRLLRPHITKVADATRLKFGGTRSPKPRRL

SEQ ID NO: 9765 - DNA, 1500 bp, Muscodor strobelii
  misc_feature: SGI cDNA ID NO. 563068
  misc_feature: Reduced expression when VOC is produced
  misc_feature: Encodes the peptide sequence at SEQ ID NO 9766
atgtttgtgctgggccactacgacgacgagccgcatagcatcctctgcttcttcgcgcatcgcaacctccccctcccctcactccgatcgccgtgcctaccagagaccatagcggccatccagtcacggggctttcacgagacttcacgatggctacaggaacagccagcgccaccgaaatctgacaaacccgcagagaaaccggaaacgcagcctgaatcagaaaccaaatctgaagctggtgctgaagagcgggcaaagaaggaggctgatggtgaagagtcggccgagggtgagaagaaggagaagaaagaagatctgcctccaccaccacctcacggcgagaagaccccatggcaggtgttcatggagaccatgcagacagagttcaaggcctccaaggaatggaacgactccaccaagcagctggctgactccgcccactccttcaccgagagcgagtccgtccgccgcgcgagacaggcctacgagtccaccaccggtgccgtttctaacactgccggcaaggtattcaaatcatccgccgagactatagggaagggtgcttcgtggacctgggacactcaggcgatgaagggcattcgcaagggtgccaacttcactggagaagccctcgacaaggccaccaagcccatccgcgacactgatgcctacaagagcgtcaaggacgtcatcgacgatggcagcagctcgaggtacggtggctgggtggagaaagaggaacggcgaaaagcccgtgagctgcgtcagaagaaggccgcttccatccacggcaacgtagaagaaatggtcgaggatcccaacgctggaaccaatgtcacactgcacaaggatgctgcctggaaagaagcatggagggatttccgcgatcagagcaaattcttccaaggggtgaacaacatgaagagcgtctatgctgaatcagagaatcctttgatctcgacggctaggagcataaccgatcgttttgcgggcttctttgccgaaaacgaaaccgccatggtcatcaagaaggtccgaaccatggatcctaacttccagctggagccttttcagcaagagttgcgtgattatatcctacccgaagtccttgatgcctacgtcaagggcgacaccgagacactgaagttgtggctttcggctgcccagtactcagtctacgaagctctgacgaaacaatatctacaagccggcatgaagtctgacggacgcattttggatatcagacatgtcgacatcttaaaggctcgcatgcttgagcctggtgagatccccgtgttcatcatcacctgccgaacacaagaagtccatgtgtaccgtaatgcaaagacgaacgagcttgcagccggtatggaggatcgcgtccaacttgtgacatacgtcattggcattaccaggacacccgaagacgtcaacaaccccgagactaggggttggagactgatcgaaatgcaaaagagcggaagagactacatataa

SEQ ID NO: 9766 - protein, 499 aa, Muscodor strobelii
  misc_feature: SGI Peptide ID NO. 563068
  misc_feature (339)..(493): Pfam Id: PF04280 Pfam Desc: Tim44-like domain
  misc_feature (41)..(499): NCBI GI: 145614776 Blast Desc: MGG_11419 [Magnaporthe grisea 70-15] gi|145021662|gb|EDK05791.1| MGG_11419 [Magnaporthe grisea 70-15]
  misc_feature (23)..(499): NCBI GI: 116182526 Blast Desc: CHGG_01891 [Chaetomium globosum CBS 148.51] gi|88186188|gb|EAQ93656.1| CHGG_01891 [Chaetomium globosum CBS 148.51]
  misc_feature (25)..(498): NCBI GI: 46111759 Blast Desc: FG02761.1 [Gibberella zeae PH-1]
  misc_feature (19)..(499): NCBI GI: 154314867 Blast Desc: BC1G_04775 [Botryotinia fuckeliana B05.10] gi|150848313|gb|EDN23506.1| BC1G_04775 [Botryotinia fuckeliana B05.10]
  misc_feature (27)..(498): NCBI GI: 261357766 Blast Desc: mitochondrial inner membrane translocase subunit TIM44 [Verticillium albo-atrum VaMs.102]
  misc_feature (25)..(499): NCBI GI: 85117796 Blast Desc: NCU03229 [Neurospora crassa OR74A] gi|28927136|gb|EAA36093.1| conserved [Neurospora crassa OR74A] gi|29290073|gb|AAO72335.1| mitochondrial inner membrane subunit
  misc_feature (106)..(499): NCBI GI: 171694970 Blast Desc: protein product [Podospora anserina] gi|170947727|emb|CAP59890.1| protein product [Podospora anserina]
  misc_feature (9)..(499): NCBI GI: 225682773 Blast Desc: TIM23 translocase complex subunit Tim44 [Paracoccidioides brasiliensis Pb03]
  misc_feature (22)..(499): NCBI GI: 226290219 Blast Desc: mitochondrial inner membrane translocase subunit TIM44 [Paracoccidioides brasiliensis Pb18]
  misc_feature (30)..(499): NCBI GI: 225559726 Blast Desc: mitochondrial inner membrane translocase subunit TIM44 [Ajellomyces capsulatus G186AR]
  misc_feature: Useful for introducing or modulating the production of volatile compounds
MFVLGHYDDEPHSILCFFAHRNLPLPSLRSPCLPETIAAIQSRGFHETSRWLQEQPAPPKSDKPAEKPETQPESETKSEAGAEERAKKEADGEESAEGEKKEKKEDLPPPPPHGEKTPWQVFMETMQTEFKASKEWNDSTKQLADSAHSFTESESVRRARQAYESTTGAVSNTAGKVFKSSAETIGKGASWTWDTQAMKGIRKGANFTGEALDKATKPIRDTDAYKSVKDVIDDGSSSRYGGWVEKEERRKARELRQKKAASIHGNVEEMVEDPNAGTNVTLHKDAAWKEAWRDFRDQSKFFQGVNNMKSVYAESENPLISTARSITDRFAGFFAENETAMVIKKVRTMDPNFQLEPFQQELRDYILPEVLDAYVKGDTETLKLWLSAAQYSVYEALTKQYLQAGMKSDGRILDIRHVDILKARMLEPGEIPVFIITCRTQEVHVYRNAKTNELAAGMEDRVQLVTYVIGITRTPEDVNNPETRGWRLIEMQKSGRDYI

SEQ ID NO: 9767 - DNA, 2435 bp, Muscodor strobelii
  misc_feature: SGI EST ID NO. CUFF.23053.0
  misc_feature: Variant of the nucleotide sequence at SEQ ID NO 9765
tttactttgccggtttcgcccgcatcgccatcacctccatctcaacacaggcgcacgcgacagacacctcgtctccctccgcgtgcatctactatcttgctttttcccactggccttggaatcatcgaggggctcatcaaatacgagacgaatatgacatctttaaggatcgtctctcggagcaccgcatccgcctccatctccaggacgccttcactggctgtcccatcacacccaacatcatctcctgcctacaggaggttattgtccaggaatggaagcacatatccgcccacccgtagccgcatagcatcctctgcttcttcgcgcatcgcaacctccccctcccctcactccgatcgccgtgcctaccagagaccatagcggccatccagtcacggggctttcacgagacttcacgatggctacaggaacagccagcgccaccgaaatctgacaaacccgcagagaaaccggaaacgcagcctgaatcagaaaccaaatctgaagctggtgctgaagagcgggcaaagaaggaggctgatggtgaagagtcggccgagggtgagaagaaggagaagaaagaagatctgcctccaccaccacctcacggcgagaagaccccatggcaggtgttcatggagaccatgcagacagagttcaaggcctccaaggaatggaacgactccaccaagcagctggctgactccgcccactccttcaccgagagcgagtccgtccgccgcgcgagacaggcctacgagtccaccaccggtgccgtttctaacactgccggcaaggtattcaaatcatccgccgagactatagggaagggtgcttcgtggacctgggacactcaggcgatgaagggcattcgcaagggtgccaacttcactggagaagccctcgacaaggccaccaagcccatccgcgacactgatgcctacaagagcgtcaaggacgtcatcgacgatggcagcagctcgaggtacggtggctgggtggagaaagaggaacggcgaaaagcccgtgagctgcgtcagaagaaggccgcttccatccacggcaacgtagaagaaatggtcgaggatcccaacgctggaaccaatgtcacactgcacaaggatgctgcctggaaagaagcatggagggatttccgcgatcagagcaaattcttccaaggggtgaacaacatgaagagcgtctatgctgaatcagagaatcctttgatctcgacggctaggagcataaccgatcgttttgcgggcttctttgccgaaaacgaaaccgccatggtcatcaagaaggtccgaaccatggatcctaacttccagctggagccttttcagcaagagttgcgtgattatatcctacccgaagtccttgatgcctacgtcaagggcgacaccgagacactgaagttgtggctttcggctgcccagtactcagtctacgaagctctgacgaaacaatatctacaagccggcatgaagtctgacggacgcattttggatatcagacatgtcgacatcttaaaggctcgcatgcttgagcctggtgagatccccgtgttcatcatcacctgccgaacacaagaagtccatgtgtaccgtaatgcaaagacgaacgagcttgcagccggtatggaggatcgcgtccaacttgtgacatacgtcattggcattaccaggacacccgaagacgtcaacaaccccgagactaggggttggagactgatcgaaatgcaaaagagcggaagagactacatataagctgaaaaaatctctttctcttctttgttacttatactatacactacttgtaattactgtacaataccaagttggagcgggaaagactcactccaagggaccgcggcagggcgatcccgaaaaacaccactctggtgcattttacgcgggcgttgcaagtggacgactggcttgttgcatcatgtattattgtatgatagacaaaaagggggcggcgccatggatatgttgcgccacatgggcaaaatgttgtccgatataccatccgagctacgatactccaaatttactcaatggataagccgttgtgatatttgtgcgattttacatcttgcttttgtggcctgtctctcctaccgagatagcttagaagagacaaatacttgtataacactcacttcaaaagctatagattcggtatgatgatattaggatacagagctcgagcctcatgatagaacatgcgctgagggttaaatcgactgtttcatttcgttcagctagagatacgatctaggggtctataatgatgaagttgagggcgttttctctcgcaacaaataaagcaaatattgatagaacttaaatcagattgctggtgggattgtcgtttttattttagttcagttggcattcgtagggattgcctgagtcctggcgggg

SEQ ID NO: 9768 - DNA, 1416 bp, Muscodor strobelii
  misc_feature: SGI cDNA ID NO. 563069
  misc_feature: Encodes the peptide sequence at SEQ ID NO 9769
atgttgttaaggcttttgtttagtctcgcgttcatatccggggtgaaatcatctccagttgatattaacgagcctattacccgagatgtggcagtcataggcggcggttctgctggtacctacgctgccatcgcacttcgcgatgtaggtgctagcgtagtcgtcatcgagaagaataatcggctgggaggtcacgccaacacgtacacagatcctgcgagtggattggccgtggattatggagttgttgccttgggaaatattcccgtcgtccacgactacttagcacgccttaatgtgacgcctttggtagggaagtatgatccaggcaacattagcttcttcgatttcaagagcggccggcataacccggactatattcgacaagatcccgctggcgctattggccgatatagccaaattcttgcaaaatatcccttcttagacatatcatatgatcttcccgacgaaattccagaagacctcttgcttccatggggcgaattttgcaagaaatttgatcttgggtctatgtctcgagaaacttggcaatgggctcaaggctacggaaatattcttgatctaccggcattatacatcattaagcttttgagtcaacgttgggtggacggagtagctggcactgggttcgtctttacgtcgacgttcaatttcagttctgtttacggaagtgcggctgagattcttggtggcgatgtgatatacgaaagcacagttctttctgcagacagagacaacgccgatgacgagggttaccacagcattgtggtatctcagggaacagataacatcgccataagggccaaaaaagtcatcgtggctattccgccgctgacaggtgatgatttccttggccgtctggatttgaacgatgaagaatcggatgtttttggaaaattcaaatatttcaattactggactgcagggatcaaagaacctgccatcccagccggactaaacatacaaaatgtctcacctggaaactcgacaaccccctactcatatcctgatctcccggcagcttacttcttgcgagtcacggcggcgcctgagaactatataatgacatacggcacaccaggcgaggaggagaagaccgatggcgaagtcaagcaagagatgcgagagacgctccagcgtttgcgggactcgggatactacggcaatacaaatggcacaaaaggcttcgacatagtcgcttttgataatcatagcccttttgagctcaacgtagacgcggaggatatccgaaacggattttaccacgatatgtacgctcttcagggcaggcgagatacctggtactctggcgcggcttgggtttctcatgattcttcggcgatttggaattacactgcgcaaatcgtgaaagatgtcgtcaagacgctagcttga

SEQ ID NO: 9769 - protein, 471 aa, Muscodor strobelii
  misc_feature: SGI Peptide ID NO. 563069
  misc_feature (29)..(409): Pfam Id: PF01266 Pfam Desc: FAD dependent oxidoreductase
  misc_feature (29)..(66): Pfam Id: PF01266 Pfam Desc: FAD dependent oxidoreductase
  misc_feature (29)..(66): Pfam Id: PF00890 Pfam Desc: FAD binding domain
  misc_feature (28)..(63): Pfam Id: PF03486 Pfam Desc: HI0933-like protein
  misc_feature (29)..(65): Pfam Id: PF07992 Pfam Desc: Pyridine nucleotide-disulphide oxidoreductase
  misc_feature (26)..(464): NCBI GI: 121719434 Blast Desc: conserved [Aspergillus clavatus NRRL 1] gi|119404614|gb|EAW14990.1| conserved [Aspergillus clavatus NRRL 1]
  misc_feature (26)..(466): NCBI GI: 119499313 Blast Desc: FAD dependent oxidoreductase, [Neosartorya fischeri NRRL 181] gi|119414578|gb|EAW24517.1| FAD dependent oxidoreductase, [Neosartorya fischeri NRRL 181]
  misc_feature (26)..(463): NCBI GI: 70985430 Blast Desc: amine oxidase, flavin-containing superfamily [Aspergillus fumigatus Af293] gi|66845849|gb|EAL86183.1| amine oxidase, flavin-containing superfamily [Aspergillus fumigatus
  misc_feature (26)..(463): NCBI GI: 159125851 Blast Desc: amine oxidase, flavin-containing superfamily [Aspergillus fumigatus A1163]
  misc_feature (23)..(466): NCBI GI: 119501375 Blast Desc: NFIA_043660 [Neosartorya fischeri NRRL 181] gi|119415610|gb|EAW25547.1| conserved [Neosartorya fischeri NRRL 181]
  misc_feature (16)..(470): NCBI GI: 169780490 Blast Desc: [Aspergillus oryzae RIB40] gi|83773449|dbj|BAE63576.1| protein product [Aspergillus oryzae]
  misc_feature (16)..(470): NCBI GI: 238505352 Blast Desc: FAD dependent oxidoreductase, [Aspergillus flavus NRRL3357] gi|220690019|gb|EED46369.1| FAD dependent oxidoreductase, [Aspergillus flavus NRRL3357]
  misc_feature (26)..(458): NCBI GI: 238502911 Blast Desc: amine oxidase, flavin-containing superfamily [Aspergillus flavus NRRL3357] gi|220691499|gb|EED47847.1| amine oxidase, flavin-containing superfamily [Aspergillus flavus
  misc_feature (26)..(458): NCBI GI: 169776215 Blast Desc: [Aspergillus oryzae RIB40] gi|83771309|dbj|BAE61441.1| protein product [Aspergillus oryzae]
  misc_feature (13)..(467): NCBI GI: 67902350 Blast Desc: AN8162.2 [Aspergillus nidulans FGSC A4] gi|40739994|gb|EAA59184.1| AN8162.2 [Aspergillus nidulans FGSC A4] gi|259480933|tpe|CBF74013.1| TPA: amine oxidase, superfamily
MLLRLLFSLAFISGVKSSPVDINEPITRDVAVIGGGSAGTYAAIALRDVGASVVVIEKNNRLGGHANTYTDPASGLAVDYGVVALGNIPVVHDYLARLNVTPLVGKYDPGNISFFDFKSGRHNPDYIRQDPAGAIGRYSQILAKYPFLDISYDLPDEIPEDLLLPWGEFCKKFDLGSMSRETWQWAQGYGNILDLPALYIIKLLSQRWVDGVAGTGFVFTSTFNFSSVYGSAAEILGGDVIYESTVLSADRDNADDEGYHSIVVSQGTDNIAIRAKKVIVAIPPLTGDDFLGRLDLNDEESDVFGKFKYFNYWTAGIKEPAIPAGLNIQNVSPGNSTTPYSYPDLPAAYFLRVTAAPENYIMTYGTPGEEEKTDGEVKQEMRETLQRLRDSGYYGNTNGTKGFDIVAFDNHSPFELNVDAEDIRNGFYHDMYALQGRRDTWYSGAAWVSHDSSAIWNYTAQIVKDVVKTLA

SEQ ID NO: 9770 - DNA, 684 bp, Muscodor strobelii
  misc_feature: SGI cDNA ID NO. 563070
  misc_feature: Encodes the peptide sequence at SEQ ID NO 9771
atggccgaaggtggtaatcctacagacatcaagagtcgcttgagggcttcctacaatgctattgccccagcgtacaacaaatggactgcatcgcaccacgcactacgaatgaattacctgcacaaggctctcgagtatctcgatcttccgcagcgttcgaatgacctaatgttccttgagctcggctgtggttgtggagagcctgtgactgagaagctcttctcttaccccaatgcaaaagtatttgcaaacgatctttcggacactcaactggctttagcgaaagagaagctgttaagcgggcagccggatgacgctagtcagcgattgaacctaattcaaggtgatatgaacagtcttaagttcgacgatggctcgttcgatctcattgcggcgttctatagcgtcatgcaccttccacgagatgagcagttacagctcctcgagcgcattgcgaggtggctcaagccgaacggctatctggttgcgaatttcgcagttgaggacaaagagtctgaggtcattgagaagtggttgggtgacgagggctggatgtattggagcggatggggcagtgcgaagaacttggaaaagatcagagaagtcgggcttgatgttgtgttctcagaggagacaatcgctgctgttcctgcttctttcctctgggtcatcgccaagcgatag

SEQ ID NO: 9771 - protein, 227 aa, Muscodor strobelii
  misc_feature: SGI Peptide ID NO. 563070
  misc_feature (59)..(163): Pfam Id: PF08241 Pfam Desc: Methyltransferase domain
  misc_feature (59)..(161): Pfam Id: PF08242 Pfam Desc: Methyltransferase domain
  misc_feature (6)..(227): NCBI GI: 119501691 Blast Desc: O-methyltransferase, [Neosartorya fischeri NRRL 181] gi|119415768|gb|EAW25705.1| O-methyltransferase, [Neosartorya fischeri NRRL 181]
  misc_feature (7)..(227): NCBI GI: 39973233 Blast Desc: [Magnaporthe grisea 70-15] gi|145012725|gb|EDJ97379.1| [Magnaporthe grisea 70-15]
  misc_feature (6)..(227): NCBI GI: 70981774 Blast Desc: O-methyltransferase [Aspergillus fumigatus Af293] gi|66844038|gb|EAL84378.1| O-methyltransferase, [Aspergillus fumigatus Af293]
  misc_feature (7)..(227): NCBI GI: 159121975 Blast Desc: O-methyltransferase, [Aspergillus fumigatus A1163]
  misc_feature (9)..(227): NCBI GI: 171680976 Blast Desc: protein product [Podospora anserina] gi|170940446|emb|CAP65673.1| protein product [Podospora anserina]
  misc_feature (1)..(227): NCBI GI: 255952757 Blast Desc: Pc21g00570 [Penicillium chrysogenum Wisconsin 54-1255] gi|211588842|emb|CAP94954.1| Pc21g00570 [Penicillium chrysogenum Wisconsin 54-1255]
  misc_feature (7)..(227): NCBI GI: 256721281 Blast Desc: NECHADRAFT_44642 [Nectria haematococca mpVI 77-13-4]
  misc_feature (10)..(227): NCBI GI: 115401026 Blast Desc: [Aspergillus terreus NIH2624] gi|114190042|gb|EAU31742.1| [Aspergillus terreus NIH2624]
  misc_feature (1)..(227): NCBI GI: 240277235 Blast Desc: methyltransferase [Ajellomyces capsulatus H143]
  misc_feature (9)..(227): NCBI GI: 225558280 Blast Desc: methyltransferase [Ajellomyces capsulatus G186AR]
MAEGGNPTDIKSRLRASYNAIAPAYNKWTASHHALRMNYLHKALEYLDLPQRSNDLMFLELGCGCGEPVTEKLFSYPNAKVFANDLSDTQLALAKEKLLSGQPDDASQRLNLIQGDMNSLKFDDGSFDLIAAFYSVMHLPRDEQLQLLERIARWLKPNGYLVANFAVEDKESEVIEKWLGDEGWMYWSGWGSAKNLEKIREVGLDVVFSEETIAAVPASFLWVIAKR

SEQ ID NO: 9772 - DNA, 1105 bp, Muscodor strobelii
  misc_feature: SGI EST ID NO. CUFF.23064.0
  misc_feature: Variant of the nucleotide sequence at SEQ ID NO 9770
aagcaaatgtcagacctcgcaccgcatcaatccatcgagcattgtcgtgactccgcggtagcccccatagctactaaatttagcttcagcaacagcttgattctatcaacatatcctattgctttcaatcggtggtgtcagactcgaaatggccgaaggtggtaatcctacagacatcaagagtcgcttgagggcttcctacaatgctattgccccagcgtacaacaaatggactgcatcgcaccacgcactacgaatgaattacctgcacaaggctctcgagtatctcgatcttccgcagcgttcgaatgacctaatgttccttgagctcggctgtggttgtggagagcctgtgactgagaagctcttctcttaccccaatgcaaaagtatttgcaaacgatctttcggacactcaactggctttagcgaaagagaagctgttaagcgggcagccggatgacgctagtcagcgattgaacctaattcaaggtgatatgaacagtcttaagttcgacgatggctcgttcgatctcattgcggcgttctatagcgtcatgcaccttccacgagatgagcagttacagctcctcgagcgcattgcgaggtggctcaagccgaacggctatctggttgcgaatttcgcagttgaggacaaagagtctgaggtcattgagaagtggttgggtgacgagggctggatgtattggagcggatggggcagtgcgaagaacttggaaaagatcagagaagtcgggcttgatgttgtgttctcagaggagacaatcgctgctgttcctgcttctttcctctgggtcatcgccaagcgatagaaagtcgaagagactgttgagggccgttcatcaacagacactattttggtatggcggaactagccggactttgcggcttttcgccgctactcaatatcattacctggaacagaggctgaatttgttgagcatgtgaataatttgtcgagaagcgcaaaaaatgcgagatggtgtgaaaaatagacacattccagtgttagtactatcttatacctaatcctgcggtttgatactcggtatcaaattcgacttgtacatcaggacaaacatgag

SEQ ID NO: 9773 - DNA, 351 bp, Muscodor strobelii
  misc_feature: SGI cDNA ID NO. 563071
  misc_feature: Encodes the peptide sequence at SEQ ID NO 9774
atggtgctccctattgattcagggaacattacagctacgaatatcaccatcaaacatgaactcccaaaggcatactggatgcagttctgggacgaaccaggattcgaagggcgaaccaacgggaaggtcatcaccgatgtccaggaatgcggcggaaaagtgtcctctcttcagatcggcatggatgggactgagtgtgtagtctacgatcgccgagattgcgtgatccaagcccgtcgatacaaacttagacatcctggaatttgggacatgagagcgcttgggtgggacaacagagtccagtcctatctttgcgactcgtggatgcggaacttctgccccgactcgtga

SEQ ID NO: 9774 - protein, 116 aa, Muscodor strobelii
  misc_feature: SGI Peptide ID NO. 563071
MVLPIDSGNITATNITIKHELPKAYWMQFWDEPGFEGRTNGKVITDVQECGGKVSSLQIGMDGTECVVYDRRDCVIQARRYKLRHPGIWDMRALGWDNRVQSYLCDSWMRNFCPDS

SEQ ID NO: 9775 - DNA, 1617 bp, Muscodor strobelii
  misc_feature: SGI cDNA ID NO. 563072
  misc_feature: Elevated expression when VOC is produced
  misc_feature: Encodes the peptide sequence at SEQ ID NO 9776
atgtcggacacggagaagcatgaccctatggtcgacgccgaggggcgtctctccgagcaggagcatacgcacaaggctgaccttgatcaaaatgctgttattgccgattacaaacgcgatgccatcgaggcagagaacctcgagcataatttgggagtactggaggctgtcaaagcctatcccatggctaccttctgggcctttgtcatgtccttcaccatcattatggagtcttacgacgtgtttctgtgcagcaactttgtcgccctcgatgctttcaaacagcgattcgggatcattgaccccattaccggcaaacacgtcatcgagacaaagtggcaaggtgcactttcagtctctggacagcttggtgctcttatcggtgtcttccttgccggtcctctgactagtcgtattggctaccgctgggctactatcaccggccttatgttcctcaacgctttcatccttgtgttctacttcgccgaaagtcttcccgttatctttgcatctcagatcctcgaaggtttgccatggggcatcttcatcgccaacgcacccgcatactgcagtgagattgtgccgatcccgctccgagccccagcaactcagatgttgcagatgttctgggctatcggaagtattattgtggccgctgtcacgtacgtttacaaccccgttcagaatagtagtgcctggaagatccccattgccatccaatggattttccctaccccgcttgttgtcctgatgtactttgcacccgagtcaccctggtggctggttcgaaagggtcgtctcgaagaagcagcgaagtcggtcggacgccttggacgcaggtcgaggttgaatgtgaacgagacagtcgctatgatgcgccgtgttgttgagctcgaagcatccgaatcggagcctagctacatcgaactatttcaagggactgacctctaccgtacgctcattgtatgcggcgtttacgctgcccaaaatctcacgggtaatctcatcgccaaccaggccgtatttttcttccagcaggccggtttaaacgataacacggcgttcttcctcggtctcattacttatatcctgcaatggattttcgtcatgctttcgtggatactgactacgtatctcggccgtcgcaccatttatgtctggggttcggccgtcaacgtcgccttccttattgccctcggcattgcgggttcgttggatcgcaacaatgcaactaacaccgctgtggcctctttgggtctcatcatctctgtcttgttcaccttaggccctgcgcctgcatcgtgggtcatcatcggagagacttcgtccatccgtctcagaccacttacgaccggtatcggacgcgcgtcgtactatattgttgagatccctctcatctttctgtcaagttggcttctcaacccaacgggtgcgaatcttgccggcaagtgtggttatgtctggggtggcacgggtctcgtttgcttcatcttggcgtatttcttcttgccagagatgaagcacaggtcataccgtgagattgacattctgttcaagcgcaaggtcccggctcgcaaatggaagaagactgtggtcgatatcaacgatgaccagtaa

SEQ ID NO: 9776 - protein, 538 aa, Muscodor strobelii
  misc_feature: SGI Peptide ID NO. 563072
  misc_feature (81)..(466): Pfam Id: PF07690 Pfam Desc: Major Facilitator Superfamily
  misc_feature (66)..(518): Pfam Id: PF00083 Pfam Desc: Sugar (and other) transporter
  misc_feature (115)..(466): Pfam Id: PF07690 Pfam Desc: Major Facilitator Superfamily
  misc_feature (4)..(538): NCBI GI: 255930387 Blast Desc: Pc06g01480 [Penicillium chrysogenum Wisconsin 54-1255] gi|211581366|emb|CAP79141.1| Pc06g01480 [Penicillium chrysogenum Wisconsin 54-1255]
  misc_feature (19)..(538): NCBI GI: 119501745 Blast Desc: maltose permease [Neosartorya fischeri NRRL 181] gi|119415795|gb|EAW25732.1| maltose permease [Neosartorya fischeri NRRL 181]
  misc_feature (2)..(538): NCBI GI: 67524287 Blast Desc: AN2601.2 [Aspergillus nidulans FGSC A4] gi|40745550|gb|EAA64706.1| AN2601.2 [Aspergillus nidulans FGSC A4] gi|259488038|tpe|CBF87177.1| TPA: MFS maltose transporter,
  misc_feature (1)..(538): NCBI GI: 39975617 Blast Desc: MGG_00045 [Magnaporthe grisea 70-15] gi|145019125|gb|EDK03404.1| MGG_00045 [Magnaporthe grisea 70-15]
  misc_feature (27)..(538): NCBI GI: 115383642 Blast Desc: ATEG_01003 [Aspergillus terreus NIH2624] gi|114196060|gb|EAU37760.1| ATEG_01003 [Aspergillus terreus NIH2624]
  misc_feature (8)..(538): NCBI GI: 154312975 Blast Desc: conserved [Botryotinia fuckeliana B05.10] gi|150849574|gb|EDN24767.1| conserved [Botryotinia fuckeliana B05.10]
  misc_feature (4)..(538): NCBI GI: 70981824 Blast Desc: MFS maltose transporter [Aspergillus fumigatus Af293] gi|66844063|gb|EAL84403.1| MFS maltose transporter, [Aspergillus fumigatus Af293] gi|159121950|gb|EDP47073.1| MFS maltose A1163]
  misc_feature (1)..(538): NCBI GI: 156035781 Blast Desc: conserved [Sclerotinia sclerotiorum 1980] gi|154698499|gb|EDN98237.1| conserved [Sclerotinia sclerotiorum 1980]
  misc_feature (131)..(538): NCBI GI: 169607891 Blast Desc: SNOG_07008 [Phaeosphaeria nodorum SN15] gi|160701514|gb|EAT85659.2| SNOG_07008 [Phaeosphaeria nodorum SN15]
  misc_feature (3)..(538): NCBI GI: 261361028 Blast Desc: alpha-glucosides permease MPH2/3 [Verticillium albo-atrum VaMs.102]
  misc_feature: Useful for introducing or modulating the production of volatile compounds
MSDTEKHDPMVDAEGRLSEQEHTHKADLDQNAVIADYKRDAIEAENLEHNLGVLEAVKAYPMATFWAFVMSFTIIMESYDVFLCSNFVALDAFKQRFGIIDPITGKHVIETKWQGALSVSGQLGALIGVFLAGPLTSRIGYRWATITGLMFLNAFILVFYFAESLPVIFASQILEGLPWGIFIANAPAYCSEIVPIPLRAPATQMLQMFWAIGSIIVAAVTYVYNPVQNSSAWKIPIAIQWIFPTPLVVLMYFAPESPWWLVRKGRLEEAAKSVGRLGRRSRLNVNETVAMMRRVVELEASESEPSYIELFQGTDLYRTLIVCGVYAAQNLTGNLIANQAVFFFQQAGLNDNTAFFLGLITYILQWIFVMLSWILTTYLGRRTIYVWGSAVNVAFLIALGIAGSLDRNNATNTAVASLGLIISVLFTLGPAPASWVIIGETSSIRLRPLTTGIGRASYYIVEIPLIFLSSWLLNPTGANLAGKCGYVWGGTGLVCFILAYFFLPEMKHRSYREIDILFKRKVPARKWKKTVVDINDDQ

SEQ ID NO: 9777 - DNA, 2653 bp, Muscodor strobelii
  misc_feature: SGI EST ID NO. CUFF.23093.0
  misc_feature: Variant of the nucleotide sequence at SEQ ID NO 9775
ccgcagcgccgcctacattcggtcctttatcctgtatgagcaagtctggagactggcgaagtttgtgatgtggtccaaccccaacacgaatcctagtgctacacacacgtagaaaggttgcattcaattgccaggcgaggaggcaagcagggcgcaaaggtctccatttcaaatctcatctcatctcacgtggcatgattgaatactgtacccctagcttggtaaggtagcttggatggatctgattcacaacggaataaatggacgcgcacctatcataaccctggtttcatctccatgaatcacgcgtgcagtgacaatgggaaaaccgaggtgagttctgcagtgtgataatccataaaaggtcccagcctgccactcctcgtctctttgcttttctgctacaccatttcggcataccacatcacaaccgtaaggctgacccgaacccaacatgtcggacacggagaagcatgaccctatggtcgacgccgaggggcgtctctccgagcaggagcatacgcacaaggctgaccttgatcaaaatgctgttattgccgattacaaacgcgatgccatcgaggcagagaacctcgagcataatttgggagtactggaggctgtcaaagcctatcccatggctaccttctgggcctttgtcatgtccttcaccatcattatggagtcttacgacgtgtttctgtgcagcaactttgtcgccctcgatgctttcaaacagcgattcgggatcattgaccccattaccggcaaacacgtcatcgagacaaagtggcaaggtgcactttcagtctctggacagcttggtgctcttatcggtgtcttccttgccggtcctctgactagtcgtattggctaccgctgggctactatcaccggccttatgttcctcaacgctttcatccttgtgttctacttcgccgaaagtcttcccgttatctttgcatctcagatcctcgaaggtttgccatggggcatcttcatcgccaacgcacccgcatactgcagtgagattgtgccgatcccgctccgagccccagcaactcagatgttgcagatgttctgggctatcggaagtattattgtggccgctgtcacgtacgtttacaaccccgttcagaatagtagtgcctggaagatccccattgccatccaatggattttccctaccccgcttgttgtcctgatgtactttgcacccgagtcaccctggtggctggttcgaaagggtcgtctcgaagaagcagcgaagtcggtcggacgccttggacgcaggtcgaggttgaatgtgaacgagacagtcgctatgatgcgccgtgttgttgagctcgaagcatccgaatcggagcctagctacatcgaactatttcaagggactgacctctaccgtacgctcattgtatgcggcgtttacgctgcccaaaatctcacgggtaatctcatcgccaaccaggccgtatttttcttccagcaggccggtttaaacgataacacggcgttcttcctcggtctcattacttatatcctgcaatggattttcgtcatgctttcgtggatactgactacgtatctcggccgtcgcaccatttatgtctggggttcggccgtcaacgtcgccttccttattgccctcggcattgcgggttcgttggatcgcaacaatgcaactaacaccgctgtggcctctttgggtctcatcatctctgtcttgttcaccttaggccctgcgcctgcatcgtgggtcatcatcggagagacttcgtccatccgtctcagaccacttacgaccggtatcggacgcgcgtcgtactatattgttgagatccctctcatctttctgtcaagttggcttctcaacccaacgggtgcgaatcttgccggcaagtgtggttatgtctggggtggcacgggtctcgtttgcttcatcttggcgtatttcttcttgccagagatgaagcacaggtcataccgtgagattgacattctgttcaagcgcaaggtcccggctcgcaaatggaagaagactgtggtcgatatcaacgatgaccagtaatcggaaatggcgaagcagatacattgtgtgatcggaaacgagatgcctgcggacaggggagacaggtgataataaacacaattagcaacaacaccggtgtagcaatacgaatgccttacacacccaaatcaaattcttgttgatgtaaacctccgtgatctaagtcagcggtatactcatttcatagttcgcaaaggcatctgatcataccaagcagtacctaatctagaagctccgcaagccattgtgaccttgaaagtaagacaataaaggcacttaacgtttgccaattgtttggcagcctggactgttttctctttactgtagaacaccacgagttttccattctgtcgattgactaatgcattgtttcgatagtgcgaggacaaaaagattccggtccactgtttgatgatccataatgctggtacggaaggccctcctgttggcgcggatcaagaaacttacccacttgcggctcaaggcgaacttttgcgatataccatgcctcaaagcctgatgacccgacactgttactatgcgatttttgctttctaaccgctccaaacatgtagatttgga

SEQ ID NO: 9778 - DNA, 519 bp, Muscodor strobelii
  misc_feature: SGI cDNA ID NO. 563073
  misc_feature: Encodes the peptide sequence at SEQ ID NO 9779
atgatgccctcctctgaagatggcaagcgcaagcccagcgaggagcccgcctctcccgcggcctcgaagcgcgtaaagcacgaggacgactcccccgacgctgacgtcaactctggcaaccgctcgcttgatatcccacaaatgtcggacaacaacaacagcaccatggccaacatgaacactacggccaacatgaacacttcggccaacatcaataccacgaccagcatcaataccatggccgctggcgtcaatttcaccagaagcgataagcgcgcggccatgtttggccgcctcacggcccagcagataggcaatgcccgggctgtaattgccgagcacgtttaccgcgacagtggtgtcatgggcgtcgtgggacacatcatttgctttacggtgtgtgagaatatttggcattacggcgaggtcgatgaggaagacgatgaggaagacgatgaggaagacgatgaggaagacgatgaggaagacgatgaggaagtcgacgaggaagtcgactag

SEQ ID NO: 9779 - protein, 172 aa, Muscodor strobelii
  misc_feature: SGI Peptide ID NO. 563073
MMPSSEDGKRKPSEEPASPAASKRVKHEDDSPDADVNSGNRSLDIPQMSDNNNSTMANMNTTANMNTSANINTTTSINTMAAGVNFTRSDKRAAMFGRLTAQQIGNARAVIAEHVYRDSGVMGVVGHIICFTVCENIWHYGEVDEEDDEEDDEEDDEEDDEEDDEEVDEEVD

SEQ ID NO: 9780 - DNA, 245 bp, Muscodor strobelii
  misc_feature: SGI EST ID NO. CUFF.23077.0
  misc_feature: Variant of the nucleotide sequence at SEQ ID NO 9778
gtcactgttcccctctccgatatctctgacacctggtctcttctagtcgaccactttagctttcaggcccaaaataccctcttctaaaccgagacgcagtctgaagtaagtaggatgagatatgctacataacacagcatactgactacttgaatttgcgtaaagacaaggctgccactcagatctgtggttgctatgatgccctcctctgaagatggcaagcgcaagcccagcgaggagcccgc

SEQ ID NO: 9781 - DNA, 921 bp, Muscodor strobelii
  misc_feature: SGI cDNA ID NO. 563074
  misc_feature: Encodes the peptide sequence at SEQ ID NO 9782
atgaagttagcgacatggtggttccttggcgcggtctctagagcaggcgctgcatcgctccagcaagtcaccgaagactttggtgcaaatccgagaaacgtgggcttctacatctacgtaccagatcaacttgcgaccaaccccccagttttggtcaatcctcactggtgccacggtagcgccgaagcagcctacgagggttcgcagttcgcaactcttgcgtcgaaatatggcttcatagttatatatcctaatagtcctaatacggcggatatgtgctgggacctctcttcaaacgatactctgactcatgatggaggaggcgacagtcttggtattgttagcatggttcagtggactcttgacaaatacaacggcgataagagcaaggtatttgttacgggtatatcctctggtgcaatgatgacgagtacactgatcggagcgtatcctgatgttttcgccgcgggatctgcattttccggcgtgccatttggatgttatgccggtgatggatatggtgtctggagcgatgactgtgctacaggcaaaatcacgcacacaggtgcagaatgggcagcaatagttgaggcagcatatcccggatatgacggctggcgaccaaagatgcagatttttcatggaacgatagacgaagtgctcaactacacagtttttggcgaagagatcaaggaatggacatcagtcttggggtatagcgaaacaccgacaagcacgacgccggacacgccagtgcccaactggactaaaatggtctatggccctaatgattggtttgaggcatacagcgctgcaaatgtaacgcacaatattcaaaatcaggaaaacgaagtcatggcttggtttgacttaacttgcacgtctgacgattgcttcagctggggtcagggcggtccttga

SEQ ID NO: 9782 - protein, 306 aa, Muscodor strobelii
  misc_feature: SGI Peptide ID NO. 563074
  misc_feature (17)..(305): NCBI GI: 116204477 Blast Desc: CHGG_10122 [Chaetomium globosum CBS 148.51] gi|88176250|gb|EAQ83718.1| CHGG_10122 [Chaetomium globosum CBS 148.51]
  misc_feature (23)..(302): NCBI GI: 171678828 Blast Desc: protein product [Podospora anserina] gi|170937484|emb|CAP62142.1| protein product [Podospora anserina]
  misc_feature (21)..(300): NCBI GI: 261357001 Blast Desc: feruloyl esterase B [Verticillium albo-atrum VaMs.102]
  misc_feature (1)..(300): NCBI GI: 169624385 Blast Desc: SNOG_15451 [Phaeosphaeria nodorum SN15] gi|111055996|gb|EAT77116.1| SNOG_15451 [Phaeosphaeria nodorum SN15]
  misc_feature (15)..(300): NCBI GI: 154308691 Blast Desc: BC1G_07768 [Botryotinia fuckeliana B05.10] gi|150852719|gb|EDN27911.1| BC1G_07768 [Botryotinia fuckeliana B05.10]
  misc_feature (36)..(300): NCBI GI: 156050633 Blast Desc: SS1G_07904 [Sclerotinia sclerotiorum 1980] gi|154692304|gb|EDN92042.1| SS1G_07904 [Sclerotinia sclerotiorum 1980]
  misc_feature (1)..(291): NCBI GI: 114324587 Blast Desc: acetyl xylan esterase [Volvariella volvacea]
  misc_feature (9)..(291): NCBI GI: 169848044 Blast Desc: CC1G_03267 [Coprinopsis cinerea okayama7#130] gi|116508204|gb|EAU91099.1| CC1G_03267 [Coprinopsis cinerea okayama7#130]
  misc_feature (12)..(292): NCBI GI: 238493565 Blast Desc: acetyl xylan esterase, [Aspergillus flavus NRRL3357] gi|220696513|gb|EED52855.1| acetyl xylan esterase, [Aspergillus flavus NRRL3357]
  misc_feature (12)..(292): NCBI GI: 169783734 Blast Desc: [Aspergillus oryzae RIB40] gi|45581605|dbj|BAD12626.1| acetyl xylan esterase [Aspergillus oryzae] gi|83775073|dbj|BAE65196.1| protein product [Aspergillus oryzae]
  misc_feature (1)..(291): SWISSPROT Homolog: EC 3.1.1.73 Feruloyl esterase
MKLATWWFLGAVSRAGAASLQQVTEDFGANPRNVGFYIYVPDQLATNPPVLVNPHWCHGSAEAAYEGSQFATLASKYGFIVIYPNSPNTADMCWDLSSNDTLTHDGGGDSLGIVSMVQWTLDKYNGDKSKVFVTGISSGAMMTSTLIGAYPDVFAAGSAFSGVPFGCYAGDGYGVWSDDCATGKITHTGAEWAAIVEAAYPGYDGWRPKMQIFHGTIDEVLNYTVFGEEIKEWTSVLGYSETPTSTTPDTPVPNWTKMVYGPNDWFEAYSAANVTHNIQNQENEVMAWFDLTCTSDDCFSWGQGGP

SEQ ID NO: 9783 - DNA, 389 bp, Muscodor strobelii
  misc_feature: SGI EST ID NO. CUFF.23083.0
  misc_feature: Variant of the nucleotide sequence at SEQ ID NO 9781
gcaggcgctgcatcgctccagcaagtcaccgaagactttggtgcaaatccgagaaacgtgggcttctacatctacgtaccagatcaacttgcgaccaaccccccagttttggtcaatcctcactggtgccacggtagcgccgaagcagcctacgagggttcgcagttcgcaactcttgcgtcgaaatatggcttcatagttatatatcctaatagtcctaatacggcggatatgtgctgggacctctcttcaaacgatactctgactcatgatggaggaggcgacagtcttggtattgttagcatggttcagtggactcttgacaaatacaacggcgataagagcaaggtatttgttacgggtatatcctctggtgcaatgatgacgag

SEQ ID NO: 9784 - DNA, 3171 bp, Muscodor strobelii
  misc_feature: SGI cDNA ID NO. 563075
  misc_feature: Encodes the peptide sequence at SEQ ID NO 9785
atgtgctggctgatattcctcaagatccatcaaatccaatctggccaggtcattgtcgatctgtgctccgttgtgaaggagctagtcgagaatagcattgatgccggtgccactaacatcgatgttcgcttcaaaaaccaggggctggactccatcgaggtgcaggacaatggctcggggatctcgaaggagaattatgaaactctggccttgaagcattacacatccaaactgtcgacttacgcagaccttgagtcactcgagaccttcggatttcgtggcgaagcgttgtcatctctttgtgctttgtccaaattttctgtcacgacttgcttggcatccgatgctcccaaaggctcgagactagaatatgagacctcagggaaactcagcactacgaccattgtcgctgcacaaagaggcacgactatgattgtggaaggtttgtttcataacctcccagtacgtcgccgagagctcgagcgaaatatcaagagggagtggaacaaagtgttaggcgtgttgaatcaatatgcatgtattcagactggactcaaattctctgtatcgcaacagccgaccaaaggcaagcggatgattcttttctcaacgaaaggcaaccagacaacacgcgaaaatatcgtcaacgtattcggagcaaagacactgaacgtgttgattcctctcgatctagagctagaactagagccgactgcaacatcaagtctgcggagcaagtcaaagcaggatgaagagacaaagctgatacgggtccgaggacacgtctcccgcccggcctatggagaaggacgtcaaacaccagatcgacagatgttcttcgttaacggtcgtccatgtgggctacctcaatttgccaaggtcttcaacgaagtttataggtcttacaactcgtcacaatcacccttcatatttgcagatattcggctcgacactcatctttatgatgtgaatgtcagtccggacaagagaaccatattgctacatgatcaaactcggatgctagataaccttaaggagtcgctcagcactttgtttgaatctcaagattacgcattgcccacctcgcagcttcaagcctttaaacaaacgccattcaagaagctgacagtgagcagacatgctactgtctcatcggatgcagactccagacgctccgtctcactagatagtggcacgaacagagacggcacgtccgccaatcccacagcggtcacccaggtcgacaacgacggcgatgcagatggtgattctcctatcacaccgcaatcaggagaaggaccaattcctcaggctagacaaacgaaccatttgataagccactgggctgagcgaaaatgcggtacacgtaccgacgtcgctactggaaacaataaggcaacagaagtaacgagcactttagatgacgctggttcttcatcacctgaagacgtcacgcacagccatcaatcttcgacccatacttctagcaatgtcacagatttccgtgcgcgactcgcggacctaaaaaagaaaagtgaaaatgatccgctcaatggcaacatctcttctgaaatggcgacagatgagcctcctataccatctctgtccataccgactcgtacagcagacttcaagagcatgatgcccaaaatttcgtcatcggctaagcgagcaccgcccgaggtcgccaccatcaccataggtgaccacactgttacaagcacgattggctcgtcatcaaaaaggcagcgagttgagagccaggaattacgagaatcatcgacgaagagagccttgaagggaaaacccccaaagccatctttcaatggaagactgactcaaatgttcgccgcacagtcagcgcgacaaccgtctacagtacgccagcttgctgttgccatagatgaggactcggagaattcggactcgtcaagtgaacagcttttcgttgaggatgatcaagacatggaaagcagcaacgaagaggacacgaatgagccagctgctaatgaatcaagcccggcttcccccaaaaattcgccattggagaaaacaaagtctgatcgggactcaggcgagcctgcttactcttcatcccatgataactcttcagtccatgatagcgatgaagaataccaagaggacctatccaatacagcaaaaaatgagagacacattgataaaggtgtcgaaatctcagagcagcttcaagatgttatctcggaagagactcaaaaacggacccacagttttatcaaaggtggcacaagaaagaaggatgcgacttatcagcttcgacaaactttgcgcatcgatgaagacttcatccgtaatactgtactcaagcagcagcaacaacatatcaatacggctcccccagatgaaaaagttgagttgcacactgatcaactagacgctgatgatgccgaggagaagctgtccttgacaatctccaaagcggattttgggaagatgaaaattatagggcagttcaatcacggattcatattagcatcccgcatggccgatgatggcgatgctgatccggccgctaaaggcaacaaagatgatgaacttttcatcatagatcagcatgctacagatgagaagtacaatttcgagcggctccaagccagcacaatcgtgcagtctcagaggcttgttcacccaaagactttagagctcacggcagttgaagaggatactgttcaacagaacctggaagcactcgaaaagaatggattcatggtcgaattcgatgatagtggtcatgaaccagtagggacccggtgtcagttgcttagtttgcctctgagccgggaaacaacattctctcttgcggacttggaagagctaatttcactccttggagaccattcgttaagttctgcgacaaccgtcccacgcccttccaaggtgcgtaagatgtttgcgatgcgggcgtgccggagcagtgtcatgatcggaaagcctctgtctgtacagcagatggaaaaacttgttcgacatatgggtgaacttgacaaaccctggaattgccctcatggacgcccaacaatgcgacacttatgtggaattggtgcttgggaccagctaggctggaaagaaggtgatggtttcgatgtagagcaaaccccccacacaaactgggcagcatatcttcaagagtaa

SEQ ID NO: 9785 - protein, 1056 aa, Muscodor strobelii
  misc_feature: SGI Peptide ID NO. 563075
  misc_feature (219)..(353): Pfam Id: PF01119 Pfam Desc: DNA mismatch repair protein, C-terminal domain
  misc_feature (16)..(151): Pfam Id: PF02518 Pfam Desc: Histidine kinase-, DNA gyrase B-, and HSP90-like ATPase
  misc_feature (827)..(992): Pfam Id: PF08676 Pfam Desc: MutL C terminal dimerisation domain
  misc_feature (9)..(1056): NCBI GI: 39979139 Blast Desc: related to DNA mismatch repair protein PMS1 [Neurospora crassa]
  misc_feature (9)..(1056): NCBI GI: 256720756 Blast Desc: NECHADRAFT_50420 [Nectria haematococca mpVI 77-13-4]
  misc_feature (9)..(1036): NCBI GI: 240111013 Blast Desc: DNA mismatch repair protein MutL family protein [Coccidioides posadasii C735 delta SOWgp]
  misc_feature (9)..(1036): NCBI GI: 226280716 Blast Desc: DNA mismatch repair protein pms1 [Paracoccidioides brasiliensis Pb01]
  misc_feature (3)..(1053): NCBI GI: 225557600 Blast Desc: DNA mismatch repair protein pms1 [Ajellomyces capsulatus G186AR]
  misc_feature (9)..(1036): NCBI GI: 226286592 Blast Desc: DNA mismatch repair protein pms1 [Paracoccidioides brasiliensis Pb18]
  misc_feature (3)..(1053): NCBI GI: 240278280 Blast Desc: DNA mismatch repair protein [Ajellomyces capsulatus H143]
  misc_feature (9)..(1036): NCBI GI: 225684832 Blast Desc: DNA mismatch repair protein PMS1 [Paracoccidioides brasiliensis Pb03]
  misc_feature (9)..(1053): NCBI GI: 154275042 Blast Desc: conserved [Ajellomyces capsulatus NAm1] gi|150414812|gb|EDN10174.1| conserved [Ajellomyces capsulatus NAm1]
  misc_feature (9)..(1036): NCBI GI: 239615471 Blast Desc: DNA mismatch repair protein [Ajellomyces dermatitidis ER-3]
MCWLIFLKIHQIQSGQVIVDLCSVVKELVENSIDAGATNIDVRFKNQGLDSIEVQDNGSGISKENYETLALKHYTSKLSTYADLESLETFGFRGEALSSLCALSKFSVTTCLASDAPKGSRLEYETSGKLSTTTIVAAQRGTTMIVEGLFHNLPVRRRELERNIKREWNKVLGVLNQYACIQTGLKFSVSQQPTKGKRMILFSTKGNQTTRENIVNVFGAKTLNVLIPLDLELELEPTATSSLRSKSKQDEETKLIRVRGHVSRPAYGEGRQTPDRQMFFVNGRPCGLPQFAKVFNEVYRSYNSSQSPFIFADIRLDTHLYDVNVSPDKRTILLHDQTRMLDNLKESLSTLFESQDYALPTSQLQAFKQTPFKKLTVSRHATVSSDADSRRSVSLDSGTNRDGTSANPTAVTQVDNDGDADGDSPITPQSGEGPIPQARQTNHLISHWAERKCGTRTDVATGNNKATEVTSTLDDAGSSSPEDVTHSHQSSTHTSSNVTDFRARLADLKKKSENDPLNGNISSEMATDEPPIPSLSIPTRTADFKSMMPKISSSAKRAPPEVATITIGDHTVTSTIGSSSKRQRVESQELRESSTKRALKGKPPKPSFNGRLTQMFAAQSARQPSTVRQLAVAIDEDSENSDSSSEQLFVEDDQDMESSNEEDTNEPAANESSPASPKNSPLEKTKSDRDSGEPAYSSSHDNSSVHDSDEEYQEDLSNTAKNERHIDKGVEISEQLQDVISEETQKRTHSFIKGGTRKKDATYQLRQTLRIDEDFIRNTVLKQQQQHINTAPPDEKVELHTDQLDADDAEEKLSLTISKADFGKMKIIGQFNHGFILASRMADDGDADPAAKGNKDDELFIIDQHATDEKYNFERLQASTIVQSQRLVHPKTLELTAVEEDTVQQNLEALEKNGFMVEFDDSGHEPVGTRCQLLSLPLSRETTFSLADLEELISLLGDHSLSSATTVPRPSKVRKMFAMRACRSSVMIGKPLSVQQMEKLVRHMGELDKPWNCPHGRPTMRHLCGIGAWDQLGWKEGDGFDVEQTPHTNWAAYLQE

SEQ ID NO: 9786 - DNA, 3317 bp, Muscodor strobelii
  misc_feature: SGI EST ID NO. CUFF.23105.0
  misc_feature: Variant of the nucleotide sequence at SEQ ID NO 9784
atcaaatccaatctggccaggtcattgtcgatctgtgctccgttgtgaaggagctagtcgagaatagcattgatgccggtgccactaacatcgatgttcgcttcaaaaaccaggggctggactccatcgaggtgcaggacaatggctcggggatctcgaaggagaattatgaaactctggccttgaagcattacacatccaaactgtcgacttacgcagaccttgagtcactcgagaccttcggatttcgtggcgaagcgttgtcatctctttgtgctttgtccaaattttctgtcacgacttgcttggcatccgatgctcccaaaggctcgagactagaatatgagacctcagggaaactcagcactacgaccattgtcgctgcacaaagaggcacgactatgattgtggaaggtttgtttcataacctcccagtacgtcgccgagagctcgagcgaaatatcaagagggagtggaacaaagtgttaggcgtgttgaatcaatatgcatgtattcagactggactcaaattctctgtatcgcaacagccgaccaaaggcaagcggatgattcttttctcaacgaaaggcaaccagacaacacgcgaaaatatcgtcaacgtattcggagcaaagacactgaacgtgttgattcctctcgatctagagctagaactagagccgactgcaacatcaagtctgcggagcaagtcaaagcaggatgaagagacaaagctgatacgggtccgaggacacgtctcccgcccggcctatggagaaggacgtcaaacaccagatcgacagatgttcttcgttaacggtcgtccatgtgggctacctcaatttgccaaggtcttcaacgaagtttataggtcttacaactcgtcacaatcacccttcatatttgcagatattcggctcgacactcatctttatgatgtgaatgtcagtccggacaagagaaccatattgctacatgatcaaactcggatgctagataaccttaaggagtcgctcagcactttgtttgaatctcaagattacgcattgcccacctcgcagcttcaagcctttaaacaaacgccattcaagaagctgacagtgagcagacatgctactgtctcatcggatgcagactccagacgctccgtctcactagatagtggcacgaacagagacggcacgtccgccaatcccacagcggtcacccaggtcgacaacgacggcgatgcagatggtgattctcctatcacaccgcaatcaggagaaggaccaattcctcaggctagacaaacgaaccatttgataagccactgggctgagcgaaaatgcggtacacgtaccgacgtcgctactggaaacaataaggcaacagaagtaacgagcactttagatgacgctggttcttcatcacctgaagacgtcacgcacagccatcaatcttcgacccatacttctagcaatgtcacagatttccgtgcgcgactcgcggacctaaaaaagaaaagtgaaaatgatccgctcaatggcaacatctcttctgaaatggcgacagatgagcctcctataccatctctgtccataccgactcgtacagcagacttcaagagcatgatgcccaaaatttcgtcatcggctaagcgagcaccgcccgaggtcgccaccatcaccataggtgaccacactgttacaagcacgattggctcgtcatcaaaaaggcagcgagttgagagccaggaattacgagaatcatcgacgaagagagccttgaagggaaaacccccaaagccatctttcaatggaagactgactcaaatgttcgccgcacagtcagcgcgacaaccgtctacagtacgccagcttgctgttgccatagatgaggactcggagaattcggactcgtcaagtgaacagcttttcgttgaggatgatcaagacatggaaagcagcaacgaagaggacacgaatgagccagctgctaatgaatcaagcccggcttcccccaaaaattcgccattggagaaaacaaagtctgatcgggactcaggcgagcctgcttactcttcatcccatgataactcttcagtccatgatagcgatgaagaataccaagaggacctatccaatacagcaaaaaatgagagacacattgataaaggtgtcgaaatctcagagcagcttcaagatgttatctcggaagagactcaaaaacggacccacagttttatcaaaggtggcacaagaaagaaggatgcgacttatcagcttcgacaaactttgcgcatcgatgaagacttcatccgtaatactgtactcaagcagcagcaacaacatatcaatacggctcccccagatgaaaaagttgagttgcacactgatcaactagacgctgatgatgccgaggagaagctgtccttgacaatctccaaagcggattttgggaagatgaaaattatagggcagttcaatcacggattcatattagcatcccgcatggccgatgatggcgatgctgatccggccgctaaaggcaacaaagatgatgaacttttcatcatagatcagcatgctacagatgagaagtacaatttcgagcggctccaagccagcacaatcgtgcagtctcagaggcttgttcacccaaagactttagagctcacggcagttgaagaggatactgttcaacagaacctggaagcactcgaaaagaatggattcatggtcgaattcgatgatagtggtcatgaaccagtagggacccggtgtcagttgcttagtttgcctctgagccgggaaacaacattctctcttgcggacttggaagagctaatttcactccttggagaccattcgttaagttctgcgacaaccgtcccacgcccttccaaggtgcgtaagatgtttgcgatgcgggcgtgccggagcagtgtcatgatcggaaagcctctgtctgtacagcagatggaaaaacttgttcgacatatgggtgaacttgacaaaccctggaattgccctcatggacgcccaacaatgcgacacttatgtggaattggtgcttgggaccagctaggctggaaagaaggtgatggtttcgatgtagagcaaaccccccacacaaactgggcagcatatcttcaagagtaaaatctagatcaggatacaggtaacatcaggctatgtaccatctgtttgtattgctttggaagaaattgcgtagcgtaggttacagacatctttctgcgggcatataatacccccggaaccacgacggggtttgattaattatcgaatgataagataattttcaatggcttcatt

SEQ ID NO: 9787 - DNA, 3861 bp, Muscodor strobelii
  misc_feature: SGI cDNA ID NO. 563076
  misc_feature: Encodes the peptide sequence at SEQ ID NO 9788
atggcgaggatgctgggtgtggcccctgttggactgcatcgactgcatctcgataaaggccgcgataaaacaagcatcacggccgcaggttatcacatcaaccagacttcagtcgtcagactgattccttccatactcccctcctgtgcagctgttgggtccccttcgtttgagaccagtccgaaacctcgagttccggagcgtcccaagcaccaagttccccagaccaacggctcccagctcctcgcagctcctcgcagctcgcacacggaattgcagcagcgtcattgcggaaccgccgagtctcgactgcccgccctgctcgtgctgggtcgcacagcttccctcttcaccacctcagtcctctccctctctctgtgtctctacagcccgtaccacgctggctcgccgctcgttcgccccgacagagacatttatcgagaccccgtcgcacccgagggcgctcgccggagctcctcctacgctgccccgatgcagaggcgttcgtcagcgtcgtctgaagacagcgccgacgcttccgcctccgtccacgctgcgcgctcccgctcccgcggccagtcccgccccgcagtttcctcgacgcgcaaccgcatctccaacaaccaattgaactggcagcaggccgaggcgcggaacgatgctgccaagaacaagcccacgatggcctcctccaagacgtcgggcgacatcagcaccgaagacggcaagcagacgacgctgaagcaccggacgcgccttgtcgagtcgcagagcccctggcggctgtcgctgctggccctgttcacgagcctggcgggcatcgccatcctggtctcgatcgtctactcggcgggcaacctccagtgcgatcccaagggctgccgcatgtcgtggatgagcccctcctacgtgccctgcaccgacttcgacaccgagcacacgaggtttgccagcaagtattcgctctatctataccgcgagcagggcatcgagacacgaccaaaggtcagagggatcccggtcttattcataccaggcaatgctggaagttacaaacaagtgcgatccatcgcatccgaatccgctcgctacttccacgagacgttgcatcatgacgctgccgctttgaaagctgggactcggagcttggatttctttacggtagatttcaacgaggactttacggccttccacggccagaccatgctcgaccaggccgaatacgtcaatgaggccatcagatacatcctgtcgctatacttggaccccaacgtgactgatcgcgatcccaatcttcccgacccgtcttctgtcatcatactcggtcactccatgggaggcatcgtggcccgagcggcattcgttatgcccaacttccaaccacagtccatcaactccatcatcaccatgtcagctccgcatgcaagggcacctgtcaccttcgacccgctgattgtcaagatatacgaggacatcaatcatcattggcgacgtgcgtactcgacaaagtccgcagcggataattctctatcacacgtcactctcgtttctattgccggtgggggtctcgatacggtggttccctcggattacgcaagcctagaatctctagtgcccgagacacatggattcacggtgttcacgtctacaattccaaacgtatggaccagcatggaccatcaggcaatcacgtggtgcgatcaattccgaaaagtcatggttcgaacgctgtacgaaatcgttgacggcacccacaaatcccagacgaagccccgagccgaacgaatgcggatcttcagggagaaatttttgacaggattggaaggatctgctggagtgactcctgtcgactcggcctctactacgttgctttctgtggaagacatctctgatgcgatccagacacaagagcgatttgtacttcgcaactttggtacggataggaaagccaaggcttatcttgttcctattccccagggcgaacttccgcatgccaagaagttctcgttgctgtcgaacagcgagcttgatcaaccaagagacagtggcaggctagaagttctgctttgtaatcttcattctccgcaaagcgatcagcatctttcgcctttctcaaacgaattagatcttgccggcaatagtagtgctgctactagcctggcttgcaagaatgttgtgaaagacgtggtgactttaccagcttccacacgtgctacgaagaccccttttttcctggagcgggagcaaccaatcccaccgttttcttatcttgagtacgacatcacaagtatttcggactatcagtttgtagcggtcatagacaaagcggacactccgacatatggctgggtagttgccgacttcagcaactcagctgattctcaactagcgctgtcggtgactctcacacagctcatcaccaatggactgcaactcgaacttccggcgaaacgtcctacaatgatcgatgtaaagataccatctattcagagtagcttgctggcctatcgcctagaggtgggcgatcaactttgcggcgatcgcagagaaatgcttcgtcccttgattaggcagtatattaataagccttatgagtcgaaatatttcgttgacgcgcagaatgttgagatcaatctccacggcgtgtctccatttgttccgccacctcttgatacaaagcatagcgacaatggagtgggcctgcagttttggactgatccaacatgcgaagccaacatatcgatcaagctcaccgtcgacccaattggcagccttggaaagctgtacatgcgttaccggactgtattcgcctcgtttccccaactggttgtcggtctagtgttacgcaaacaattccgagtatacgacactactggtactttcatccccttcagccaaagcctcggaaaatgcattcgacaatcacttccaatgctgttactgtctatgaccttcttgtcactgtcgcttggccagttaggttctgtggactacagggccatttggccatggcgcaacagtacagaactgatcgactttgctcagaacgatcttctcattggtacaacagactcatttttctggtttctgattcccatgataggcattatctgtatcggagtttgcatcgttatgcattacattgctcttgtcctagtgtctcttttcggtttcatctatacatggatcttcgttcgcaggttcccaattggtgataaaagggaggattccctatccaagcacgcgatggcacccgtattcgtaccaacttcgcctcaccagcggttactaacgatcggtgtacttctgctgcttatttcgacaatcatcccttaccaatttgcatacgtcatcgcttgcataatacaactcaccacatgcgttcgagcgtggtgtgtagctcgagagaccccgtcgctcacaaacaagaacttcaccaactacgtacacactatcttcctcttgatggtctggaatttgcccatcaatcttcccaccgtggtcgtctgggttcggaacttagccatacactggtttacgcccttctcttccactcacaacattatattgatcctgcctttcatcttgcttgttgagaatctcacagctggcaggatgattcctcccattacaaatcggctgcgacacctgacaaacatactgttcttcactacagcggtgtatgcagctatctatggcgtatcgcatgcttacatgctacactacttggtcaatttgatcgcagcatggcttgtagcaatccataccacagctgattcctgggctttggttggcattaagtcactggtaaacaacgaaacgccgagcgccaatgactcaaaacagagcaaacgcacatga

SEQ ID NO: 9788 - protein, 1286 aa, Muscodor strobelii
  misc_feature: SGI Peptide ID NO. 563076
  misc_feature (335)..(580): Pfam Id: PF07819 Pfam Desc: PGAP1-like protein
  misc_feature (189)..(1284): NCBI GI: 154318060 Blast Desc: BC1G_03013 [Botryotinia fuckeliana B05.10] gi|150843671|gb|EDN18864.1| BC1G_03013 [Botryotinia fuckeliana B05.10]
  misc_feature (189)..(1284): NCBI GI: 156049997 Blast Desc: SS1G_07584 [Sclerotinia sclerotiorum 1980] gi|154691986|gb|EDN91724.1| SS1G_07584 [Sclerotinia sclerotiorum 1980]
  misc_feature (257)..(1269): NCBI GI: 85108985 Blast Desc: NCU08021 [Neurospora crassa OR74A] gi|74696562|sp|Q7SAM0.1|BST1_NEUCR RecName: Full=GPI inositol-deacylase gi|28924302|gb|EAA33455.1| NCU08021 crassa
  misc_feature (166)..(1285): NCBI GI: 171690872 Blast Desc: protein product [Podospora anserina] gi|170945384|emb|CAP71496.1| protein product [Podospora anserina]
  misc_feature (165)..(1273): NCBI GI: 125987730 Blast Desc: protein product [Podospora anserina] gi|170945384|emb|CAP71496.1| protein product [Podospora anserina]
  misc_feature (132)..(1273): NCBI GI: 116195892 Blast Desc: CHGG_04544 [Chaetomium globosum CBS 148.51] gi|88180457|gb|EAQ87925.1| CHGG_04544 [Chaetomium globosum CBS 148.51]
  misc_feature (257)..(1269): NCBI GI: 39979138 Blast Desc: related to sphingosine-1-phosphate lyase [Neurospora crassa]
  misc_feature (165)..(1284): NCBI GI: 256720975 Blast Desc: NECHADRAFT_49834 [Nectria haematococca mpVI 77-13-4]
  misc_feature (223)..(1255): NCBI GI: 189198259 Blast Desc: GPI inositol-deacylase [Pyrenophora tritici-repentis Pt-1C-BFP] gi|187981415|gb|EDU48041.1| GPI inositol-deacylase [Pyrenophora tritici-repentis Pt-1C-BFP]
  misc_feature (165)..(1280): NCBI GI: 240107233 Blast Desc: CPC735_065180 [Coccidioides posadasii C735 delta SOWgp]
MARMLGVAPVGLHRLHLDKGRDKTSITAAGYHINQTSVVRLIPSILPSCAAVGSPSFETSPKPRVPERPKHQVPQTNGSQLLAAPRSSHTELQQRHCGTAESRLPALLVLGRTASLFTTSVLSLSLCLYSPYHAGSPLVRPDRDIYRDPVAPEGARRSSSYAAPMQRRSSASSEDSADASASVHAARSRSRGQSRPAVSSTRNRISNNQLNWQQAEARNDAAKNKPTMASSKTSGDISTEDGKQTTLKHRTRLVESQSPWRLSLLALFTSLAGIAILVSIVYSAGNLQCDPKGCRMSWMSPSYVPCTDFDTEHTRFASKYSLYLYREQGIETRPKVRGIPVLFIPGNAGSYKQVRSIASESARYFHETLHHDAAALKAGTRSLDFFTVDFNEDFTAFHGQTMLDQAEYVNEAIRYILSLYLDPNVTDRDPNLPDPSSVIILGHSMGGIVARAAFVMPNFQPQSINSIITMSAPHARAPVTFDPLIVKIYEDINHHWRRAYSTKSAADNSLSHVTLVSIAGGGLDTVVPSDYASLESLVPETHGFTVFTSTIPNVWTSMDHQAITWCDQFRKVMVRTLYEIVDGTHKSQTKPRAERMRIFREKFLTGLEGSAGVTPVDSASTTLLSVEDISDAIQTQERFVLRNFGTDRKAKAYLVPIPQGELPHAKKFSLLSNSELDQPRDSGRLEVLLCNLHSPQSDQHLSPFSNELDLAGNSSAATSLACKNVVKDVVTLPASTRATKTPFFLEREQPIPPFSYLEYDITSISDYQFVAVIDKADTPTYGWVVADFSNSADSQLALSVTLTQLITNGLQLELPAKRPTMIDVKIPSIQSSLLAYRLEVGDQLCGDRREMLRPLIRQYINKPYESKYFVDAQNVEINLHGVSPFVPPPLDTKHSDNGVGLQFWTDPTCEANISIKLTVDPIGSLGKLYMRYRTVFASFPQLVVGLVLRKQFRVYDTTGTFIPFSQSLGKCIRQSLPMLLLSMTFLSLSLGQLGSVDYRAIWPWRNSTELIDFAQNDLLIGTTDSFFWFLIPMIGIICIGVCIVMHYIALVLVSLFGFIYTWIFVRRFPIGDKREDSLSKHAMAPVFVPTSPHQRLLTIGVLLLLISTIIPYQFAYVIACIIQLTTCVRAWCVARETPSLTNKNFTNYVHTIFLLMVWNLPINLPTVVVWVRNLAIHWFTPFSSTHNIILILPFILLVENLTAGRMIPPITNRLRHLTNILFFTTAVYAAIYGVSHAYMLHYLVNLIAAWLVAIHTTADSWALVGIKSLVNNETPSANDSKQSKRT

SEQ ID NO: 9789 - DNA, 4898 bp, Muscodor strobelii
  misc_feature: SGI EST ID NO. CUFF.23192.1
  misc_feature: Variant of the nucleotide sequence at SEQ ID NO 9787
cggaaataagggcaggatatgtactgtttaaaactcgaacaatacttctagatctctgcaaatcgagcagaagtgcggaacatgggacgagggggagaaagtacttgcagatagaaaggttgcagcaaacgaaattcaaacttgcttaggtcgagcgaccccctgtccgggtgtccgaagatggcgaggatgctgggtgtggcccctgttggactgcatcgactgcatctcgataaaggccgcgataaaacaagcatcacggccgcaggttatcacatcaaccagacttcagtcgtcagactgattccttccatactcccctcctgtgcagctgttgggtccccttcgtttgagaccagtccgaaacctcgagttccggagcgtcgttcgttacacctcgttcaccgatattgcttctttttgcgcctctcgcttttcatgtgcatctcttgattttctttccgtttggcgccggcaagtgggctagcaggtcttagagtggttgtagagccgcatcagcagggcctaatttagtcaagcactggcctcgatcgactgttttttatagagcttaattaaggtagccaagcaccaagttccccagaccaacggctcccagctcctcgcagctcctcgcagctcgcacacggaattgcagcagcgtcattgcggaaccgccgagtctcgactgcccgccctgctcgtgctgggtcgcacagcttccctcttcaccacctcagtcctctccctctctctgtgtctctacagcccgtaccacgctggctcgccgctcgttcgccccgacagagacatttatcgagaccccgtcgcacccgagggcgctcgccggagctcctcctacgctgccccgatgcagaggcgttcgtcagcgtcgtctgaagacagcgccgacgcttccgcctccgtccacgctgcgcgctcccgctcccgcggccagtcccgccccgcagtttcctcgacgcgcaaccgcatctccaacaaccaattgaactggcagcaggccgaggcgcggaacgatgctgccaagaacaagcccacgatggcctcctccaagacgtcgggcgacatcagcaccgaagacggcaagcagacgacgctgaagcaccggacgcgccttgtcgagtcgcagagcccctggcggctgtcgctgctggccctgttcacgagcctggcgggcatcgccatcctggtctcgatcgtctactcggcgggcaacctccagtgcgatcccaagggctgccgcatgtcgtggatgagcccctcctacgtgccctgcaccgacttcgacaccgagcacacgaggtttgccagcaagtattcgctctatctataccgcgagcagggcatcgagacacgaccaaaggtcagagggatcccggtcttattcataccaggcaatgctggaagttacaaacaagtgcgatccatcgcatccgaatccgctcgctacttccacgagacgttgcatcatgacgctgccgctttgaaagctgggactcggagcttggatttctttacggtagatttcaacgaggactttacggccttccacggccagaccatgctcgaccaggccgaatacgtcaatgaggccatcagatacatcctgtcgctatacttggaccccaacgtgactgatcgcgatcccaatcttcccgacccgtcttctgtcatcatactcggtcactccatgggaggcatcgtggcccgagcggcattcgttatgcccaacttccaaccacagtccatcaactccatcatcaccatgtcagctccgcatgcaagggcacctgtcaccttcgacccgctgattgtcaagatatacgaggacatcaatcatcattggcgacgtgcgtactcgacaaagtccgcagcggataattctctatcacacgtcactctcgtttctattgccggtgggggtctcgatacggtggttccctcggattacgcaagcctagaatctctagtgcccgagacacatggattcacggtgttcacgtctacaattccaaacgtatggaccagcatggaccatcaggcaatcacgtggtgcgatcaattccgaaaagtcatggttcgaacgctgtacgaaatcgttgacggcacccacaaatcccagacgaagccccgagccgaacgaatgcggatcttcagggagaaatttttgacaggattggaaggatctgctggagtgactcctgtcgactcggcctctactacgttgctttctgtggaagacatctctgatgcgatccagacacaagagcgatttgtacttcgcaactttggtacggataggaaagccaaggcttatcttgttcctattccccagggcgaacttccgcatgccaagaagttctcgttgctgtcgaacagcgagcttgatcaaccaagagacagtggcaggctagaagttctgctttgtaatcttcattctccgcaaagcgatcagcatctttcgcctttctcaaacgaattagatcttgccggcaatagtagtgctgctactagcctggcttgcaagaatgttgtgaaagacgtggtgactttaccagcttccacacgtgctacgaagaccccttttttcctggagcgggagcaaccaatcccaccgttttcttatcttgagtacgacatcacaagtatttcggactatcagtttgtagcggtcatagacaaagcggacactccgacatatggctgggtagttgccgacttcagcaactcagctgattctcaactagcgctgtcggtgactctcacacagctcatcaccaatggactgcaactcgaacttccggcgaaacgtcctacaatgatcgatgtaaagataccatctattcagagtagcttgctggcctatcgcctagaggtgggcgatcaactttgcggcgatcgcagagaaatgcttcgtcccttgattaggcagtatattaataagccttatgagtcgaaatatttcgttgacgcgcagaatgttgagatcaatctccacggcgtgtctccatttgttccgccacctcttgatacaaagcatagcgacaatggagtgggcctgcagttttggactgatccaacatgcgaagccaacatatcgatcaagctcaccgtcgacccaattggcagccttggaaagctgtacatgcgttaccggactgtattcgcctcgtttccccaactggttgtcggtctagtgttacgcaaacaattccgagtatacgacactactggtactttcatccccttcagccaaagcctcggaaaatgcattcgacaatcacttccaatgctgttactgtctatgaccttcttgtcactgtcgcttggccagttaggttctgtggactacagggccatttggccatggcgcaacagtacagaactgatcgactttgctcagaacgatcttctcattggtacaacagactcatttttctggtttctgattcccatgataggcattatctgtatcggagtttgcatcgttatgcattacattgctcttgtcctagtgtctcttttcggtttcatctatacatggatcttcgttcgcaggttcccaattggtgataaaagggaggattccctatccaagcacgcgatggcacccgtattcgtaccaacttcgcctcaccagcggttactaacgatcggtgtacttctgctgcttatttcgacaatcatcccttaccaatttgcatacgtcatcgcttgcataatacaactcaccacatgcgttcgagcgtggtgtgtagctcgagagaccccgtcgctcacaaacaagaacttcaccaactacgtacacactatcttcctcttgatggtctggaatttgcccatcaatcttcccaccgtggtcgtctgggttcggaacttagccatacactggtttacgcccttctcttccactcacaacattatattgatcctgcctttcatcttgcttgttgagaatctcacagctggcaggatgattcctcccattacaaatcggctgcgacacctgacaaacatactgttcttcactacagcggtgtatgcagctatctatggcgtatcgcatgcttacatgctacactacttggtcaatttgatcgcagcatggcttgtagcaatccataccacagctgattcctgggctttggttggcattaagtcactggtaaacaacgaaacgccgagcgccaatgactcaaaacagagcaaacgcacatgaggttcagatcaatatcgtttccggtagcagcttcgaggtagaaatccaacacacgttactggatatcatgaattggagcagcaataatccgtacaatcataggcttcatatcatcaagggatatcatatgctcgctgatatttttcgcctgaagttcgaatgcctcaaagaacacgaccaccattttctgcatcaccgcccttcctctgcgacgaacatttcacactccggatttcctcctctctttccctttgtttcaattctcatagcattgcatcttaatacattgggaccggcgttcagctgcagtggtgaattttgctttatagagggaccggatggcggcttgcatctccctttttccatccctgctgctaatttttaatgcctttgactggcctgtcggcttcgtccacctcagaggttcactttggcgctgacggaggacttgatttgaggcgaggataccattccttgccaagcgtagcaacatttgatgtgatgggaggtctgtagaagtatagcttgaagaaatggctggtgttgaggacaacacctggttggcgatgtaccactgtggcgatcttaggatagagatagtctatcaatgaaatcaaaggaagtaaaacaaagtctagtaatcatggagtgacagcag

SEQ ID NO: 9790 - DNA, 1677 bp, Muscodor strobelii
  misc_feature: SGI cDNA ID NO. 563077
  misc_feature: Encodes the peptide sequence at SEQ ID NO 9791
atgacagtcgataactctaagcacaatgctcgtatggtgtccagcgtggccgccacctttatcgctttagcatgcggtaccaactatgtctactcagcctgggcgccacagtttgcggacaggctacgtctgtccgcaactcaaagtgaactgataggtctcgccggcaatctaggcatgtatctgttcggtataccgatagggatgttcgtcgatagtcgtgggccacggcctgctgtgctcgtcggctccgtcctcatgctcctcggctacctaccgattcagagagcatatgaagccggtgaagggtctatcccatggctcagccttgcttctttgctgaccggcctcggtggctgcatggcgtttgcagctgctgtgaagacaagcgccctgaactggccacaccaccgcggcaccgctactgctttccctcttgctgccttcggcttgagtgcgttctttttctcgcttgtgggctcgatcgcatttcctggccacccggggaagttcttgatgctcctagccgtagggccatttgctataacgttcgtcgggttcttcttcctacgtgtacttcccaccggccactcgacatatcaagctgtaccggccgccgatccaggcatgacggactctcaagagctgcatcggacactttccggtcaatcgaaggtgtcgcgagaccctactgaacctggtatgtcatctacctctgccacagtgacacatcgacatcccccagacccagaccctgaggacccaaatgagcccagagaccccgataattatggaccaaaccgagcccgtgacattgaggctgctgcgtactcgaatgttgccgcgaccggtgaagtagatgtggatgaggcctcctcccttctctcgtattcctcagccgcctcgtcattaccaggggaagtccccttgcagagcagtattgatttagatcgttctcatcatatagatatccgaggatggaagcttctgaaaaaccaggaagcctgggagctttttactattatgggcatactatctggaattggcctcatgacgattaacaatattggaaacgatgccacagccctctggaaacactacgacgactctatagacgacaagacgctcgtgcttcggcagcaaatgcatgtatccattctctcagtcggatcattctctggacgtctcctcagtggcgtggggtccgactttcttgtaaaagtcctgcacgcaagccgaatttggtgcgtggtcattgcggcacttatcttctctctagcacaaatatgtgctttgaatattctgaatccgcacttccttggcttcgtgtctggatttagcggcctgggttacggatttctgttcggagtatatccatcgatcgtagccgagtctttcggcgtccacggactgtcacagaattggggcttcatgacattaagtcctgttatttcgagcaacatcttcaacctattttacggaatgatattcgatgcacactctgttgttgaagcggacggaaagagaaggtgcgaggagggaatcgagtgttatcgctctgcgtacgatgtcacgctggctgcgtgtggactaggtttggcggtgacgctgtatgtgatttggcatcaggctcggggtaggagtagagaggctggaaaggggcatgcaggtgaatag

SEQ ID NO: 9791 - protein, 558 aa, Muscodor strobelii
  misc_feature: SGI Peptide ID NO. 563077
  misc_feature (17)..(486): Pfam Id: PF07690 Pfam Desc: Major Facilitator Superfamily
  misc_feature (4)..(556): NCBI GI: 116195882 Blast Desc: CHGG_04539 [Chaetomium globosum CBS 148.51] gi|88180452|gb|EAQ87920.1| CHGG_04539 [Chaetomium globosum CBS 148.51]
  misc_feature (3)..(558): NCBI GI: 171690860 Blast Desc: protein product [Podospora anserina] gi|170945378|emb|CAP71490.1| protein product [Podospora anserina]
  misc_feature (3)..(553): NCBI GI: 164423637 Blast Desc: NCU07985 [Neurospora crassa OR74A] gi|157070177|gb|EAA33419.2| conserved [Neurospora crassa OR74A]
  misc_feature (8)..(554): NCBI GI: 256720755 Blast Desc: NECHADRAFT_105487 [Nectria haematococca mpVI 77-13-4]
  misc_feature (10)..(558): NCBI GI: 156049999 Blast Desc: SS1G_07585 [Sclerotinia sclerotiorum 1980] gi|154691987|gb|EDN91725.1| SS1G_07585 [Sclerotinia sclerotiorum 1980]
  misc_feature (10)..(558): NCBI GI: 154318056 Blast Desc: BC1G_03011 [Botryotinia fuckeliana B05.10] gi|150843669|gb|EDN18862.1| BC1G_03011 [Botryotinia fuckeliana B05.10]
  misc_feature (60)..(550): NCBI GI: 261355799 Blast Desc: conserved [Verticillium albo-atrum VaMs.102]
  misc_feature (1)..(554): NCBI GI: 226286595 Blast Desc: conserved [Paracoccidioides brasiliensis Pb18]
  misc_feature (3)..(554): NCBI GI: 225684830 Blast Desc: conserved [Paracoccidioides brasiliensis Pb03]
  misc_feature (4)..(545): NCBI GI: 238496773 Blast Desc: MFS transporter, [Aspergillus flavus NRRL3357] gi|220694502|gb|EED50846.1| MFS transporter, [Aspergillus flavus NRRL3357]
MTVDNSKHNARMVSSVAATFIALACGTNYVYSAWAPQFADRLRLSATQSELIGLAGNLGMYLFGIPIGMFVDSRGPRPAVLVGSVLMLLGYLPIQRAYEAGEGSIPWLSLASLLTGLGGCMAFAAAVKTSALNWPHHRGTATAFPLAAFGLSAFFFSLVGSIAFPGHPGKFLMLLAVGPFAITFVGFFFLRVLPTGHSTYQAVPAADPGMTDSQELHRTLSGQSKVSRDPTEPGMSSTSATVTHRHPPDPDPEDPNEPRDPDNYGPNRARDIEAAAYSNVAATGEVDVDEASSLLSYSSAASSLPGEVPLQSSIDLDRSHHIDIRGWKLLKNQEAWELFTIMGILSGIGLMTINNIGNDATALWKHYDDSIDDKTLVLRQQMHVSILSVGSFSGRLLSGVGSDFLVKVLHASRIWCVVIAALIFSLAQICALNILNPHFLGFVSGFSGLGYGFLFGVYPSIVAESFGVHGLSQNWGFMTLSPVISSNIFNLFYGMIFDAHSVVEADGKRRCEEGIECYRSAYDVTLAACGLGLAVTLYVIWHQARGRSREAGKGHAGE

SEQ ID NO: 9792 - DNA, 2457 bp, Muscodor strobelii
  misc_feature: SGI EST ID NO. CUFF.23129.1
  misc_feature: Variant of the nucleotide sequence at SEQ ID NO 9790
agacataccggcccattggtccttgataagcagccaatctttaacccgtacggcttgaccctaggtccttgacaatgcctgaatggaacgtccagttattcgagacacgatagcgcggacgtgtagctgacgacaacgccttgtcaactctaaaaattcgtccttctctttctactttacatactacataccgcatctatctcgcttcatagatctatcttatacactcatcctcgattggctagactggagatgactgctatctcactcatacaactaatcttgagtcaacttgcgtcccgataaccgaccgtcagctcccttatccttgtttcacacgaggatccaagactcttatgtaaactttcagccctgccctgacgatccttcttgtgaatttagatcaacttgtcctttatgctctgagacattcatcaacttctaaatttgctatttgctcacttttgtcgctcatttgctgcctacttccattcgatttctctgtacattgctattaggccagaagatatgatattttagagatatctcagccaagacttcatacatacatacatatatcgttagattatctttagacaaccatgacagtcgataactctaagcacaatgctcgtatggtgtccagcgtggccgccacctttatcgctttagcatgcggtaccaactatgtctactcagcctgggcgccacagtttgcggacaggctacgtctgtccgcaactcaaagtgaactgataggtctcgccggcaatctaggcatgtatctgttcggtataccgatagggatgttcgtcgatagtcgtgggccacggcctgctgtgctcgtcggctccgtcctcatgctcctcggctacctaccgattcagagagcatatgaagccggtgaagggtctatcccatggctcagccttgcttctttgctgaccggcctcggtggctgcatggcgtttgcagctgctgtgaagacaagcgccctgaactggccacaccaccgcggcaccgctactgctttccctcttgctgccttcggcttgagtgcgttctttttctcgcttgtgggctcgatcgcatttcctggccacccggggaagttcttgatgctcctagccgtagggccatttgctataacgttcgtcgggttcttcttcctacgtgtacttcccaccggccactcgacatatcaagctgtaccggccgccgatccaggcatgacggactctcaagagctgcatcggacactttccggtcaatcgaaggtgtcgcgagaccctactgaacctgatatccgaggatggaagcttctgaaaaaccaggaagcctgggagctttttactattatgggcatactatctggaattggcctcatgacgattaacaatattggaaacgatgccacagccctctggaaacactacgacgactctatagacgacaagacgctcgtgcttcggcagcaaatgcatgtatccattctctcagtcggatcattctctggacgtctcctcagtggcgtggggtccgactttcttgtaaaagtcctgcacgcaagccgaatttggtgcgtggtcattgcggcacttatcttctctctagcacaaatatgtgctttgaatattctgaatccgcacttccttggcttcgtgtctggatttagcggcctgggttacggatttctgttcggagtatatccatcgatcgtagccgagtctttcggcgtccacggactgtcacagaattggggcttcatgacattaagtcctgttatttcgagcaacatcttcaacctattttacggaatgatattcgatgcacactctgttgttgaagcggacggaaagagaaggtgcgaggagggaatcgagtgttatcgctctgcgtacgatgtcacgctggctgcgtgtggactaggtttggcggtgacgctgtatgtgatttggcatcaggctcggggtaggagtagagaggctggaaaggggcatgcaggtgaataggtcgctgtagtggacgggttgctgtgctacagggaggcgaggcaactgcaacgcgcgacgcgtagcacatgtcgtgtcaaaccgcggcttccctttgttctcgcccaacaacagctcaccgccccaccatagactgttgccttatcaattcaattattaccactgcttcccatggagtggcgtcctaacccaatgggtaagaggtcagcttgtatatctgctcacgcaatatatcaactgcaatgtctaccaaggccaggggttcgagtcccagctcggtcacaatttcgatgatggcttttccggactaatcatgatggctcttccgattaacaatgatggccttccactactaggtagcaccaagaggtgtaactcctaaggtagttggaccgagcctagttaatcactatagcctagttagttgttcagcttaggaggcgtg

SEQ ID NO: 9793 - DNA, 1440 bp, Muscodor strobelii
  misc_feature: SGI cDNA ID NO. 563078
  misc_feature: Encodes the peptide sequence at SEQ ID NO 9794
atgggtgcgctgctctctctgcccatgctggcgctgcccggcgcaggcaccgtcgtctccatggccgcgagctgctgcggtgcggcgacctgctcaatggtctgcagtgcctgcgggaagtgcggcaacagtgtcgcgacccgcatcgcctatgcactcctgctgctggtcaactcgatcctgtcctggatcatgctcacgccctgggccatcaagaagctggaacacctcaccttcgactacgtcaagatccaatgctccgacggcgcctgcaccggctggctcgccgtccatcgcatcaacttcgccctcggtctgttccatctcatcttcgccggcctcttgttcggcgtcaccaactcgaaacagcctcgcgccgctatccagaatggttactggggccccaagatcatcgcctgggtcgcattcatcgtcctgtcgttccttatccccgatgccttcttccaggtctggggcaactacatctcctttttcggcggcatggtcttcctcatccttggtctcatcctcctcgtcgatctcgcacatacctgggccgaatactgtctcgaacaaattgaaaacaccgactctagactctggaggggtgttctcatcggatcaaccctcggcatgtacgttggtgctctagccatgaccattatccagtatatcttcttcgccaaggaagactgcgccatgaaccagtctgctatcactatcaaccttctgttctggcttgctatctccttcatctcggttcatccctccgtccaggaatacaaccccaaggccgggcttgcccagtctgccatggtcgccgtctactgtacatacctcactatgtccgccgtttccatggaacccgacaacaagtgcaacccattggttcgtgccgcaggaacaagaacaacatccgttgtcattggtgccatcgtcacgatgctaacagtagcatacaccaccactcgcgctgcaacgcagagtctcggtctcggcaacaatcgtggcgggatcaaactccccgaggaagacgagcacgatctcgtaacccaacaacccggccgtcgtgaaatgcgcgctgaagtcctgcgccgcgccgtagaggaaggcagtcttccagcagacgccctcctcgacgacgactctgacgacgaatccggcggaaacacagtacacgacgacgagcgtaatcgcacgcaatacgactactccgtcttccacatgattttcttcctcgccacatgctgggtcgccactttactcacgggtgtcgcggagggcgatgagattcagtgggataacgatgggtttgcgacggttggtcgcacgtattgggctagttgggtcaagattgttagtgcgtggttttgctacctgctctatatctggacgcttgttgcgcctgtggtgttgcctgagaggtttgatttcacgtag

SEQ ID NO: 9794 - protein, 479 aa, Muscodor strobelii
  misc_feature: SGI Peptide ID NO. 563078
  misc_feature (23)..(476): Pfam Id: PF03348 Pfam Desc: Serine incorporator (Serinc)
  misc_feature (23)..(329): Pfam Id: PF03348 Pfam Desc: Serine incorporator (Serinc)
  misc_feature (365)..(476): Pfam Id: PF03348 Pfam Desc: Serine incorporator (Serinc)
  misc_feature (1)..(479): NCBI GI: 46110098 Blast Desc: FG01931.1 [Gibberella zeae PH-1]
  misc_feature (1)..(479): NCBI GI: 256720974 Blast Desc: [Nectria haematococca mpVI 77-13-4]
  misc_feature (1)..(478): NCBI GI: 156050001 Blast Desc: SS1G_07586 [Sclerotinia sclerotiorum 1980] gi|154691988|gb|EDN91726.1| SS1G_07586 [Sclerotinia sclerotiorum 1980]
  misc_feature (1)..(477): NCBI GI: 85108898 Blast Desc: NCU07986 [Neurospora crassa OR74A] gi|28924267|gb|EAA33420.1| conserved [Neurospora crassa OR74A]
  misc_feature (1)..(476): NCBI GI: 169774647 Blast Desc: [Aspergillus oryzae RIB40] gi|238496771|ref|XP_002379621.1| membrane protein TMS1, [Aspergillus flavus NRRL3357] gi|83769654|dbj|BAE59789.1| protein
  misc_feature (1)..(479): NCBI GI: 226286593 Blast Desc: membrane protein TMS1 [Paracoccidioides brasiliensis Pb18]
  misc_feature (1)..(476): NCBI GI: 121716010 Blast Desc: membrane protein TMS1, [Aspergillus clavatus NRRL 1] gi|119403771|gb|EAW14188.1| membrane protein TMS1, [Aspergillus clavatus NRRL 1]
  misc_feature (1)..(479): NCBI GI: 226280717 Blast Desc: membrane protein TMS1 [Paracoccidioides brasiliensis Pb01]
  misc_feature (1)..(477): NCBI GI: 154275040 Blast Desc: conserved [Ajellomyces capsulatus NAm1] gi|150414811|gb|EDN10173.1| conserved [Ajellomyces capsulatus NAm1]
  misc_feature (13)..(478): NCBI GI: 116195884 Blast Desc: CHGG_04540 [Chaetomium globosum CBS 148.51] gi|88180453|gb|EAQ87921.1| CHGG_04540 [Chaetomium globosum CBS 148.51]
MGALLSLPMLALPGAGTVVSMAASCCGAATCSMVCSACGKCGNSVATRIAYALLLLVNSILSWIMLTPWAIKKLEHLTFDYVKIQCSDGACTGWLAVHRINFALGLFHLIFAGLLFGVTNSKQPRAAIQNGYWGPKIIAWVAFIVLSFLIPDAFFQVWGNYISFFGGMVFLILGLILLVDLAHTWAEYCLEQIENTDSRLWRGVLIGSTLGMYVGALAMTIIQYIFFAKEDCAMNQSAITINLLFWLAISFISVHPSVQEYNPKAGLAQSAMVAVYCTYLTMSAVSMEPDNKCNPLVRAAGTRTTSVVIGAIVTMLTVAYTTTRAATQSLGLGNNRGGIKLPEEDEHDLVTQQPGRREMRAEVLRRAVEEGSLPADALLDDDSDDESGGNTVHDDERNRTQYDYSVFHMIFFLATCWVATLLTGVAEGDEIQWDNDGFATVGRTYWASWVKIVSAWFCYLLYIWTLVAPVVLPERFDFT

SEQ ID NO: 9795 - DNA, 1985 bp, Muscodor strobelii
  misc_feature: SGI EST ID NO. CUFF.23113.0
  misc_feature: Variant of the nucleotide sequence at SEQ ID NO 9793
cttgctctctagaggtaacgacgtaatgccccatgatccacctttgcgcccatctccagccgccgtctccctgcttcaagttggttgctgcctccactacagacatcgcatgaccgtcggcctcatccctcgacatcacataacatcgacacggacatcgacaccgcatcactcgacccctagaacccctctcccactcgaacttactctgtcgccgcatgaaggcgtaggtcaaccaccccgacagacattatgggtgcgctgctctctctgcccatgctggcgctgcccggcgcaggcaccgtcgtctccatggccgcgagctgctgcggtgcggcgacctgctcaatggtctgcagtgcctgcgggaagtgcggcaacagtgtcgcgacccgcatcgcctatgcactcctgctgctggtcaactcgatcctgtcctggatcatgctcacgccctgggccatcaagaagctggaacacctcaccttcgactacgtcaagatccaatgctccgacggcgcctgcaccggctggctcgccgtccatcgcatcaacttcgccctcggtctgttccatctcatcttcgccggcctcttgttcggcgtcaccaactcgaaacagcctcgcgccgctatccagaatggttactggggccccaagatcatcgcctgggtcgcattcatcgtcctgtcgttccttatccccgatgccttcttccaggtctggggcaactacatctcctttttcggcggcatggtcttcctcatccttggtctcatcctcctcgtcgatctcgcacatacctgggccgaatactgtctcgaacaaattgaaaacaccgactctagactctggaggggtgttctcatcggatcaaccctcggcatgtacgttggtgctctagccatgaccattatccagtatatcttcttcgccaaggaagactgcgccatgaaccagtctgctatcactatcaaccttctgttctggcttgctatctccttcatctcggttcatccctccgtccaggaatacaaccccaaggccgggcttgcccagtctgccatggtcgccgtctactgtacatacctcactatgtccgccgtttccatggaacccgacaacaagtgcaacccattggttcgtgccgcaggaacaagaacaacatccgttgtcattggtgccatcgtcacgatgctaacagtagcatacaccaccactcgcgctgcaacgcagagtctcggtctcggcaacaatcgtggcgggatcaaactccccgaggaagacgagcacgatctcgtaacccaacaacccggccgtcgtgaaatgcgcgctgaagtcctgcgccgcgccgtagaggaaggcagtcttccagcagacgccctcctcgacgacgactctgacgacgaatccggcggaaacacagtacacgacgacgagcgtaatcgcacgcaatacgactactccgtcttccacatgattttcttcctcgccacatgctgggtcgccactttactcacgggtgtcgcggagggcgatgagattcagtgggataacgatgggtttgcgacggttggtcgcacgtattgggctagttgggtcaagattgttagtgcgtggttttgctacctgctctatatctggacgcttgttgcgcctgtggtgttgcctgagaggtttgatttcacgtagttgtagtgtgaagattgagattgattgttgggagttgaaggcgcatgggtggcatggaggatacctatatttgaaaacattcggcatgcttggcaaattgtacatacgcaaatatatttcttttttttagtagattgatgtagaaatattgattcccactttgtctgttaccaagttggcgcactgtggattaagacaaacggtgaatgaactgcaaaactacgaaaaccaaagtagagatgccgcgaattgagggataggagcatcaggaagttgtaccgctttcagtcagg

SEQ ID NO: 9796 - DNA, 1362 bp, Muscodor strobelii
  misc_feature: SGI cDNA ID NO. 563079
  misc_feature: Encodes the peptide sequence at SEQ ID NO 9797
atgtcttcaccgctcgacaacggatcttcgtccggtggtgacgatgcttccaagccgttgaacaaggctttcgccaaagtagacttagatggccacaatctacctccatcacccgcaccctcgagtccgtctaatggacggcgtcgatatgccctcgccaccgagctcgtctacactgactccaaagatcagtatggcgcctcgagcatccctatataccagtctgccaccttcaagcagacgtcgtctgccggcggcaacgagtatgattacacaagatccggcaaccccacccgaacacatctggaacgtcatatggccaagatcatgaatgccacccgtgctctcgccgtcggctccggcatgggcgccttggacgtcatcacaaggattctccgtcccggcgacgaggtcatcacgggcgacgatctctacggaggtaccaaccggctgcttacatacttatctaccaaccaaggtattattgtccgtcacgtggacacaactaacgtagatcgggtgcaagaggtgatttctgacaagacagccatggtgctcctggaaacgccaaccaacccactcatcaagattgtggacatgcccgccattgccaaggctgcccatgatgctaatccaaaagccctcgtcgttgttgacaacactatgctatcgccaatgctctgtaaccccctggagctaggagccgacatcgtctatgagtctggcaccaagtatctatctggacaccacgacattatggctggtataattgcctgcaatgatcccgcaatcggcgataagatgtacttcactattaactctactggctgcgggctctcaccaaatgactcattccttcttatgaggggagtcaagacattggctatcagaatggaaaagcaacaagcaaatgcccagctgatcgccgagttcttagagtcgcatggtttcaaggtccgttatccaggtcttaagtcacatcctcagtatgatcttcattggtccatggcgagaggtgctggtgctgtcttgtctttcgaaacaggcgacatagctttgtctgaaaggattgtggaggctgccaaattgtacgcaatctctgtcagtttcggctgtgtcaacagtctcatcagcatgccttgccgcatgagccatgccagcatcgacgcaaagactcgaaaagagcgacagatgcccgaggacatcatcagactttgcatcggcattgaagatgcccaggatttgattgatgacctttcccgatcgctcgtacaagcaggtgcagtgaccatcagcctcgatggtatacatgccacaggaatcgcagcagaaaccggtgctacgccgttggacactgcatga

SEQ ID NO: 9797 - protein, 453 aa, Muscodor strobelii
  misc_feature: SGI Peptide ID NO. 563079
  misc_feature (93)..(340): Pfam Id: PF01212 Pfam Desc: Beta-eliminating lyase
  misc_feature (53)..(424): Pfam Id: PF01053 Pfam Desc: Cys/Met metabolism PLP-dependent enzyme
  misc_feature (16)..(448): NCBI GI: 116195886 Blast Desc: CHGG_04541 [Chaetomium globosum CBS 148.51] gi|88180454|gb|EAQ87922.1| CHGG_04541 [Chaetomium globosum CBS 148.51]
  misc_feature (21)..(452): NCBI GI: 39971517 Blast Desc: MGG_07074 [Magnaporthe grisea 70-15] gi|145019538|gb|EDK03766.1| MGG_07074 [Magnaporthe grisea 70-15]
  misc_feature (22)..(438): NCBI GI: 171690878 Blast Desc: protein product [Podospora anserina] gi|170945387|emb|CAP71499.1| protein product [Podospora anserina]
  misc_feature (16)..(450): NCBI GI: 156045469 Blast Desc: SS1G_09924 [Sclerotinia sclerotiorum 1980] gi|154694318|gb|EDN94056.1| SS1G_09924 [Sclerotinia sclerotiorum 1980]
  misc_feature (12)..(450): NCBI GI: 154318946 Blast Desc: BC1G_02862 [Botryotinia fuckeliana B05.10] gi|6636350|gb|AAF20155.1|AF211176_1 cystathionine beta-lyase [Botryotinia fuckeliana] gi|150857992|gb|EDN33184.1| BC1G_02862
  misc_feature (9)..(443): NCBI GI: 261355802 Blast Desc: cystathionine beta-lyase [Verticillium albo-atrum VaMs.102]
  misc_feature (16)..(438): NCBI GI: 85108902 Blast Desc: cystathionine beta-lyase [Neurospora crassa OR74A] gi|15278108|gb|AAK94039.1|AF401237_1 cystathionine beta-lyase [Neurospora crassa] gi|28924268|gb|EAA33421.1| cystathionine
  misc_feature (1)..(450): NCBI GI: 256720754 Blast Desc: [Nectria haematococca mpVI 77-13-4]
  misc_feature (30)..(450): NCBI GI: 46110100 Blast Desc: FG01932.1 [Gibberella zeae PH-1]
  misc_feature (20)..(444): NCBI GI: 242793987 Blast Desc: cystathionine beta-lyase MetG [Talaromyces stipitatus ATCC 10500] gi|218718866|gb|EED18286.1| cystathionine beta-lyase MetG [Talaromyces stipitatus ATCC 10500]
  misc_feature (49)..(426): SWISSPROT Homolog: EC 4.4.1.8 Cystathionine beta-lyase
MSSPLDNGSSSGGDDASKPLNKAFAKVDLDGHNLPPSPAPSSPSNGRRRYALATELVYTDSKDQYGASSIPIYQSATFKQTSSAGGNEYDYTRSGNPTRTHLERHMAKIMNATRALAVGSGMGALDVITRILRPGDEVITGDDLYGGTNRLLTYLSTNQGIIVRHVDTTNVDRVQEVISDKTAMVLLETPTNPLIKIVDMPAIAKAAHDANPKALVVVDNTMLSPMLCNPLELGADIVYESGTKYLSGHHDIMAGIIACNDPAIGDKMYFTINSTGCGLSPNDSFLLMRGVKTLAIRMEKQQANAQLIAEFLESHGFKVRYPGLKSHPQYDLHWSMARGAGAVLSFETGDIALSERIVEAAKLYAISVSFGCVNSLISMPCRMSHASIDAKTRKERQMPEDIIRLCIGIEDAQDLIDDLSRSLVQAGAVTISLDGIHATGIAAETGATPLDTA

SEQ ID NO: 9798 - DNA, 2756 bp, Muscodor strobelii
  misc_feature: SGI EST ID NO. CUFF.23126.0
  misc_feature: Variant of the nucleotide sequence at SEQ ID NO 9796
ctcgacgggtgggagagccaggcagtcacagctctgtcacagctcgccgagatatgtccagacctctgctagagctcgatattcatcttttcattgggagacggacactacacaccgacacggcgctgtgacgagtcagcaacctgtcatcgtatttcccggtaggctaatgactacgacctgttactccatgcatctcgactatctcaactaatagacaactacctgccatattactttgttcctggtgcaacccaatctgcatatcacctgcttttcatacaacctcaacctcaacctcgcaacaccccttgttcaagaacccagtctgcgtgtcaattgactttgtgcctgccgggattgtcttctcgaaaagtcttccacgcgtctgctctcgtcagccttttaccctctcaactcctctcataccaatcaatcacatcgccatgtcttcaccgctcgacaacggatcttcgtccggtggtgacgatgcttccaagccgttgaacaaggctttcgccaaagtagacttagatggccacaatctacctccatcacccgcaccctcgagtccgtctaatggacggcgtcgatatgccctcgccaccgagctcgtctacactgactccaaagatcagtatggcgcctcgagcatccctatataccagtctgccaccttcaagcagacgtcgtctgccggcggcaacgagtatgattacacaagatccggcaaccccacccgaacacatctggaacgtcatatggccaagatcatgaatgccacccgtgctctcgccgtcggctccggcatgggcgccttggacgtcatcacaaggattctccgtcccggcgacgaggtcatcacgggcgacgatctctacggaggtaccaaccggctgcttacatacttatctaccaaccaaggtattattgtccgtcacgtggacacaactaacgtagatcgggtgcaagaggtgatttctgacaagacagccatggtgctcctggaaacgccaaccaacccactcatcaagattgtggacatgcccgccattgccaaggctgcccatgatgctaatccaaaagccctcgtcgttgttgacaacactatgctatcgccaatgctctgtaaccccctggagctaggagccgacatcgtctatgagtctggcaccaagtatctatctggacaccacgacattatggctggtataattgcctgcaatgatcccgcaatcggcgataagatgtacttcactattaactctactggctgcgggctctcaccaaatgactcattccttcttatgaggggagtcaagacattggctatcagaatggaaaagcaacaagcaaatgcccagctgatcgccgagttcttagagtcgcatggtttcaaggtccgttatccaggtcttaagtcacatcctcagtatgatcttcattggtccatggcgagaggtgctggtgctgtcttgtctttcgaaacaggcgacatagctttgtctgaaaggattgtggaggctgccaaattgtacgcaatctctgtcagtttcggctgtgtcaacagtctcatcagcatgccttgccgcatgagccatgccagcatcgacgcaaagactcgaaaagagcgacagatgcccgaggacatcatcagactttgcatcggcattgaagatgcccaggatttgattgatgacctttcccgatcgctcgtacaagcaggtgcagtgaccatcagcctcgatggtatacatgccacaggaatcgcagcagaaaccggtgctacgccgttggacactgcatgagatgcatatcatctatagcttctgcagaatctcgtgtgatctcaacctcaccacggaagcggacgattttcaattatgattggtcttagattcattcatacgaaataaacacactgccattcttggcattatcggactttctctctcaccaactgcgagcggtcgtccaactccagaacatatacagagagcccaggctccgttagcaagaattactcttgggcttcgtcttactgcttgacgccagctggttgttcgatgttgaccctgttcaatgaaattcatcagccctcaatcgtggttctgcgtaaaagcagatactcacgaggttttggctgctgcatcaattcgctgaaagtcacagaatctcgagatgtttgtgtcttccatcgttgaaacatctccttgcgctcgtagtcggcagcagaagtttggccaacggtgtcatcgacttggccagtgcggctttggatcttgcattagacacctgtcttatcacacgaaaaagaaacatacatggctgacttagtgcttgtgggcatcataaaaggcatatctttgacgacgaatggatttgtaacaaaactggaaaatcgggtggtttgtactgaacaattcaagcaaataataccctcagtggactttcgaagattcttgatactcgaagatgcgttttccctaaacgtcgacattgcgagtgctgtgttccttttttatacttgaaatcgaggccaggttactattgtccgagtgggcatccgttttcacgatactttcaaggtctgccggcagtgtaatcaccgaaggccttgtgcagctggtcatagtctagcggcctcgatttaattggctcgtcgagctcgcactaatgatggagacagagtgatccggtcgaagatgatgtaaagcattcatcgtgaaggacgttgtaccaggaatgacataggc

SEQ ID NO: 9799 - DNA, 1260 bp, Muscodor strobelii
  misc_feature: SGI cDNA ID NO. 563080
  misc_feature: Reduced expression when VOC is produced
  misc_feature: Encodes the peptide sequence at SEQ ID NO 9800
atggtcgatcgcagacgaaccggcgccgactacatctgggatgtcttgctgttgctgggaacggccggtgccgcatggtacttaaccaagaatgccttgtcgagtctacaaaacaccctcgccgacccggataaggaaaagcacgaacaagcccgaaacaaagcaaaagccaatctttctcgactccggaggtcaagagaaacggggacggctggtgacgatgaatcgggcacgggcaccgaccacaggggtcagcgcatcgaagatttggtcctgaacgagtacgaaaacatggtggccctggaagtggtcgcccctgaagacattgccgttgggtttgacgacatcggcggcctcgatgacataatagaagaagtcaaggaatccgtcatatacccgctcaccatgcctcacctctactcccacgccgctcctcttctctccgctccctcaggtgttcttctgtatgggcctccagggtgtggcaagactatgttggccaaagccgtagcccacgaaagcggcgcatcatttatcaacctacacatctccaccttgactgagaagtggtacggagactcgaacaagctcgtacgcgccgtcttctctcttgcccggaagctgcagcccgctatcatcttcatagacgagatagacgcggttctaggaacgaggcgaagcggtgaacacgaagccagcggaatggtcaaagccgaattcatgactttatgggatggtcttacgtctgctaatacacagggcctaccagcacaaatcgtggttctcggggcgacaaaccggattcacgacatcgacgaagctatattgcgccgaatgccaaagaagttccccgtttcgctgccagacaaaagccagcgacttcggatattgcagcttttactgaaggacacaaagacagaacccaacaacttcaatatggagtacattgcgcgcgtcacggccggcatgtctggcagcgacatcaaagaagcatgccgggatgctgccatggttcccgtccgcgaattcatccgcgagcaccgggctaccgggagcgccatgtccagcattgatcccaagaaggtccggggtatgaggactgaggactttttcggtcgtaaaggcgggggccagatgttaatgaggaaccatgctcgagccaagtcgtcaagctcagagtacgaagacatcgaggaggaagacgagctcacggccgacactgcaaaatctaacgcaagggtcgtagaggaacaagcataa

SEQ ID NO: 9800 - protein, 419 aa, Muscodor strobelii
  misc_feature: SGI Peptide ID NO. 563080
  misc_feature (152)..(341): Pfam Id: PF00004 Pfam Desc: ATPase family associated with various cellular activities (AAA)
  misc_feature (152)..(172): Pfam Id: PF07728 Pfam Desc: ATPase family associated with various cellular activities (AAA)
  misc_feature (153)..(169): Pfam Id: PF01078 Pfam Desc: Magnesium chelatase, subunit ChlI
  misc_feature (1)..(400): NCBI GI: 39971519 Blast Desc: conserved [Magnaporthe grisea 70-15] gi|59802930|gb|AAX07670.1| MSP1 protein-like protein [Magnaporthe grisea] gi|145019539|gb|EDK03767.1| conserved [Magnaporthe grisea
  misc_feature (14)..(400): NCBI GI: 261355803 Blast Desc: ATPase family AAA domain-containing protein [Verticillium albo-atrum VaMs.102]
  misc_feature (1)..(376): NCBI GI: 46110102 Blast Desc: FG01933.1 [Gibberella zeae PH-1]
  misc_feature (1)..(401): NCBI GI: 256720753 Blast Desc: [Nectria haematococca mpVI 77-13-4]
  misc_feature (12)..(399): NCBI GI: 154318948 Blast Desc: BC1G_02863 [Botryotinia fuckeliana B05.10] gi|150857993|gb|EDN33185.1| BC1G_02863 [Botryotinia fuckeliana B05.10]
  misc_feature (1)..(408): NCBI GI: 116195888 Blast Desc: CHGG_04542 [Chaetomium globosum CBS 148.51] gi|88180455|gb|EAQ87923.1| CHGG_04542 [Chaetomium globosum CBS 148.51]
  misc_feature (42)..(399): NCBI GI: 156045467 Blast Desc: SS1G_09923 [Sclerotinia sclerotiorum 1980] gi|154694317|gb|EDN94055.1| SS1G_09923 [Sclerotinia sclerotiorum 1980]
  misc_feature (16)..(402): NCBI GI: 171690880 Blast Desc: protein product [Podospora anserina] gi|170945388|emb|CAP71500.1| protein product [Podospora anserina]
  misc_feature (1)..(402): NCBI GI: 85108906 Blast Desc: ATPase family AAA domain-containing protein 1 [Neurospora crassa OR74A] gi|28924269|gb|EAA33422.1| ATPase family AAA domain-containing protein 1 [Neurospora crassa OR74A]
  misc_feature (6)..(412): NCBI GI: 255936031 Blast Desc: Pc13g06080 [Penicillium chrysogenum Wisconsin 54-1255] gi|211583662|emb|CAP91677.1| Pc13g06080 [Penicillium chrysogenum Wisconsin 54-1255]
  misc_feature (124)..(371): SWISSPROT Homolog: EC 3.6.4.3 Microtubule-severing ATPase
  misc_feature: Useful for introducing or modulating the production of volatile compounds
MVDRRRTGADYIWDVLLLLGTAGAAWYLTKNALSSLQNTLADPDKEKHEQARNKAKANLSRLRRSRETGTAGDDESGTGTDHRGQRIEDLVLNEYENMVALEVVAPEDIAVGFDDIGGLDDIIEEVKESVIYPLTMPHLYSHAAPLLSAPSGVLLYGPPGCGKTMLAKAVAHESGASFINLHISTLTEKWYGDSNKLVRAVFSLARKLQPAIIFIDEIDAVLGTRRSGEHEASGMVKAEFMTLWDGLTSANTQGLPAQIVVLGATNRIHDIDEAILRRMPKKFPVSLPDKSQRLRILQLLLKDTKTEPNNFNMEYIARVTAGMSGSDIKEACRDAAMVPVREFIREHRATGSAMSSIDPKKVRGMRTEDFFGRKGGGQMLMRNHARAKSSSSEYEDIEEEDELTADTAKSNARVVEEQA

SEQ ID NO: 9801 - DNA, 1881 bp, Muscodor strobelii
  misc_feature: SGI EST ID NO. CUFF.23405.2
  misc_feature: Variant of the nucleotide sequence at SEQ ID NO 9799
attacctttaccgtagtcgtacctaaatacatgcagacatttctttttcttacctatccgagcctttattccacccatccagaggcgcgccacacagatatcatctgtctcgccccagcctccgccgccgccttcgcttccctttgggagacagccaatgtttctcaggtggctgcatgagaaatcacaagcaatggtcgatcgcagacgaaccggcgccgactacatctgggatgtcttgctgttgctgggaacggccggtgccgcatggtacttaaccaagaatgccttgtcgagtctacaaaacaccctcgccgacccggataaggaaaagcacgaacaagcccgaaacaaagcaaaagccaatctttctcgactccggaggtcaagagaaacggggacggctggtgacgatgaatcgggcacgggcaccgaccacaggggtcagcgcatcgaagatttggtcctgaacgagtacgaaaacatggtggccctggaagtggtcgcccctgaagacattgccgttgggtttgacgacatcggcggcctcgatgacataatagaagaagtcaaggaatccgtcatatacccgctcaccatgcctcacctctactcccacgccgctcctcttctctccgctccctcaggtgttcttctgtatgggcctccagggtgtggcaagactatgttggccaaagccgtagcccacgaaagcggcgcatcatttatcaacctacacatctccaccttgactgagaagtggtacggagactcgaacaagctcgtacgcgccgtcttctctcttgcccggaagctgcagcccgctatcatcttcatagacgagatagacgcggttctaggaacgaggcgaagcggtgaacacgaagccagcggaatggtcaaagccgaattcatgactttatgggatggtcttacgtctgctaatacacagggcctaccagcacaaatcgtggttctcggggcgacaaaccggattcacgacatcgacgaagctatattgcgccgaatgccaaagaagttccccgtttcgctgccagacaaaagccagcgacttcggatattgcagcttttactgaaggacacaaagacagaacccaacaacttcaatatggagtacattgcgcgcgtcacggccggcatgtctggcagcgacatcaaagaagcatgccgggatgctgccatggttcccgtccgcgaattcatccgcgagcaccgggctaccgggagcgccatgtccagcattgatcccaagaaggtccggggtatgaggactgaggactttttcggtcgtaaaggcgggggccagatgttaatgaggaaccatgctcgagccaagtcgtcaagctcagagtacgaagacatcgaggaggaagacgagctcacggccgacactgcaaaatctaacgcaagggtcgtagaggaacaagcataatcttgtacacataacgcaccaaaacgtgacactcgaaattgtttaactcggcgttatggcaggggaacgacgactaaccagcgcaactactctttaggcggcttgtgaaaaacatatttggatagatccgccggcgatgatagatggcgacccagatgtatgataagcaattacaagctttgggcaccgtatatgtccaggcaatgtttttaaatggttcccgagctacaaataactactgtaactgggaggacatttccgatccgatagtacaaatgtagaccaattcgaagtcccaattttaccgtcgcacataagtatccagatgtcaagacatcatcaatgctcaaggtgatcgatctgtctagcgaggatctattgatggtatagacgaccactgccgtcggagtgaatgattgtcaattgtg

SEQ ID NO: 9802 - DNA, 1290 bp, Muscodor strobelii
  misc_feature: SGI cDNA ID NO. 563081
  misc_feature: Reduced expression when VOC is produced
  misc_feature: Encodes the peptide sequence at SEQ ID NO 9803
atgcttcccgacgccctttggtcgactcttgacaccacgcttgccttcgtgcagcgccatcgcactgtgtttatactaatcataggcgcgcaggccggtgccgcatggtacttaaccaagaatgccttgtcgagtctacaaaacaccctcgccgacccggataaggaaaagcacgaacaagcccgaaacaaagcaaaagccaatctttctcgactccggaggtcaagagaaacggggacggctggtgacgatgaatcgggcacgggcaccgaccacaggggtcagcgcatcgaagatttggtcctgaacgagtacgaaaacatggtggccctggaagtggtcgcccctgaagacattgccgttgggtttgacgacatcggcggcctcgatgacataatagaagaagtcaaggaatccgtcatatacccgctcaccatgcctcacctctactcccacgccgctcctcttctctccgctccctcaggtgttcttctgtatgggcctccagggtgtggcaagactatgttggccaaagccgtagcccacgaaagcggcgcatcatttatcaacctacacatctccaccttgactgagaagtggtacggagactcgaacaagctcgtacgcgccgtcttctctcttgcccggaagctgcagcccgctatcatcttcatagacgagatagacgcggttctaggaacgaggcgaagcggtgaacacgaagccagcggaatggtcaaagccgaattcatgactttatgggatggtcttacgtctgctaatacacagggcctaccagcacaaatcgtggttctcggggcgacaaaccggattcacgacatcgacgaagctatattgcgccgaatgccaaagaagttccccgtttcgctgccagacaaaagccagcgacttcggatattgcagcttttactgaaggacacaaagacagaacccaacaacttcaatatggagtacattgcgcgcgtcacggccggcatgtctggcagcgacatcaaagaagcatgccgggatgctgccatggttcccgtccgcgaattcatccgcgagcaccgggctaccgggagcgccatgtccagcattgatcccaagaaggtccggggtatgaggactgaggactttttcggtcgtaaaggcgggggccagatgttaatgaggaaccatgctcgagccaagtcgtcaagctcagagtacgaagacatcgaggaggaagacgagctcacggccgacactgcaaaatctaacgcaagggtcgtagaggaacaagcataa

SEQ ID NO: 9803 - protein, 429 aa, Muscodor strobelii
  misc_feature: SGI Peptide ID NO. 563081
  misc_feature (162)..(351): Pfam Id: PF00004 Pfam Desc: ATPase family associated with various cellular activities (AAA)
  misc_feature (162)..(182): Pfam Id: PF07728 Pfam Desc: ATPase family associated with various cellular activities (AAA)
  misc_feature (163)..(179): Pfam Id: PF01078 Pfam Desc: Magnesium chelatase, subunit ChlI
  misc_feature (24)..(410): NCBI GI: 261355803 Blast Desc: ATPase family AAA domain-containing protein [Verticillium albo-atrum VaMs.102]
  misc_feature (25)..(410): NCBI GI: 39971519 Blast Desc: conserved [Magnaporthe grisea 70-15] gi|59802930|gb|AAX07670.1| MSP1 protein-like protein [Magnaporthe grisea] gi|145019539|gb|EDK03767.1| conserved [Magnaporthe grisea
  misc_feature (25)..(386): NCBI GI: 46110102 Blast Desc: FG01933.1 [Gibberella zeae PH-1]
  misc_feature (25)..(411): NCBI GI: 256720753 Blast Desc: [Nectria haematococca mpVI 77-13-4]
  misc_feature (25)..(409): NCBI GI: 154318948 Blast Desc: BC1G_02863 [Botryotinia fuckeliana B05.10] gi|150857993|gb|EDN33185.1| BC1G_02863 [Botryotinia fuckeliana B05.10]
  misc_feature (26)..(418): NCBI GI: 116195888 Blast Desc: CHGG_04542 [Chaetomium globosum CBS 148.51] gi|88180455|gb|EAQ87923.1| CHGG_04542 [Chaetomium globosum CBS 148.51]
  misc_feature (52)..(409): NCBI GI: 156045467 Blast Desc: SS1G_09923 [Sclerotinia sclerotiorum 1980] gi|154694317|gb|EDN94055.1| SS1G_09923 [Sclerotinia sclerotiorum 1980]
  misc_feature (26)..(412): NCBI GI: 171690880 Blast Desc: protein product [Podospora anserina] gi|170945388|emb|CAP71500.1| protein product [Podospora anserina]
  misc_feature (26)..(412): NCBI GI: 85108906 Blast Desc: ATPase family AAA domain-containing protein 1 [Neurospora crassa OR74A] gi|28924269|gb|EAA33422.1| ATPase family AAA domain-containing protein 1 [Neurospora crassa OR74A]
  misc_feature (25)..(390): NCBI GI: 255936031 Blast Desc: Pc13g06080 [Penicillium chrysogenum Wisconsin 54-1255] gi|211583662|emb|CAP91677.1| Pc13g06080 [Penicillium chrysogenum Wisconsin 54-1255]
  misc_feature (134)..(381): SWISSPROT Homolog: EC 3.6.4.3 Microtubule-severing ATPase
  misc_feature: Useful for introducing or modulating the production of volatile compounds
MLPDALWSTLDTTLAFVQRHRTVFILIIGAQAGAAWYLTKNALSSLQNTLADPDKEKHEQARNKAKANLSRLRRSRETGTAGDDESGTGTDHRGQRIEDLVLNEYENMVALEVVAPEDIAVGFDDIGGLDDIIEEVKESVIYPLTMPHLYSHAAPLLSAPSGVLLYGPPGCGKTMLAKAVAHESGASFINLHISTLTEKWYGDSNKLVRAVFSLARKLQPAIIFIDEIDAVLGTRRSGEHEASGMVKAEFMTLWDGLTSANTQGLPAQIVVLGATNRIHDIDEAILRRMPKKFPVSLPDKSQRLRILQLLLKDTKTEPNNFNMEYIARVTAGMSGSDIKEACRDAAMVPVREFIREHRATGSAMSSIDPKKVRGMRTEDFFGRKGGGQMLMRNHARAKSSSSEYEDIEEEDELTADTAKSNARVVEEQA

SEQ ID NO: 9804 - DNA, 1881 bp, Muscodor strobelii; identical to SEQ ID NO: 9801
  misc_feature: SGI EST ID NO. CUFF.23405.2
  misc_feature: Variant of the nucleotide sequence at SEQ ID NO 9802

SEQ ID NO: 9805 - DNA, 1461 bp, Muscodor strobelii
  misc_feature: SGI cDNA ID NO. 563082
  misc_feature: Encodes the peptide sequence at SEQ ID NO 9806
atgttaaaggccaagttctcgacgctggtagggttggttgactcggatgaggaggagcaggacgtgttcataaaatcgaaatcagcccagatggccccggcgaagaaagcacgcggtgcagccaccaaaacgacggctaccaccgccaagcaaagcccaggacggaaggcccttgctgagaagccccaaaacgttccggaaaaggccactcgaggcagaggagtgaagcgccccgcgaccgacgatatagatgtgcccgaaccgcaacaagagccaggagagcagcccacgaccagagccggaagaggaagaccgaaggtcgtcaaagcgcaaaggatcgaagagcctgaagatgagctatccgagatccagatagacaccgcagcggcacccgcccctgctaagagagggcgcaaaccaaaagccatgtccaatctcgttgagactgcagtgcccatcgatgctgagattcctgagactcaacagcctgaacttgtgatcgaagaaacgcaacaagtcagcatgatggtggacacaagcatagaagatgacgagcatcctggagaacttcccgtactgagccgaccggggtattctgcggtccaacgccccttgccacagattctttctagcgcgagccggagacccgtgcccgcttccgattcagagcttcacgatcccgcgcttaggcggcgcatcggagatttgacccgaaaatatgaagttctggagaccaaatatcgcaatcttcgtgagctcggcgtggaagaggcagagcgcaactttgatcgattcaagaagcagactgaagaaagggcagaaaccgataaacagtttatcgctgctctaaaggcacagttggcagcacaaaccgagagggcaaaagaatctgagcgattgcgaaaacaactcgaaaccagccaagctcagaacgacgaactacatgacaaggtagccacgcttcagagctctctcgcggagtccaagacagagaccaaaaccttgaccaccaaactcgctgcggcgcgatcagcggccgaatctgccagcgtgaaggtgccgggaagtgctataaagaacaaccatggcgacaaacggttgattgctagtgccgaggcggctgctcaactggcgcaaacaaaagagaatctctacggcgacctgacaggtctgttggtttgcggtgttaaacgtgagaaggatgaggaagtatttgactgtgtacagacaggtcgaaacggaactcttcactttaaattggcggttggacctgacgagtcgtccgataacctcgacgatgcgcagttcacgtacatgcctcagctgaacgaatctcgagaccaagcgctcatggacacgctgcccgagtatctcattgaggaaatcgcatttccacgccttcaagcagccaagttctactcaagggtcgtcaaagctctcagcgaacgccccgacttataa

SEQ ID NO: 9806 - protein, 486 aa, Muscodor strobelii
  misc_feature: SGI Peptide ID NO. 563082
  misc_feature (82)..(482): NCBI GI: 85108890 Blast Desc: NCU07984 [Neurospora crassa OR74A] gi|28924265|gb|EAA33418.1| [Neurospora crassa OR74A]
  misc_feature (7)..(483): NCBI GI: 256720973 Blast Desc: NECHADRAFT_50483 [Nectria haematococca mpVI 77-13-4]
  misc_feature (33)..(485): NCBI GI: 261355804 Blast Desc: conserved [Verticillium albo-atrum VaMs.102]
  misc_feature (13)..(482): NCBI GI: 46110104 Blast Desc: FG01934.1 [Gibberella zeae PH-1]
  misc_feature (43)..(483): NCBI GI: 169620556 Blast Desc: SNOG_13477 [Phaeosphaeria nodorum SN15] gi|160704060|gb|EAT78924.2| SNOG_13477 [Phaeosphaeria nodorum SN15]
  misc_feature (1)..(483): NCBI GI: 242793969 Blast Desc: chromosome segregation protein (Pcs1), [Talaromyces stipitatus ATCC 10500] gi|218718862|gb|EED18282.1| chromosome segregation protein (Pcs1), [Talaromyces stipitatus ATCC 10500]
  misc_feature (159)..(483): NCBI GI: 70982113 Blast Desc: chromosome segregation protein (Pcs1) [Aspergillus fumigatus Af293] gi|66844208|gb|EAL84547.1| chromosome segregation protein (Pcs1), [Aspergillus fumigatus Af293] protein
  misc_feature (217)..(483): NCBI GI: 119486973 Blast Desc: chromosome segregation protein (Pcs1), [Neosartorya fischeri NRRL 181] gi|119410563|gb|EAW20509.1| chromosome segregation protein (Pcs1), [Neosartorya fischeri NRRL 181]
  misc_feature (208)..(483): NCBI GI: 115387827 Blast Desc: conserved [Aspergillus terreus NIH2624] gi|114195503|gb|EAU37203.1| conserved [Aspergillus terreus NIH2624]
  misc_feature (229)..(483): NCBI GI: 225556241 Blast Desc: conserved [Ajellomyces capsulatus G186AR]
MLKAKFSTLVGLVDSDEEEQDVFIKSKSAQMAPAKKARGAATKTTATTAKQSPGRKALAEKPQNVPEKATRGRGVKRPATDDIDVPEPQQEPGEQPTTRAGRGRPKVVKAQRIEEPEDELSEIQIDTAAAPAPAKRGRKPKAMSNLVETAVPIDAEIPETQQPELVIEETQQVSMMVDTSIEDDEHPGELPVLSRPGYSAVQRPLPQILSSASRRPVPASDSELHDPALRRRIGDLTRKYEVLETKYRNLRELGVEEAERNFDRFKKQTEERAETDKQFIAALKAQLAAQTERAKESERLRKQLETSQAQNDELHDKVATLQSSLAESKTETKTLTTKLAAARSAAESASVKVPGSAIKNNHGDKRLIASAEAAAQLAQTKENLYGDLTGLLVCGVKREKDEEVFDCVQTGRNGTLHFKLAVGPDESSDNLDDAQFTYMPQLNESRDQALMDTLPEYLIEEIAFPRLQAAKFYSRVVKALSERPDL

SEQ ID NO: 9807 - DNA, 2155 bp, Muscodor strobelii
  misc_feature: SGI EST ID NO. CUFF.23131.0
  misc_feature: Variant of the nucleotide sequence at SEQ ID NO 9805
gcagggggtaaggattgagcgggcactatctacagtacatcttccaggccggtgtacagggcctatgcaagcaagccccacccaaagtgtgctgtactcttcccccatttgtttactttcgcggtcgcgacaaaacatcccaccaccagatacgcctgattatctgtacacactctctcttcacatcccgcagttgttgagcatctctacaagcttgcgcttcttgacatttgcacatacacctattcttgctgcattggaactcttaattgaatacttgcgcgccatcaattcttgcctatacctgcgctgaatgatcatcctcgcgttagtccatgttaaaggccaagttctcgacgctggtagggttggttgactcggatgaggaggagcaggacgtgttcataaaatcgaaatcagcccagatggccccggcgaagaaagcacgcggtgcagccaccaaaacgacggctaccaccgccaagcaaagcccaggacggaaggcccttgctgagaagccccaaaacgttccggaaaaggccactcgaggcagaggagtgaagcgccccgcgaccgacgatatagatgtgcccgaaccgcaacaagagccaggagagcagcccacgaccagagccggaagaggaagaccgaaggtcgtcaaagcgcaaaggatcgaagagcctgaagatgagctatccgagatccagatagacaccgcagcggcacccgcccctgctaagagagggcgcaaaccaaaagccatgtccaatctcgttgagactgcagtgcccatcgatgctgagattcctgagactcaacagcctgaacttgtgatcgaagaaacgcaacaagtcagcatgatggtggacacaagcatagaagatgacgagcatcctggagaacttcccgtactgagccgaccggggtattctgcggtccaacgccccttgccacagattctttctagcgcgagccggagacccgtgcccgcttccgattcagagcttcacgatcccgcgcttaggcggcgcatcggagatttgacccgaaaatatgaagttctggagaccaaatatcgcaatcttcgtgagctcggcgtggaagaggcagagcgcaactttgatcgattcaagaagcagactgaagaaagggcagaaaccgataaacagtttatcgctgctctaaaggcacagttggcagcacaaaccgagagggcaaaagaatctgagcgattgcgaaaacaactcgaaaccagccaagctcagaacgacgaactacatgacaaggtagccacgcttcagagctctctcgcggagtccaagacagagaccaaaaccttgaccaccaaactcgctgcggcgcgatcagcggccgaatctgccagcgtgaaggtgccgggaagtgctataaagaacaaccatggcgacaaacggttgattgctagtgccgaggcggctgctcaactggcgcaaacaaaagagaatctctacggcgacctgacaggtctgttggtttgcggtgttaaacgtgagaaggatgaggaagtatttgactgtgtacagacaggtcgaaacggaactcttcactttaaattggcggttggacctgacgagtcgtccgataacctcgacgatgcgcagttcacgtacatgcctcagctgaacgaatctcgagaccaagcgctcatggacacgctgcccgagtatctcattgaggaaatcgcatttccacgccttcaagcagccaagttctactcaagggtcgtcaaagctctcagcgaacgccccgacttataagccagattttcaatcgattggcaagtatcggaggaaaattgattgcgagagcggggcgcgaaaatgtttatgatacccaattttgctttcgagatgcatttggatgatggcgtttgtttgagcttggtcgtgtactattccgcatcagcattctggcataccatatgtaatgttttcataatcaatgctggctttcttcggagcctgttgcaatatgtcactgccctattctattattttctgaaaagactagtacggtgtaaatgtctttttccgcctatataaatgaaagcagcccgcctcggtttataagatactagacggaatacaacctcaggcgatgcatgcgcccagttccg

SEQ ID NO: 9808 - DNA, 2997 bp, Muscodor strobelii
  misc_feature: SGI cDNA ID NO. 563083
  misc_feature: Encodes the peptide sequence at SEQ ID NO 9809
atggcgggcattggacggggtcggttcttggccattgccatggtattccatctcgtgtacatatactccatcttcgacatttacttcgtcagtcccatcgtcagtggcatgcagttgttcgaggtcgcaagacctgttggaacaaaaccacctgcagaccgacttgttctcttcgttggagacggtctccgtgccgacaaggccttccagtcgtttcccgagccataccccgagtccgaccaagatctgacacctcggcccctcgcgcccttcttacggtctcgcgtcctagagcacggtacctttggcgtttcgcacacgagagttcccaccgagtcccgccccggccacgtcgccctcatcgcggggctatacgaagatgtttctgctgtcgcaacgggctggaagctgaaccccgtcaacttcgacagcgtcttcaacaggagcagacacacatggagctgggggagtccggatattctaccgatgtttgagctaggtgcgactcctggaaagatcgatgcattctgctatgatgccgagatggaagacttctccgaggatgccctgcacctggacctctgggtcttcgatcatgttaaggagctgttcgcggaagcggagaagaataagaccctgaacgacgccctaagacaggacaaagtggtcttcttcctacatcttctaggaatcgacacgactggccattcgtaccggccctactcaaaagagtacctacataatatcaaggtcgttgatcaaggtgtcaaggaggtgaccaacttgatccagaagttctacgcagatgatcggaccgcatttgtcttcacagcggatcacggtatgagcgactatggcgcccacggagacgggcatcccgataatactcggacacccctcatagcgtggggctctggtgttgcgaaacccgtagtccatcaagaaggcgttgcgcctggacacgatgaattctcttcagactggggctttgatcagatcaagcgacacgatgtttcacaggctgacatcgccgctcttatggcctatttagtcggcctcgagtttcctgccaactctgttggcgagttgccgctttcttatctgtcgggtgacatcaaggacaaggctgaagcttcatatgtgaacgctcaggcaatcctcgagatgtatcgagtcaaagagattaccaagcaagacaaacatctcagataccagtcctacaagcctttaagtgcagagcacggggagatcccacaggctcggcttgcgtcaattcgggggttgattgaaaaggagcagtatgaagaagcgattgaagaagctgcgtccttgatgaagatcggcctcgaaggaatgcggtatttgcagacttacgactggttgttcctcagagccttgatcacgattgggtattttggttgggtcgcattcgccctcaccaccgtcgtagacctccatgtcttacagggctctacacaaccatcgcgaaatatcggcgggtccgtctttttctcgtccattctagttgctctatacgcgtcatacttcgtggcccaatctcccgtgacttattatgcatatacattgtttcctgtatatttttgggaagaggtctacgcgcgtcgtgagagcttggctaagggaaagcaagtcctgtttggacacatcaagtcctcaaccagtgcattgtctgttgtcttcaataccatcttttatgttgcaatcatccagtccctcgcgatcggttacatccaccgagaagtgctgactggtctattcattgttgcatcaattttccctcttttactcggagtgtcattcatccagaaacacctggcacttgttgcgacatggttcgcatcctgtctgctcatgagcacgtttacccttctccccgccaataagatcgaagatatagaacttatcttgatgggtggttctcttatggttattgtcggaatcctctatctcgtttttgaagacaagttacttgccgatttctcaggcacgaccaatccgcagcctccaaagcaagacatgagtatctcaagggctctgattggtgttcagatcggtctcatcatcctgaccatgatagtgacacgctcaagcgctctctcacttcaagcaagacttggcctgcctcgcggtaatcaagtcgtcgggatccttgtcttagttgtgtccctgtccatgccactggcccatcgactacagccagttcaccattaccttcacaagctactagtaatcttcttgacatgcgctcctacctttgtgatcctcaccatctcctatgagggtctcttctacgtcgctttctcactcacgctattatcctgggttcgcctcgaacaccacggatacgtattctcccaatccgccatcaaggcaaacgacaagggtcctcagtccaccgccgaagccgtcgtcgaaaccgtgacctctcaatttcgacccttatccctctcagacgcacgcatagcgctcttcttcttcgtactcctccaatcagcattcttcagcacgggcaacgtagcatccgtctcatcattcagtctcgagagcgtgaacagactcatgcccgtcttcgaccccttgtcgcagggcgcactcctaatcctcaagatcatgataccctttgtgctcatatcggcaaatttcggtgtcttgaatcaacgcctcggcgttgcgccctcggcgcttttcatggttgctatggcgatgagtgatatcctcacgttgtacttcttctgggtggttagggatgagggaagctggttggagatagggtctacgattagccattttgctattgcgagtttcatgagtgtttttgtcgctgggttggaaggagttagtcatttgttcgttgctggtgttgatgttggtgcctcgactggggtgaatgggaaggtgagtgggaagaagggagtggaggaaagaagtactgatgagggttcaagcactgaaggagaaaatggtaaggggaagtag

SEQ ID NO: 9809 - protein, 998 aa, Muscodor strobelii
  misc_feature: SGI Peptide ID NO. 563083
  misc_feature (450)..(926): Pfam Id: PF04987 Pfam Desc: Phosphatidylinositolglycan class N (PIG-N)
  misc_feature (690)..(926): Pfam Id: PF04987 Pfam Desc: Phosphatidylinositolglycan class N (PIG-N)
  misc_feature (450)..(655): Pfam Id: PF04987 Pfam Desc: Phosphatidylinositolglycan class N (PIG-N)
  misc_feature (245)..(314): Pfam Id: PF00884 Pfam Desc: Sulfatase
  misc_feature (1)..(996): NCBI GI: 258577943 Blast Desc: UREG_02669 [Uncinocarpus reesii 1704] gi|237903419|gb|EEP77820.1| UREG_02669 [Uncinocarpus reesii 1704]
  misc_feature (1)..(996): NCBI GI: 119487104 Blast Desc: GPI-anchor biosynthetic protein (Mcd4), [Neosartorya fischeri NRRL 181] gi|119410564|gb|EAW20510.1| GPI-anchor biosynthetic protein (Mcd4), [Neosartorya fischeri NRRL 181]
  misc_feature (1)..(997): NCBI GI: 240276677 Blast Desc: phosphoethanolamine transferase class N [Ajellomyces capsulatus H143]
  misc_feature (1)..(971): NCBI GI: 145248760 Blast Desc: An14g00900 [Aspergillus niger] gi|134081388|emb|CAK41889.1| protein product [Aspergillus niger]
  misc_feature (1)..(997): NCBI GI: 225556240 Blast Desc: phosphoethanolamine transferase class N [Ajellomyces capsulatus G186AR]
  misc_feature (1)..(967): NCBI GI: 242793964 Blast Desc: GPI-anchor biosynthetic protein (Mcd4), [Talaromyces stipitatus ATCC 10500] gi|218718861|gb|EED18281.1| GPI-anchor biosynthetic protein (Mcd4), [Talaromyces stipitatus ATCC 10500]
  misc_feature (1)..(991): NCBI GI: 212535744 Blast Desc: GPI-anchor biosynthetic protein (Mcd4), [Penicillium marneffei ATCC 18224] gi|210070427|gb|EEA24517.1| GPI-anchor biosynthetic protein (Mcd4), [Penicillium marneffei ATCC 18224]
  misc_feature (1)..(995): NCBI GI: 226289493 Blast Desc: GPI ethanolamine phosphate transferase [Paracoccidioides brasiliensis Pb18]
  misc_feature (1)..(962): NCBI GI: 255936027 Blast Desc: Pc13g06060 [Penicillium chrysogenum Wisconsin 54-1255] gi|211583660|emb|CAP91675.1| Pc13g06060 [Penicillium chrysogenum Wisconsin 54-1255]
  misc_feature (1)..(997): NCBI GI: 169783014 Blast Desc: [Aspergillus oryzae RIB40] gi|110810426|sp|Q2U0S9.1|MCD4_ASPOR RecName: Full=GPI ethanolamine phosphate transferase 1 gi|83774713|dbj|BAE64836.1|
MAGIGRGRFLAIAMVFHLVYIYSIFDIYFVSPIVSGMQLFEVARPVGTKPPADRLVLFVGDGLRADKAFQSFPEPYPESDQDLTPRPLAPFLRSRVLEHGTFGVSHTRVPTESRPGHVALIAGLYEDVSAVATGWKLNPVNFDSVFNRSRHTWSWGSPDILPMFELGATPGKIDAFCYDAEMEDFSEDALHLDLWVFDHVKELFAEAEKNKTLNDALRQDKVVFFLHLLGIDTTGHSYRPYSKEYLHNIKVVDQGVKEVTNLIQKFYADDRTAFVFTADHGMSDYGAHGDGHPDNTRTPLIAWGSGVAKPVVHQEGVAPGHDEFSSDWGFDQIKRHDVSQADIAALMAYLVGLEFPANSVGELPLSYLSGDIKDKAEASYVNAQAILEMYRVKEITKQDKHLRYQSYKPLSAEHGEIPQARLASIRGLIEKEQYEEAIEEAASLMKIGLEGMRYLQTYDWLFLRALITIGYFGWVAFALTTVVDLHVLQGSTQPSRNIGGSVFFSSILVALYASYFVAQSPVTYYAYTLFPVYFWEEVYARRESLAKGKQVLFGHIKSSTSALSVVFNTIFYVAIIQSLAIGYIHREVLTGLFIVASIFPLLLGVSFIQKHLALVATWFASCLLMSTFTLLPANKIEDIELILMGGSLMVIVGILYLVFEDKLLADFSGTTNPQPPKQDMSISRALIGVQIGLIILTMIVTRSSALSLQARLGLPRGNQVVGILVLVVSLSMPLAHRLQPVHHYLHKLLVIFLTCAPTFVILTISYEGLFYVAFSLTLLSWVRLEHHGYVFSQSAIKANDKGPQSTAEAVVETVTSQFRPLSLSDARIALFFFVLLQSAFFSTGNVASVSSFSLESVNRLMPVFDPLSQGALLILKIMIPFVLISANFGVLNQRLGVAPSALFMVAMAMSDILTLYFFWVVRDEGSWLEIGSTISHFAIASFMSVFVAGLEGVSHLFVAGVDVGASTGVNGKVSGKKGVEERSTDEGSSTEGENGKGK

SEQ ID NO: 9810 - DNA, 3383 bp, Muscodor strobelii
  misc_feature: SGI EST ID NO. CUFF.23134.0
  misc_feature: Variant of the nucleotide sequence at SEQ ID NO 9808
cagcttctgacttacctattgtgccgctcctttgcgtaagtccaaatgcatagaggctgtcaatgacttttctcctatcgtccctcattatttttctttatatgtaaactaaagttgcatatatgtgctttgcgattcgtctacgtcgatattcttatggaccttaatctggtttcgttagcctgttgcttgttattcgtgagatccaacacctgaaaagccacctttccactctgcccaagtcgacagcgcaacaccatcgtcacaatggcgggcattggacggggtcggttcttggccattgccatggtattccatctcgtgtacatatactccatcttcgacatttacttcgtcagtcccatcgtcagtggcatgcagttgttcgaggtcgcaagacctgttggaacaaaaccacctgcagaccgacttgttctcttcgttggagacggtctccgtgccgacaaggccttccagtcgtttcccgagccataccccgagtccgaccaagatctgacacctcggcccctcgcgcccttcttacggtctcgcgtcctagagcacggtacctttggcgtttcgcacacgagagttcccaccgagtcccgccccggccacgtcgccctcatcgcggggctatacgaagatgtttctgctgtcgcaacgggctggaagctgaaccccgtcaacttcgacagcgtcttcaacaggagcagacacacatggagctgggggagtccggatattctaccgatgtttgagctaggtgcgactcctggaaagatcgatgcattctgctatgatgccgagatggaagacttctccgaggatgccctgcacctggacctctgggtcttcgatcatgttaaggagctgttcgcggaagcggagaagaataagaccctgaacgacgccctaagacaggacaaagtggtcttcttcctacatcttctaggaatcgacacgactggccattcgtaccggccctactcaaaagagtacctacataatatcaaggtcgttgatcaaggtgtcaaggaggtgaccaacttgatccagaagttctacgcagatgatcggaccgcatttgtcttcacagcggatcacggtatgagcgactatggcgcccacggagacgggcatcccgataatactcggacacccctcatagcgtggggctctggtgttgcgaaacccgtagtccatcaagaaggcgttgcgcctggacacgatgaattctcttcagactggggctttgatcagatcaagcgacacgatgtttcacaggctgacatcgccgctcttatggcctatttagtcggcctcgagtttcctgccaactctgttggcgagttgccgctttcttatctgtcgggtgacatcaaggacaaggctgaagcttcatatgtgaacgctcaggcaatcctcgagatgtatcgagtcaaagagattaccaagcaagacaaacatctcagataccagtcctacaagcctttaagtgcagagcacggggagatcccacaggctcggcttgcgtcaattcgggggttgattgaaaaggagcagtatgaagaagcgattgaagaagctgcgtccttgatgaagatcggcctcgaaggaatgcggtatttgcagacttacgactggttgttcctcagagccttgatcacgattgggtattttggttgggtcgcattcgccctcaccaccgtcgtagacctccatgtcttacagggctctacacaaccatcgcgaaatatcggcgggtccgtctttttctcgtccattctagttgctctatacgcgtcatacttcgtggcccaatctcccgtgacttattatgcatatacattgtttcctgtatatttttgggaagaggtctacgcgcgtcgtgagagcttggctaagggaaagcaagtcctgtttggacacatcaagtcctcaaccagtgcattgtctgttgtcttcaataccatcttttatgttgcaatcatccagtccctcgcgatcggttacatccaccgagaagtgctgactggtctattcattgttgcatcaattttccctcttttactcggagtgtcattcatccagaaacacctggcacttgttgcgacatggttcgcatcctgtctgctcatgagcacgtttacccttctccccgccaataagatcgaagatatagaacttatcttgatgggtggttctcttatggttattgtcggaatcctctatctcgtttttgaagacaagttacttgccgatttctcaggcacgaccaatccgcagcctccaaagcaagacatgagtatctcaagggctctgattggtgttcagatcggtctcatcatcctgaccatgatagtgacacgctcaagcgctctctcacttcaagcaagacttggcctgcctcgcggtaatcaagtcgtcgggatccttgtcttagttgtgtccctgtccatgccactggcccatcgactacagccagttcaccattaccttcacaagctactagtaatcttcttgacatgcgctcctacctttgtgatcctcaccatctcctatgagggtctcttctacgtcgctttctcactcacgctattatcctgggttcgcctcgaacaccacggatacgtattctcccaatccgccatcaaggcaaacgacaagggtcctcagtccaccgccgaagccgtcgtcgaaaccgtgacctctcaatttcgacccttatccctctcagacgcacgcatagcgctcttcttcttcgtactcctccaatcagcattcttcagcacgggcaacgtagcatccgtctcatcattcagtctcgagagcgtgaacagactcatgcccgtcttcgaccccttgtcgcagggcgcactcctaatcctcaagatcatgataccctttgtgctcatatcggcaaatttcggtgtcttgaatcaacgcctcggcgttgcgccctcggcgcttttcatggttgctatggcgatgagtgatatcctcacgttgtacttcttctgggtggttagggatgagggaagctggttggagatagggtctacgattagccattttgctattgcgagtttcatgagtgtttttgtcgctgggttggaaggagttagtcatttgttcgttgctggtgttgatgttggtgcctcgactggggtgaatgggaaggtgagtgggaagaagggagtggaggaaagaagtactgatgagggttcaagcactgaaggagaaaatggtaaggggaagtagacaaaacaagactatagactgcagacgccttgacgtaatgagacgattgttgctacttagcagttagcagctgaaggtcgctgtcccctattctttatgcgtgcggtcgtagaatctag

SEQ ID NO: 9811 - DNA, 2664 bp, Muscodor strobelii
  misc_feature: SGI cDNA ID NO. 563084
  misc_feature: Reduced expression when VOC is produced
  misc_feature: Encodes the peptide sequence at SEQ ID NO 9812
atggccgacgtcgagatgaagagcgatggcggtgaggctgcccagcagcaaagccttcagtcgccgaccacgtcttcacacccaaacagcctacccggcggtcctgccagtagttcggcaccagtgttgagtgctgcgcagcaaaacgcacagtcgcaactgagcttccgaaggcaacgtgcgtcgagagcttgtgaaacatgccatgcccgaaaggtccgatgcgatgccgcgagccttggtgtgccttgcaccaactgcgtcgcctttcagatcgaatgcaagattccccaacctaagaggaagaaaacacaggccaatgcagccagagattcagatagtgaacgtggagatggcgtcgaaagtgcatctccccaacctatggcaggttcatctaccacatttcccgccaggccagctgtatactacacgtcagatgccgtaccatccccaacacagacagaggcgcagatcagaaaagaagaggtcgacaatgacacctatgtaagcatggttatgaaaccaaagttcacgagggcacctatcaccgaagctggccgtgtcgcctttctcggcgaatcctcgaatctcaccttgttggtgcatgaccgccagggtgcttcggacgtcgtgcactacccgttgccagaaaatgtccgtggatcaagggcaaggttgaccgaactcgacaacatagagattgatattctacaccaacgcggggcgttcctcttacctccaagacaactttgcgacgagctcatcgaagcatatttccaatggattcatcccattgtacccgttatcaaccgagccagcttcatgagacagtacagggaccctaaaaatcccccgtcgctactattgcttcaggcagttctacttgcaggctcaagagtatgccataaccaacaattaatggatgcaaacggctcaactacgcctgccgcgctaaccttctataagagggccaaagctctctacgacgccaattatgaagatgatcgagtgacaatcgttcagtcattacttttaatgggatggtattgggagggtcctgaagacgtcactaaaaatgttttctactggagtcgggttgctaccatcgtggcccaggggaccggcatgcatagaagcgtggaaggttcacagttgagtaaaatggacaagaggctatggaagcggatttggtggacattgttcactagagatcggtccgtggccgtggcgctaggtcgtccctgcagtatcaacttggacgactgcgacgttgaaatgctgacagaagacgactttatcgacgatgaagatccgacgagcgaatttgcacccgaccccatccatgtcaatttcttcctgcagtatgtcaagttgtgcgagatcatgggcttggtcctttcgcagcaatattcggttgcatctcgtggcagacgccagaatgcgattgatctcacccatagcgacatggctctggctgattggttgcaaaattgccccaagatgatatactgggagatgccgcgacatcatttctggagcgcactcctgcattctcactactatacaaccttgtgtctgctgcacagagcgcacatgcctcctaattccagcaacgcagcttcgtcgtttgacgatcacgcctatccgtcgcgcaatatcgctttccaggctgcaggaatgatgacatcgatcgtggagaatctctcgactcacgatgaactccgctattgtcctgcattcatcgtgtatagtctgttctcggcacttatcatgcacgtgtatcaaatgcgttcacccgtaccatcgatccaacgagtaactcaagatcgaattcgaacatgtatggatgcgttaaaagaagtgtccaaagtttggctggtaggtaagatggtttataccttattcgagtcgattttggggaacaaagtgctcgaagaaaggctccagaaggccgccggcaagcgtcacaagaaggtacaacaaacactagccaaactggaccagcatcaacgacaacaagaagccgctaagcgaaaatatgatgagatggctattgactttagtgtgacaacgccgaccccccaagaatcatatgagcgatctcgtccagtgacaccgcggaacgaacccctcgccaaccagacgaacatgggaccacccacaacttcaccaggatcgaagcccatcgatgcattcatgggtggaaccaacagcagaccgcaaactcgaccagcaactccttttaatccatcattctctgtccccacgacacctcctgatttgtacctaatcacaaggaattcgccgaatctatcgcaatctttatgggagaacttccagcccgatcagctattcccagagagcacagggatgccactgccgcagatgtcgcctccgcagaaccaacagggcctcgatcccaacctcatctcgcagatgcaggccggacttggagggtttcaggggcagtcatcgacgctctggccaggcggaaacgacctcaataacgcggtgcaagacggccatagtccgagcgacagctggagcactgggtcccaaggccaacctgtgcctgctactctgaatgtagaagactggttccaattcttcggcattagcggcaacgatgtcaacctgtcaggaatcgatatacccatgaattga

SEQ ID NO: 9812 - protein, 887 aa, Muscodor strobelii
  misc_feature: SGI Peptide ID NO. 563084
  misc_feature (63)..(103): Pfam Id: PF00172 Pfam Desc: Fungal Zn(2)-Cys(6) binuclear cluster domain
  misc_feature (336)..(430): Pfam Id: PF04082 Pfam Desc: Fungal specific transcription factor domain
  misc_feature (49)..(886): NCBI GI: 1706176 Blast Desc: CTF1A_FUSSO RecName: Full=Cutinase transcription factor 1 alpha gi|20467236|gb|AAM22470.1|AF501618_1 cutinase transcription factor 1 alpha [Nectria haematococca mpVI] cutinase
  misc_feature (39)..(886): NCBI GI: 148791373 Blast Desc: Ctf1 [Fusarium oxysporum]
  misc_feature (29)..(886): NCBI GI: 46110108 Blast Desc: CT1A_FUSSO CUTINASE TRANSCRIPTION FACTOR 1 ALPHA [Gibberella zeae PH-1]
  misc_feature (62)..(883): NCBI GI: 171690910 Blast Desc: protein product [Podospora anserina] gi|170945403|emb|CAP71515.1| protein product [Podospora anserina]
  misc_feature (72)..(887): NCBI GI: 261355807 Blast Desc: cutinase transcription factor 1 alpha [Verticillium albo-atrum VaMs.102]
  misc_feature (33)..(880): NCBI GI: 145613161 Blast Desc: MGG_01836 [Magnaporthe grisea 70-15] gi|145020300|gb|EDK04429.1| MGG_01836 [Magnaporthe grisea 70-15]
  misc_feature (41)..(817): NCBI GI: 85108943 Blast Desc: cutinase transcription factor 1 alpha [Neurospora crassa OR74A] gi|28924281|gb|EAA33434.1| cutinase transcription factor 1 alpha [Neurospora crassa OR74A] conserved [Neurospora
  misc_feature (25)..(886): NCBI GI: 154318064 Blast Desc: BC1G_03015 [Botryotinia fuckeliana B05.10] gi|150843673|gb|EDN18866.1| BC1G_03015 [Botryotinia fuckeliana B05.10]
  misc_feature (19)..(883): NCBI GI: 240110248 Blast Desc: Fungal specific transcription factor, [Coccidioides posadasii C735 delta SOWgp]
  misc_feature (114)..(886): NCBI GI: 156049991 Blast Desc: SS1G_07581 [Sclerotinia sclerotiorum 1980] gi|154691983|gb|EDN91721.1| SS1G_07581 [Sclerotinia sclerotiorum 1980]
  misc_feature: Useful for introducing or modulating the production of volatile compounds
MADVEMKSDGGEAAQQQSLQSPTTSSHPNSLPGGPASSSAPVLSAAQQNAQSQLSFRRQRASRACETCHARKVRCDAASLGVPCTNCVAFQIECKIPQPKRKKTQANAARDSDSERGDGVESASPQPMAGSSTTFPARPAVYYTSDAVPSPTQTEAQIRKEEVDNDTYVSMVMKPKFTRAPITEAGRVAFLGESSNLTLLVHDRQGASDVVHYPLPENVRGSRARLTELDNIEIDILHQRGAFLLPPRQLCDELIEAYFQWIHPIVPVINRASFMRQYRDPKNPPSLLLLQAVLLAGSRVCHNQQLMDANGSTTPAALTFYKRAKALYDANYEDDRVTIVQSLLLMGWYWEGPEDVTKNVFYWSRVATIVAQGTGMHRSVEGSQLSKMDKRLWKRIWWTLFTRDRSVAVALGRPCSINLDDCDVEMLTEDDFIDDEDPTSEFAPDPIHVNFFLQYVKLCEIMGLVLSQQYSVASRGRRQNAIDLTHSDMALADWLQNCPKMIYWEMPRHHFWSALLHSHYYTTLCLLHRAHMPPNSSNAASSFDDHAYPSRNIAFQAAGMMTSIVENLSTHDELRYCPAFIVYSLFSALIMHVYQMRSPVPSIQRVTQDRIRTCMDALKEVSKVWLVGKMVYTLFESILGNKVLEERLQKAAGKRHKKVQQTLAKLDQHQRQQEAAKRKYDEMAIDFSVTTPTPQESYERSRPVTPRNEPLANQTNMGPPTTSPGSKPIDAFMGGTNSRPQTRPATPFNPSFSVPTTPPDLYLITRNSPNLSQSLWENFQPDQLFPESTGMPLPQMSPPQNQQGLDPNLISQMQAGLGGFQGQSSTLWPGGNDLNNAVQDGHSPSDSWSTGSQGQPVPATLNVEDWFQFFGISGNDVNLSGIDIPMN

SEQ ID NO: 9813 - DNA, 4354 bp, Muscodor strobelii
  misc_feature: SGI EST ID NO. CUFF.23319.1
  misc_feature: Variant of the nucleotide sequence at SEQ ID NO 9811
ctacgtcttatcttccaaaaatcatgctaggtatctatcagagatgaactattgattatagacggcagggtatgatcgttacgttctataccggctttctgttcgtatataactgtacgtacgtacgtacggttgtttgatagtctagaacgaatatgcaggtgagctgccgtagttcaggggtggtgggccccccggctctagcttcctaaaaatcaacgatctcacatgtcttttttcacgctcaaacaccagaaatatgctgtgacctgtcaggcaaggagggctcttggctgttgaattaactggactacgggtgggctgaccggatttcttgttgcatccttcgagatttgttctgttgcacatgcagcgtgtgggtttgacccgacgtgtagaccgactcgactggtcggtgtatccatgtctttctgtacttatctaccggcttttgaagatcgggaacacgacttcagatgagataaccttgtggaagagttgataggcacttaatgtacgtgcggcgtggcgagcaatgagaccttcgactttaattttgaatatgtctgcttcccgcagggtcctggtaatttcagggttaggtacttgaagggtacattagcacatgacccataacacggagtcgactatgcccacgtgaggtgccttagctcagtgctctgtgtctggaagacctccccttgtgtttgatatcttggacattgaaatggttaaagtacatgctttgttgcctgtatataaattcgtccataggattcgtattttacagttatccagatccaggaatctcgatgtctgattcggaaaccagtcccgagttggagaagccatctctccgagttgcagtgtaaccgttcgagtttgtggtgtccaggcagacgctagacgccgttggaccttggaacggcttggttttcggcctgctgaacaccgccgccaactccgtggcgcgcctcatttggcaccttctagcactctcctaggtcctgtcaagatcccaattaagtagcaaaatcctggtgtaagtacttacgtgtaccctaaatagtggtgcgccgaaggtcaccaagagctctggtctgtcgcatcaccatatcatggaaacatcttcttctttcttttgagctacactttcgtccgcctcacgacagcttctgagcgtacaataccaaaggagcaataagcggttgttgctttcattttgttgggcgccccccgatatagcatgcgatagccgaatgtccatttctgaatgttccatttctagtcgagtctttcatttgtttctggctggtgaactgccccttgcgtcccctcaccatggccgacgtcgagatgaagagcgatggcggtgaggctgcccagcagcaaagccttcagtcgccgaccacgtcttcacacccaaacagcctacccggcggtcctgccagtagttcggcaccagtgttgagtgctgcgcagcaaaacgcacagtcgcaactgagcttccgaaggcaacgtgcgtcgagagcttgtgaaacatgccatgcccgaaaggtccgatgcgatgccgcgagccttggtgtgccttgcaccaactgcgtcgcctttcagatcgaatgcaagattccccaacctaagaggaagaaaacacaggccaatgcagccagagattcagatagtgaacgtggagatggcgtcgaaagtgcatctccccaacctatggcaggttcatctaccacatttcccgccaggccagctgtatactacacgtcagatgccgtaccatccccaacacagacagaggcgcagatcagaaaagaagaggtcgacaatgacacctatgtaagcatggttatgaaaccaaagttcacgagggcacctatcaccgaagctggccgtgtcgcctttctcggcgaatcctcgaatctcaccttgttggtgcatgaccgccagggtgcttcggacgtcgtgcactacccgttgccagaaaatgtccgtggatcaagggcaaggttgaccgaactcgacaacatagagattgatattctacaccaacgcggggcgttcctcttacctccaagacaactttgcgacgagctcatcgaagcatatttccaatggattcatcccattgtacccgttatcaaccgagccagcttcatgagacagtacagggaccctaaaaatcccccgtcgctactattgcttcaggcagttctacttgcaggctcaagagtatgccataaccaacaattaatggatgcaaacggctcaactacgcctgccgcgctaaccttctataagagggccaaagctctctacgacgccaattatgaagatgatcgagtgacaatcgttcagtcattacttttaatgggatggtattgggagggtcctgaagacgtcactaaaaatgttttctactggagtcgggttgctaccatcgtggcccaggggaccggcatgcatagaagcgtggaaggttcacagttgagtaaaatggacaagaggctatggaagcggatttggtggacattgttcactagagatcggtccgtggccgtggcgctaggtcgtccctgcagtatcaacttggacgactgcgacgttgaaatgctgacagaagacgactttatcgacgatgaagatccgacgagcgaatttgcacccgaccccatccatgtcaatttcttcctgcagtatgtcaagttgtgcgagatcatgggcttggtcctttcgcagcaatattcggttgcatctcgtggcagacgccagaatgcgattgatctcacccatagcgacatggctctggctgattggttgcaaaattgccccaagatgatatactgggagatgccgcgacatcatttctggagcgcactcctgcattctcactactatacaaccttgtgtctgctgcacagagcgcacatgcctcctaattccagcaacgcagcttcgtcgtttgacgatcacgcctatccgtcgcgcaatatcgctttccaggctgcaggaatgatgacatcgatcgtggagaatctctcgactcacgatgaactccgctattgtcctgcattcatcgtgtatagtctgttctcggcacttatcatgcacgtgtatcaaatgcgttcacccgtaccatcgatccaacgagtaactcaagatcgaattcgaacatgtatggatgcgttaaaagaagtgtccaaagtttggctggtaggtaagatggtttataccttattcgagtcgattttggggaacaaagtgctcgaagaaaggctccagaaggccgccggcaagcgtcacaagaaggtacaacaaacactagccaaactggaccagcatcaacgacaacaagaagccgctaagcgaaaatatgatgagatggctattgactttagtgtgacaacgccgaccccccaagaatcatatgagcgatctcgtccagtgacaccgcggaacgaacccctcgccaaccagacgaacatgggaccacccacaacttcaccaggatcgaagcccatcgatgcattcatgggtggaaccaacagcagaccgcaaactcgaccagcaactccttttaatccatcattctctgtccccacgacacctcctgatttgtacctaatcacaaggaattcgccgaatctatcgcaatctttatgggagaacttccagcccgatcagctattcccagagagcacagggatgccactgccgcagatgtcgcctccgcagaaccaacagggcctcgatcccaacctcatctcgcagatgcaggccggacttggagggtttcaggggcagtcatcgacgctctggccaggcggaaacgacctcaataacgcggtgcaagacggccatagtccgagcgacagctggagcactgggtcccaaggccaacctgtgcctgctactctgaatgtagaagactggttccaattcttcggcattagcggcaacgatgtcaacctgtcaggaatcgatatacccatgaattgagatgaatgatcgactgtacgatgaaaatgactcgaacaaaaataaggtagatatatatgactgcgtcgtcttactgctacgtgtggagtagtgcattagggcccatatgtaggaccagcattgtcacggggagtatttcagatgagcgagttctgagcagcctctggagctaggtgaagccgggtatgattgtcaaatgtgtggaagccaaggcgtcaagcattcatcgtgtgttgaagacgaacaaaatgtataattatagtggtgctgtggggttaatgcgatcgatgcattatgataatccatggacgtgtaacgacgatgtttggaagatcagttcccatgcaat

SEQ ID NO: 9814 - DNA, 2754 bp, Muscodor strobelii
  misc_feature: SGI cDNA ID NO. 563085
  misc_feature: Encodes the peptide sequence at SEQ ID NO 9815
atggccgacgtcgagatgaagagcgatggcggtgaggctgcccagcagcaaagccttcagtcgccgaccacgtcttcacacccaaacagcctacccggcggtcctgccagtagttcggcaccagtgttgagtgctgcgcagcaaaacgcacagtcgcaactgagcttccgaagacatgccatgcccgaaagaagatgccaggtccgatgcgatgccgcgagccttggtgtgccttgcaccaactgcgtcgcctttcagatcgaatgcaagattccccaacctaagaggaagaaaacacaggccaatgcagccagagattcagatagtgaacgtggagatggcgtcgaaagtgcatctccccaacctatggcaggttcatctaccacatttcccgccaggccagctgtatactacacgtcagatgccgtaccatccccaacacagacagaggcgcagatcagaaaagaagaggtcgacaatgacacctatgtaagcatggttatgaaaccaaagttcacgagggcacctatcaccgaagctggccgtgtcgcctttctcggcgaatcctcgaatctcaccttgttggtgcatgaccgccagggtgcttcggacgtcgtgcactacccgttgccagaaaatgtccgtggatcaagggcaaggttgaccgaactcgacaacatagagattgatattctacaccaacgcggggcgttcctcttacctccaagacaactttgcgacgagctcatcgaagcatatttccaatggattcatcccattgtacccgttatcaaccgagccagcttcatgagacagtacagggaccctaaaaatcccccgtcgctactattgcttcaggcagttctacttgcaggctcaagagtatgccataaccaacaattaatggatgcaaacggctcaactacgcctgccgcgctaaccttctataagagggccaaagctctctacgacgccaattatgaagatgatcgagtgacaatcgttcagtcattacttttaatgggatggtattgggagggtcctgaagacgtcactaaaaatgttttctactggagtcgggttgctaccatcgtggcccaggggaccggcatgcatagaagcgtggaaggttcacagttgagtaaaatggacaagaggctatggaagcggatttggtggacattgttcactagagatcggtccgtggccgtggcgctaggtcgtccctgcagtatcaacttggacgactgcgacgttgaaatgctgacagaagacgactttatcgacgatgaagatccgacgagcgaatttgcacccgaccccatccatgtcaatttcttcctgcagtatgtcaagttgtgcgagatcatgggcttggtcctttcgcagcaatattcggttgcatctcgtggcagacgccagaatgcgattgatctcacccatagcgacatggctctggctgattggttgcaaaattgccccaagatgatatactgggagatgccgcgacatcatttctggagcgcactcctgcattctcactactatacaaccttgtgtctgctgcacagagcgcacatgcctcctaattccagcaacgcagcttcgtcgtttgacgatcacgcctatccgtcgcgcaatatcgctttccaggctgcaggaatgatgacatcgatcgtggagaatctctcgactcacgatgaactccgctattgtcctgcattcatcgtgtatagtctgttctcggcacttatcatgcacgtgtatcaaatgcgttcacccgtaccatcgatccaacgagtaactcaagatcgaattcgaacatgtatggatgcgttaaaagaagtgtccaaagtttggctggtaggtaagatggtttataccttattcgagtcgattttggggaacaaagtgctcgaagaaaggctccagaaggccgccggcaagcgtcacaagaaggtacaacaaacactagccaaactggaccagcatcaacgacaacaagaagccgctaagcgaaaatatgatgagatggctattgactttagtgtgacaacgccgaccccccaagaatcatatgagcgatctcgtccagtgacaccgcggaacgaacccctcgccaaccagacgaacatgggaccacccacaacttcaccaggatcgaagcccatcgatgcattcatgggtggaaccaacagcagaccgcaaactcgaccagcaactccttttaatccatcattctctgtccccacgacacctcctgatttgtacctaatcacaaggaattcgccgaatctatcgcaatctttatgggagaacttccagcccgatcagctattcccagagagcacagggatgccactgccgcagatgtcgcctccgcagaaccaacagggcctcgatcccaacctcatctcgcagatgcaggccggtatgtcttctccgacggcaggtcacgcctaccaattccaaggacgaggagcgcaacgaccgaacagcggaagtccgttacaagctaatactttcatacatccaggacttggagggtttcaggggcagtcatcgacgctctggccaggcggaaacgacctcaataacgcggtgcaagacggccatagtccgagcgacagctggagcactgggtcccaaggccaacctgtgcctgctactctgaatgtagaagactggttccaattcttcggcattagcggcaacgatgtcaacctgtcaggaatcgatatacccatgaattga

SEQ ID NO: 9815 - protein, 917 aa, Muscodor strobelii
  misc_feature: SGI Peptide ID NO. 563085
  misc_feature (331)..(425): Pfam Id: PF04082 Pfam Desc: Fungal specific transcription factor domain
  misc_feature (49)..(916): NCBI GI: 1706176 Blast Desc: CTF1A_FUSSO RecName: Full=Cutinase transcription factor 1 alpha gi|20467236|gb|AAM22470.1|AF501618_1 cutinase transcription factor 1 alpha [Nectria haematococca mpVI] cutinase
  misc_feature (39)..(916): NCBI GI: 148791373 Blast Desc: Ctf1 [Fusarium oxysporum]
  misc_feature (29)..(916): NCBI GI: 46110108 Blast Desc: CT1A_FUSSO CUTINASE TRANSCRIPTION FACTOR 1 ALPHA [Gibberella zeae PH-1]
  misc_feature (67)..(917): NCBI GI: 261355807 Blast Desc: cutinase transcription factor 1 alpha [Verticillium albo-atrum VaMs.102]
  misc_feature (67)..(913): NCBI GI: 171690910 Blast Desc: protein product [Podospora anserina] gi|170945403|emb|CAP71515.1| protein product [Podospora anserina]
  misc_feature (8)..(910): NCBI GI: 145613161 Blast Desc: MGG_01836 [Magnaporthe grisea 70-15] gi|145020300|gb|EDK04429.1| MGG_01836 [Magnaporthe grisea 70-15]
  misc_feature (25)..(916): NCBI GI: 154318064 Blast Desc: BC1G_03015 [Botryotinia fuckeliana B05.10] gi|150843673|gb|EDN18866.1| BC1G_03015 [Botryotinia fuckeliana B05.10]
  misc_feature (41)..(814): NCBI GI: 85108943 Blast Desc: cutinase transcription factor 1 alpha [Neurospora crassa OR74A] gi|28924281|gb|EAA33434.1| cutinase transcription factor 1 alpha [Neurospora crassa OR74A] conserved [Neurospora
  misc_feature (109)..(916): NCBI GI: 156049991 Blast Desc: SS1G_07581 [Sclerotinia sclerotiorum 1980] gi|154691983|gb|EDN91721.1| SS1G_07581 [Sclerotinia sclerotiorum 1980]
  misc_feature (19)..(913): NCBI GI: 240110248 Blast Desc: Fungal specific transcription factor, [Coccidioides posadasii C735 delta SOWgp]
MADVEMKSDGGEAAQQQSLQSPTTSSHPNSLPGGPASSSAPVLSAAQQNAQSQLSFRRHAMPERRCQVRCDAASLGVPCTNCVAFQIECKIPQPKRKKTQANAARDSDSERGDGVESASPQPMAGSSTTFPARPAVYYTSDAVPSPTQTEAQIRKEEVDNDTYVSMVMKPKFTRAPITEAGRVAFLGESSNLTLLVHDRQGASDVVHYPLPENVRGSRARLTELDNIEIDILHQRGAFLLPPRQLCDELIEAYFQWIHPIVPVINRASFMRQYRDPKNPPSLLLLQAVLLAGSRVCHNQQLMDANGSTTPAALTFYKRAKALYDANYEDDRVTIVQSLLLMGWYWEGPEDVTKNVFYWSRVATIVAQGTGMHRSVEGSQLSKMDKRLWKRIWWTLFTRDRSVAVALGRPCSINLDDCDVEMLTEDDFIDDEDPTSEFAPDPIHVNFFLQYVKLCEIMGLVLSQQYSVASRGRRQNAIDLTHSDMALADWLQNCPKMIYWEMPRHHFWSALLHSHYYTTLCLLHRAHMPPNSSNAASSFDDHAYPSRNIAFQAAGMMTSIVENLSTHDELRYCPAFIVYSLFSALIMHVYQMRSPVPSIQRVTQDRIRTCMDALKEVSKVWLVGKMVYTLFESILGNKVLEERLQKAAGKRHKKVQQTLAKLDQHQRQQEAAKRKYDEMAIDFSVTTPTPQESYERSRPVTPRNEPLANQTNMGPPTTSPGSKPIDAFMGGTNSRPQTRPATPFNPSFSVPTTPPDLYLITRNSPNLSQSLWENFQPDQLFPESTGMPLPQMSPPQNQQGLDPNLISQMQAGMSSPTAGHAYQFQGRGAQRPNSGSPLQANTFIHPGLGGFQGQSSTLWPGGNDLNNAVQDGHSPSDSWSTGSQGQPVPATLNVEDWFQFFGISGNDVNLSGIDIPMN

SEQ ID NO: 9816 - DNA, 4354 bp, Muscodor strobelii; identical to SEQ ID NO: 9813
  misc_feature: SGI EST ID NO. CUFF.23319.1
  misc_feature: Variant of the nucleotide sequence at SEQ ID NO 9814

SEQ ID NO: 9817 - DNA, 1914 bp, Muscodor strobelii
  misc_feature: SGI cDNA ID NO. 563086
  misc_feature: Reduced expression when VOC is produced
  misc_feature: Encodes the peptide sequence at SEQ ID NO 9818
atggccgactacacaccaacatccacatccaaacctcccacctcgaggtccacgaccgccttgacgcccgccggtgtcgacgatcccaccactgtgcgaccacgcaacaggagagggccctcgcataacaatgctttcacccctgccgatgggtccagtctccagccggggccaggagcctccgcgagtcgaggtgtgagccccatgccatccggccggctttccagtacgaagctgcagtcgactggcttggcgagtcctgtcaatgccgcattctcccgtggtctcttagaggggtcttgggctccgagctgggcctcggtccaggactttgcctcatctatcatggacggcgggtacagtagcgaaccctcacgccccaacagcagagacggttccaaacctcgacccaagtccatatggaaaggctttggcgcacaggccctcagccgcaaagcctcggcgaactggggtcccgccgcagcttccaccccacgccccgcggccggtgacatcgccgccggctctctcgccgaacgagaggccaagttgatggcgagaaagaaggccagtgtgctggagagtcacgaaggcgtcaatggaggattagacgttacagggaaatacaaaaggagaaactcggatgaaaatcaacgcagcgtcagccaacccgtgatagaagagcatctggtgtatctgcatcacgtgcagcctaccgacacatatgccggcattgtcctgcggtataggtgcatggagcacgcgctccgcaagatgaacggtctgtggtcgcataacatacagatgcgcaagcagctcatgatacccgttgatgcttgtgaacaaaaggggcggccatgcgatccaccttctcaatattccaaaaaggtcgaccatctagccaagacccctcaaccatccgacctcagtaagctcagtaaatccacacctgatctcacgcaaccccttcacgacgactactttggttccttgaacgggagggcggcaggacagccaggtcaggacgacgaggaaaagctttggactcacgtgcgatgggtgaagctcgactcgatacaggagccggttgagattgtgagggtcaagcggactgcagtcggatacttcccgcctaggagaaagaagagcatacaaaccgtctctggcttctcaagcccgcgcaactctctagataatgccgtctcaaacacgtccgaagcggtagagagtcccggccgaataggatccagaagacagagctcgcaaagcgctaggccgacagcggcggccataggatcccctggtcccacacgaagtagagtcaatagtctgggccaacggaccgacgacctgccggccttcatgcggaagccaggaggtgtaggctcgatgggcaagagtgtcaagacacctggaccagcgaaagatgccatcaactcatgggtcaacaagcgactaccgggcttcaacatcgattctttaccatctatgtcggtaatgggctctgaatccgcgcatttcggattcgcaaagaaaaccgaagacagctcgacggggatcgtagagaatccgtacgaagagggcctggatgtgtcaacacagtcacgcaacggcatgggcatcgaacaagcggcagcaacggtcgagacgtggttaaggggagcgtgggccaagcgcccaggcacgccgaagctaggatctcttcgcaagccgactgacgacctcgacctcatagaactgacggatacgaacagcgacgacgggcggatcctcagcgcgccgagccgatcgccggaccggagcctactcagccaaggccttccggggactagcagccgcagtgacggagacggcgcggggacggtgcgcggccggacgctggcttcgggatccaaagggaagaaggcggattga

SEQ ID NO: 9818 - protein, 637 aa, Muscodor strobelii
  misc_feature: SGI Peptide ID NO. 563086
  misc_feature (33)..(591): NCBI GI: 39951719 Blast Desc: MGG_01502 [Magnaporthe grisea 70-15] gi|145020654|gb|EDK04783.1| MGG_01502 [Magnaporthe grisea 70-15]
  misc_feature (9)..(614): NCBI GI: 85107162 Blast Desc: NCU07680 [Neurospora crassa OR74A] gi|28923925|gb|EAA33086.1| conserved [Neurospora crassa OR74A]
  misc_feature (16)..(636): NCBI GI: 46110110 Blast Desc: FG01937.1 [Gibberella zeae PH-1]
  misc_feature (11)..(587): NCBI GI: 261355808 Blast Desc: conserved [Verticillium albo-atrum VaMs.102]
  misc_feature (34)..(625): NCBI GI: 171690410 Blast Desc: protein product [Podospora anserina] gi|170945153|emb|CAP71264.1| protein product [Podospora anserina]
  misc_feature (30)..(635): NCBI GI: 156049989 Blast Desc: SS1G_07580 [Sclerotinia sclerotiorum 1980] gi|154691982|gb|EDN91720.1| SS1G_07580 [Sclerotinia sclerotiorum 1980]
  misc_feature (32)..(632): NCBI GI: 154318066 Blast Desc: BC1G_03016 [Botryotinia fuckeliana B05.10] gi|150843674|gb|EDN18867.1| BC1G_03016 [Botryotinia fuckeliana B05.10]
  misc_feature (31)..(582): NCBI GI: 189210199 Blast Desc: conserved [Pyrenophora tritici-repentis Pt-1C-BFP] gi|187977524|gb|EDU44150.1| conserved [Pyrenophora tritici-repentis Pt-1C-BFP]
  misc_feature (28)..(279): NCBI GI: 116196208 Blast Desc: CHGG_04702 [Chaetomium globosum CBS 148.51] gi|88180615|gb|EAQ88083.1| CHGG_04702 [Chaetomium globosum CBS 148.51]
  misc_feature (14)..(625): NCBI GI: 226289491 Blast Desc: conserved [Paracoccidioides brasiliensis Pb18]
  misc_feature: Useful for introducing or modulating the production of volatile compounds
MADYTPTSTSKPPTSRSTTALTPAGVDDPTTVRPRNRRGPSHNNAFTPADGSSLQPGPGASASRGVSPMPSGRLSSTKLQSTGLASPVNAAFSRGLLEGSWAPSWASVQDFASSIMDGGYSSEPSRPNSRDGSKPRPKSIWKGFGAQALSRKASANWGPAAASTPRPAAGDIAAGSLAEREAKLMARKKASVLESHEGVNGGLDVTGKYKRRNSDENQRSVSQPVIEEHLVYLHHVQPTDTYAGIVLRYRCMEHALRKMNGLWSHNIQMRKQLMIPVDACEQKGRPCDPPSQYSKKVDHLAKTPQPSDLSKLSKSTPDLTQPLHDDYFGSLNGRAAGQPGQDDEEKLWTHVRWVKLDSIQEPVEIVRVKRTAVGYFPPRRKKSIQTVSGFSSPRNSLDNAVSNTSEAVESPGRIGSRRQSSQSARPTAAAIGSPGPTRSRVNSLGQRTDDLPAFMRKPGGVGSMGKSVKTPGPAKDAINSWVNKRLPGFNIDSLPSMSVMGSESAHFGFAKKTEDSSTGIVENPYEEGLDVSTQSRNGMGIEQAAATVETWLRGAWAKRPGTPKLGSLRKPTDDLDLIELTDTNSDDGRILSAPSRSPDRSLLSQGLPGTSSRSDGDGAGTVRGRTLASGSKGKKAD

SEQ ID NO: 9819 - DNA, 3000 bp, Muscodor strobelii
  misc_feature: SGI EST ID NO. CUFF.23189.0
  misc_feature: Variant of the nucleotide sequence at SEQ ID NO 9817
caaatctcgaacagaacagattctcgtctgtataagcatcggcttacatgtatcggaattgtgtacctatttcttttggttcgttgcacctctctaatatacctaatgtccctattgtgttctactgactagcccctaactgcgccaaggacagtaggagtctgaccaaattagagagagtagcgggcgacgtaggaaaatcagataaactgccggcttatcttgggctggtccttgatgtctccagacttcgacgccatctacaacccacgctaggaggctcaaagatatcgctagtgcggtggtgattagacgtgtgttgagagcagactcgggtgctagtcctaggccgacgtctccctaatcgcggcgccgcacatgccaacgctcagctaatttcaccctctgttcgagaccactctcactccgttctccgtcacctcaatccccatcttcgcacccactacgagcaccctctcgtacttgcgctcgcacaacacccgcggtcacgaccacttcgactcgatgccgatgtagccacagcagacttcgcagtccattgtcgcagctttgatgctcctcattgcctccgcccgctttgcgcggagtgtcgccgtccacggtccgtagtctcgccccggatcatggccgactacacaccaacatccacatccaaacctcccacctcgaggtccacgaccgccttgacgcccgccggtgtcgacgatcccaccactgtgcgaccacgcaacaggagagggccctcgcataacaatgctttcacccctgccgatgggtccagtctccagccggggccaggagcctccgcgagtcgaggtgtgagccccatgccatccggccggctttccagtacgaagctgcagtcgactggcttggcgagtcctgtcaatgccgcattctcccgtggtctcttagaggggtcttgggctccgagctgggcctcggtccaggactttgcctcatctatcatggacggcgggtacagtagcgaaccctcacgccccaacagcagagacggttccaaacctcgacccaagtccatatggaaaggctttggcgcacaggccctcagccgcaaagcctcggcgaactggggtcccgccgcagcttccaccccacgccccgcggccggtgacatcgccgccggctctctcgccgaacgagaggccaagttgatggcgagaaagaaggccagtgtgctggagagtcacgaaggcgtcaatggaggattagacgttacagggaaatacaaaaggagaaactcggatgaaaatcaacgcagcgtcagccaacccgtgatagaagagcatctggtgtatctgcatcacgtgcagcctaccgacacatatgccggcattgtcctgcggtataggtgcatggagcacgcgctccgcaagatgaacggtctgtggtcgcataacatacagatgcgcaagcagctcatgatacccgttgatgcttgtgaacaaaaggggcggccatgcgatccaccttctcaatattccaaaaaggtcgaccatctagccaagacccctcaaccatccgacctcagtaagctcagtaaatccacacctgatctcacgcaaccccttcacgacgactactttggttccttgaacgggagggcggcaggacagccaggtcaggacgacgaggaaaagctttggactcacgtgcgatgggtgaagctcgactcgatacaggagccggttgagattgtgagggtcaagcggactgcagtcggatacttcccgcctaggagaaagaagagcatacaaaccgtctctggcttctcaagcccgcgcaactctctagataatgccgtctcaaacacgtccgaagcggtagagagtcccggccgaataggatccagaagacagagctcgcaaagcgctaggccgacagcggcggccataggatcccctggtcccacacgaagtagagtcaatagtctgggccaacggaccgacgacctgccggccttcatgcggaagccaggaggtgtaggctcgatgggcaagagtgtcaagacacctggaccagcgaaagatgccatcaactcatgggtcaacaagcgactaccgggcttcaacatcgattctttaccatctatgtcggtaatgggctctgaatccgcgcatttcggattcgcaaagaaaaccgaagacagctcgacggggatcgtagagaatccgtacgaagagggcctggatgtgtcaacacagtcacgcaacggcatgggcatcgaacaagcggcagcaacggtcgagacgtggttaaggggagcgtgggccaagcgcccaggcacgccgaagctaggatctcttcgcaagccgactgacgacctcgacctcatagaactgacggatacgaacagcgacgacgggcggatcctcagcgcgccgagccgatcgccggaccggagcctactcagccaaggccttccggggactagcagccgcagtgacggagacggcgcggggacggtgcgcggccggacgctggcttcgggatccaaagggaagaaggcggattgaagagatggttgtagaaaggtggtgtgtgatatattcttttgatcatgggtacagcgctagacgatatcattctcgaaataatacattttggctctctcatcaagtaccgtctctcacttggtcttaaggatatgcattatgcatcgatgggcgttgttggcattgggcaagatgaaaaacacattttttattttggtatatactatgctataattctgatcttactgaagtcgtacctcctgcctactcggcggtgaatgtcgctacgtggcgtgatggtgagattggtgttgctacgtggaggaggatttgacttgggtgtttagtatgactctttcatacctagtgctaggctttgcgtggttcaataggcccttctcgccccttttggtttacttctcaattacaatgcctaggattcctactcataagatgatagaat

SEQ ID NO: 9820 - DNA, 855 bp, Muscodor strobelii
  misc_feature: SGI cDNA ID NO. 563087
  misc_feature: Encodes the peptide sequence at SEQ ID NO 9821
atgccaatctgtatcgagtgccggcacccggtgcgcacgctctggacgcaatactctggagcgggcgacgcggggtcgaacatcaggctcactgtctgtcgcaactgcgggcggttctgcgacaagtacgtcgaacatgactttgtcgtgttgtttattgatttggtcttgatcaagccgcaggtataccgccatctcctacacaacacattaatgcgcgatcacgaccaattcgacccatctataatccgcctcggcactctcctcctcctcttcgacgtctacctaacatgggcacgaatcgagaaacaaatcgaaccctcctcttcctcgcccgcgaatcttggcagtctatcacaacagcccatcatcctacaatacgtattcttcctaatactctgcacattctcaaccctagccttccacctctccatccgcttcttaacctcctctcccttatcgcccctttcattcctcgggctcttaccaacgtacacgcgtcccaactccgtatccaccgccctcctcgtgtcctcctcgacgaagctcttccccatcctgatggtgatatgggactacgacgtccccgccgcggcccgatcgttggggtgggccgtagtagcgaataacgtcgaggccctcaagatactcctggactgcgggtatagcgtcgccgtcgtgctagcggctgcgggggcggtgagtcggtggtttgttggacggggtgtgctttggtgtgtggggttgcagggcgtggatagtgttgccgagagcggtgtcgcagcggatgggagggcgctttgggcgttgcttgggagcgttagggagtggggtgggaggttggctgttgggtag

SEQ ID NO: 9821 - protein, 284 aa, Muscodor strobelii
  misc_feature: SGI Peptide ID NO. 563087
  misc_feature (2)..(244): Pfam Id: PF04161 Pfam Desc: Arv1-like family
  misc_feature (3)..(194): Pfam Id: PF04161 Pfam Desc: Arv1-like family
  misc_feature (1)..(284): NCBI GI: 145613590 Blast Desc: MGG_01504 [Magnaporthe grisea 70-15] gi|145020652|gb|EDK04781.1| MGG_01504 [Magnaporthe grisea 70-15]
  misc_feature (1)..(284): NCBI GI: 116196210 Blast Desc: CHGG_04703 [Chaetomium globosum CBS 148.51] gi|88180616|gb|EAQ88084.1| CHGG_04703 [Chaetomium globosum CBS 148.51]
  misc_feature (1)..(284): NCBI GI: 261355809 Blast Desc: conserved [Verticillium albo-atrum VaMs.102]
  misc_feature (1)..(284): NCBI GI: 171690408 Blast Desc: protein product [Podospora anserina] gi|170945152|emb|CAP71263.1| protein product [Podospora anserina]
  misc_feature (1)..(284): NCBI GI: 46110110 Blast Desc: FG01937.1 [Gibberella zeae PH-1]
  misc_feature (1)..(284): NCBI GI: 256720970 Blast Desc: [Nectria haematococca mpVI 77-13-4]
  misc_feature (1)..(284): NCBI GI: 85107162 Blast Desc: NCU07680 [Neurospora crassa OR74A] gi|28923925|gb|EAA33086.1| conserved [Neurospora crassa OR74A]
  misc_feature (72)..(284): NCBI GI: 156032593 Blast Desc: SS1G_13994 [Sclerotinia sclerotiorum 1980] gi|154699396|gb|EDN99134.1| SS1G_13994 [Sclerotinia sclerotiorum 1980]
  misc_feature (72)..(284): NCBI GI: 154298636 Blast Desc: BC1G_11573 [Botryotinia fuckeliana B05.10] gi|150857745|gb|EDN32937.1| BC1G_11573 [Botryotinia fuckeliana B05.10]
  misc_feature (3)..(253): NCBI GI: 50557270 Blast Desc: YALI0F30283p [Yarrowia lipolytica] gi|49651913|emb|CAG78856.1| YALI0F30283p [Yarrowia lipolytica]
MPICIECRHPVRTLWTQYSGAGDAGSNIRLTVCRNCGRFCDKYVEHDFVVLFIDLVLIKPQVYRHLLHNTLMRDHDQFDPSIIRLGTLLLLFDVYLTWARIEKQIEPSSSSPANLGSLSQQPIILQYVFFLILCTFSTLAFHLSIRFLTSSPLSPLSFLGLLPTYTRPNSVSTALLVSSSTKLFPILMVIWDYDVPAAARSLGWAVVANNVEALKILLDCGYSVAVVLAAAGAVSRWFVGRGVLWCVGLQGVDSVAESGVAADGRALWALLGSVREWGGRLAVG

SEQ ID NO: 9822 - DNA, 2451 bp, Muscodor strobelii
  misc_feature: SGI EST ID NO. CUFF.23437.0
  misc_feature: Variant of the nucleotide sequence at SEQ ID NO 9820
ggagctgtcattcaatgcatcataccttgacctttagaccttcaactactatgaccaaaactctttaagggtagtcaattcactcgttttgccttttgattgtccgtctagccaatatgcaatttcttttccgccagtacgcccggagcgcattgggatagagagctaaaggagtgtccctaccttggatcgtccccgaatcaagtcgcgccgagaggaacttgcttccgtgtcgccgattgcataccaattccagagaatacaagaaaggaaccgacgaccccagcgcatagctacacacatccgctccctgccgactgaggattaaccaacctacaagacaccatacgaagaggaagggggacgggatcacaacgcaatgccaatctgtatcgagtgccggcacccggtgcgcacgctctggacgcaatactctggagcgggcgacgcggggtcgaacatcaggctcactgtctgtcgcaactgcgggcggttctgcgacaagtacgtcgaacatgactttgtcgtgttgtttattgatttggtcttgatcaagccgcaggtataccgccatctcctacacaacacattaatgcgcgatcacgaccaattcgacccatctataatccgcctcggcactctcctcctcctcttcgacgtctacctaacatgggcacgaatcgagaaacaaatcgaaccctcctcttcctcgcccgcgaatcttggcagtctatcacaacagcccatcatcctacaatacgtattcttcctaatactctgcacattctcaaccctagccttccacctctccatccgcttcttaacctcctctcccttatcgcccctttcattcctcgggctcttaccaacgtacacgcgtcccaactccgtatccaccgccctcctcgtgtcctcctcgacgaagctcttccccatcctgatggtgatatgggactacgacgtccccgccgcggcccgatcgttggggtgggccgtagtagcgaataacgtcgaggccctcaagatactcctggactgcgggtatagcgtcgccgtcgtgctagcggctgcgggggcggtgagtcggtggtttgttggacggggtgtgctttggtgtgtggggttgcagggcgtggatagtgttgccgagagcggtgtcgcagcggatgggagggcgctttgggcgttgcttgggagcgttagggagtggggtgggaggttggctgttgggtaggtaggtttgggggatggatctatttgtgtttagtagcgagcgatgtttgcctcttcttgatatcacgggtatatgaaaggtgatcgtgagatctatgttcattattagaaattgcgcagttgtacattcgctaatgaagcaccctgcaaccaccctctttcaggtcggtcaatgtctttcaacagacacggtacgggggttcctttgccccttcgtcttgctgtcccaatgagtcctaaacgccgtaaatgtagctcttctctctcttctctcctatatcgaatgtcgatattcatattgttgatacagtcctacccttgcggcctctactcccctctcctcctcttccattctcttcccctgcaaactcatcatcccgctctaaaacccctgtgtctggtagtattgcgttatgtacaaagaagtcggggaagtcgtgggagccccctcatcagaggtagtagtcgtaacagtcgaggcggtctctttcggcgggcaagcagtgatcttggcgaatgttgtaaatgtcatcttgttgtccatcgtacggttcgggtcgttgtttgtcaagtggcggcaggattccctgcagcccgtgcactactcgtgctggaatcccacccggatgtcgacgcggcgcggctcgatgagcgggttcagctgtgcgaggaaggtgatggcccacatcaggtagcaggccgtgaatgcgatgattagggaggagcgccaggttctgtatggatgtgctggttagtcttttcatgggtttagggtgttgttgttttcgcgctgccgcaaggagtataaggtggtgtagaggtgtggtagatgggggagagagactcacgtctggttctcgcctttgggggataggaaccatgcggtgaggcaggcggcgcctgtgacgatgaggccccagaggatgctgtatctgttcggtggtgtgccgggttagcgcatgtacgaacgcagctgtggatggcatctgcaaatggtggtgatgcaatgctcaaggcggcatcggtggatgcaacgtgagaggtgcaagttgacatacccgttcgccatgttttctgtggcaaggtgctcgtttctgcgatattgtttctagttcgtgttcggggctgtcgtcgttctatggtagcgatgtcgacgagatggtgttcggatcttgattagagctgcctagggtgttgagtgaggtatgagcttcggat

SEQ ID NO: 9823 - DNA, 228 bp, Muscodor strobelii
  misc_feature: SGI cDNA ID NO. 563088
  misc_feature: Encodes the peptide sequence at SEQ ID NO 9824
atggcgaacggatacagcatcctctggggcctcatcgtcacaggcgccgcctgcctcaccgcatggttcctatcccccaaaggcgagaaccagacaacctggcgctcctccctaatcatcgcattcacggcctgctacctgatgtgggccatcaccttcctcgcacagctgaacccgctcatcgagccgcgccgcgtcgacatccgggtgggattccagcacgagtag

SEQ ID NO: 9824 - protein, 75 aa, Muscodor strobelii
  misc_feature: SGI Peptide ID NO. 563088
  misc_feature (1)..(68): Pfam Id: PF05493 Pfam Desc: ATP synthase subunit H
  misc_feature (6)..(64): Pfam Id: PF05493 Pfam Desc: ATP synthase subunit H
  misc_feature (1)..(75): NCBI GI: 39951725 Blast Desc: MGG_01505 [Magnaporthe grisea 70-15] gi|145020651|gb|EDK04780.1| MGG_01505 [Magnaporthe grisea 70-15]
  misc_feature (1)..(72): NCBI GI: 261355810 Blast Desc: conserved [Verticillium albo-atrum VaMs.102]
  misc_feature (1)..(75): NCBI GI: 116196212 Blast Desc: CHGG_04704 [Chaetomium globosum CBS 148.51] gi|88180617|gb|EAQ88085.1| CHGG_04704 [Chaetomium globosum CBS 148.51]
  misc_feature (1)..(75): NCBI GI: 154298638 Blast Desc: BC1G_11574 [Botryotinia fuckeliana B05.10] gi|150857746|gb|EDN32938.1| BC1G_11574 [Botryotinia fuckeliana B05.10]
  misc_feature (1)..(69): NCBI GI: 261204363 Blast Desc: BDBG_00641 [Ajellomyces dermatitidis SLH14081] gi|239587180|gb|EEQ69823.1| BDBG_00641 [Ajellomyces dermatitidis SLH14081] gi|239614280|gb|EEQ91267.1| BDCG_06387 [Ajellomyces
  misc_feature (1)..(71): NCBI GI: 119178744 Blast Desc: CIMG_08174 [Coccidioides immitis RS] gi|240104700|gb|EER22896.1| vacuolar ATP synthase subunit H, [Coccidioides posadasii C735 delta SOWgp]
  misc_feature (1)..(75): NCBI GI: 212543815 Blast Desc: vacuolar ATP synthase subunit e, [Penicillium marneffei ATCC 18224] gi|212543817|ref|XP_002152063.1| vacuolar ATP synthase subunit e, [Penicillium marneffei ATCC 18224] ATP e,
  misc_feature (5)..(75): NCBI GI: 256720752 Blast Desc: NECHADRAFT_50214 [Nectria haematococca mpVI 77-13-4]
  misc_feature (1)..(69): NCBI GI: 189210681 Blast Desc: PTRG_11341 [Pyrenophora tritici-repentis Pt-1C-BFP] gi|187977765|gb|EDU44391.1| PTRG_11341 [Pyrenophora tritici-repentis Pt-1C-BFP]
  misc_feature (1)..(75): NCBI GI: 115384496 Blast Desc: conserved [Aspergillus terreus NIH2624] gi|114196487|gb|EAU38187.1| conserved [Aspergillus terreus NIH2624]
MANGYSILWGLIVTGAACLTAWFLSPKGENQTTWRSSLIIAFTACYLMWAITFLAQLNPLIEPRRVDIRVGFQHE

SEQ ID NO: 9825 - DNA, 1719 bp, Muscodor strobelii
  misc_feature: SGI EST ID NO. CUFF.23438.1
  misc_feature: Variant of the nucleotide sequence at SEQ ID NO 9823
atccgaagctcatacctcactcaacaccctaggcagctctaatcaagatccgaacaccatctcgtcgacatcgctaccatagaacgacgacagccccgaacacgaactagaaacaatatcgcagaaacgagcaccttgccacagaaaacatggcgaacggatacagcatcctctggggcctcatcgtcacaggcgccgcctgcctcaccgcatggttcctatcccccaaaggcgagaaccagacaacctggcgctcctccctaatcatcgcattcacggcctgctacctgatgtgggccatcaccttcctcgcacagctgaacccgctcatcgagccgcgccgcgtcgacatccgggtgggattccagcacgagtagtgcacgggctgcagggaatcctgccgccacttgacaaacaacgacccgaaccgtacgatggacaacaagatgacatttacaacattcgccaagatcactgcttgcccgccgaaagagaccgcctcgactgttacgactactacctctgatgagggggctcccacgacttccccgacttctttgtacataacgcaatactaccagacacaggggttttagagcgggatgatgagtttgcaggggaagagaatggaagaggaggagaggggagtagaggccgcaagggtaggactgtatcaacaatatgaatatcgacattcgatataggagagaagagagagaagagctacatttacggcgtttaggactcattgggacagcaagacgaaggggcaaaggaacccccgtaccgtgtctgttgaaagacattgaccgacctgaaagagggtggttgcagggtgcttcattagcgaatgtacaactgcgcaatttctaataatgaacatagatctcacgatcacctttcatatacccgtgatatcaagaagaggcaaacatcgctcgctactaaacacaaatagatccatcccccaaacctacctacccaacagccaacctcccaccccactccctaacgctcccaagcaacgcccaaagcgccctcccatccgctgcgacaccgctctcggcaacactatccacgccctgcaaccccacacaccaaagcacaccccgtccaacaaaccaccgactcaccgcccccgcagccgctagcacgacggcgacgctatacccgcagtccaggagtatcttgagggcctcgacgttattcgctactacggcccaccccaacgatcgggccgcggcggggacgtcgtagtcccatatcaccatcaggatggggaagagcttcgtcgaggaggacacgaggagggcggtggatacggagttgggacgcgtgtacgttggtaagagcccgaggaatgaaaggggcgataagggagaggaggttaagaagcggatggagaggtggaaggctagggttgagaatgtgcagagtattactagcattttgtttagctcggtcttggatttagaggggtagaagggggaacgtacggaagaatacgtattgtaggatgatgggctgttgtgatagactgccaagattcgcgggcgaggaagaggagggttcgatttgtttctcgattcgtgcccatgttaggtagacgtcgaagaggaggaggagagtgccgaggcggattatagatggctatatgaatgttaggtgttggtctgagtatggttctgtggagggaagacatacgtcgaattggtcgtg

SEQ ID NO: 9826 - DNA, 927 bp, Muscodor strobelii
  misc_feature: SGI cDNA ID NO. 563089
  misc_feature: Encodes the peptide sequence at SEQ ID NO 9827
atggcgcctcaacttatgtggattggcctaggcaacatgggcaggggcatgtgcaagaatctggttgagaagggcaatctagagaagcctctcatcttgtacaaccgaacgaagaagcgagctgaggatcttgcggctactttgccagcgggcaaaacagaagtggctgatacgattgaagaaggtgtcaagaaagccgacatcatcttcacaattgtcagcaatgacgccgcagtgcaagaggcggtgaccactatcttgaagtctgacatcaagggcaagactatcattgactgctcgacaattcaccccgataccacgaagcagattgcccaggacatcctggccaaaggcggtgattttgtggctgctcccgtatttggcgccccagctgctgcagatgcgggtaaactcattttcgtacctgccggtcctaaggcgtcaattgataagttacgaccatataacgttggcgtgatggggcgggctgagatccccttcaacgacaagccttacgagacctcacttaagctcaagctcttgggcaatacgtttgtcgtcaacatggtgacacaaattgctgagggcatgacgctgggcgagaaatcaggcgtcggtgcagaacctgtcaagcagctcattgacttgctcttcggcggcgtatacagtggctacgcggaccgcatggtcacgggcatgtattggaagagagacgagccattcttctcggccgataatgcgaggaaggacatgaggcatgcgatgaatcttggcaaatcggtcggtgtggagatgactggagctcaacgaggagatgaatatctcaaagtcgttgctgaacattctggtggtgataagggagacattgccggtatctacggggctgtgaggaaggcgagtgggctgaagtttgagaatgatgtctaa

SEQ ID NO: 9827 - protein, 308 aa, Muscodor strobelii
  misc_feature: SGI Peptide ID NO. 563089
  misc_feature (6)..(162): Pfam Id: PF03446 Pfam Desc: NAD binding domain of 6-phosphogluconate dehydrogenase
  misc_feature (3)..(110): Pfam Id: PF01488 Pfam Desc: Shikimate / quinate 5-dehydrogenase
  misc_feature (7)..(154): Pfam Id: PF03446 Pfam Desc: NAD binding domain of 6-phosphogluconate dehydrogenase
  misc_feature (8)..(110): Pfam Id: PF01488 Pfam Desc: Shikimate / quinate 5-dehydrogenase
  misc_feature (1)..(307): NCBI GI: 46110112 Blast Desc: FG01938.1 [Gibberella zeae PH-1]
  misc_feature (1)..(307): NCBI GI: 39951727 Blast Desc: MGG_01506 [Magnaporthe grisea 70-15] gi|145020650|gb|EDK04779.1| MGG_01506 [Magnaporthe grisea 70-15]
  misc_feature (1)..(306): NCBI GI: 156032589 Blast Desc: SS1G_13992 [Sclerotinia sclerotiorum 1980] gi|154699394|gb|EDN99132.1| SS1G_13992 [Sclerotinia sclerotiorum 1980]
  misc_feature (1)..(306): NCBI GI: 154298640 Blast Desc: BC1G_11575 [Botryotinia fuckeliana B05.10] gi|150857747|gb|EDN32939.1| BC1G_11575 [Botryotinia fuckeliana B05.10]
  misc_feature (1)..(306): NCBI GI: 171690404 Blast Desc: protein product [Podospora anserina] gi|170945150|emb|CAP71261.1| protein product [Podospora anserina]
  misc_feature (17)..(307): NCBI GI: 164423838 Blast Desc: NCU11370 [Neurospora crassa OR74A] gi|157070252|gb|EDO64997.1| conserved [Neurospora crassa OR74A]
  misc_feature (1)..(306): NCBI GI: 169618732 Blast Desc: SNOG_12558 [Phaeosphaeria nodorum SN15] gi|111058736|gb|EAT79856.1| SNOG_12558 [Phaeosphaeria nodorum SN15]
  misc_feature (1)..(306): NCBI GI: 256720751 Blast Desc: NECHADRAFT_105483 [Nectria haematococca mpVI 77-13-4]
  misc_feature (1)..(306): NCBI GI: 119196639 Blast Desc: CIMG_02694 [Coccidioides immitis RS]
  misc_feature (1)..(306): NCBI GI: 189210301 Blast Desc: 6-phosphogluconate dehydrogenase 2 [Pyrenophora tritici-repentis Pt-1C-BFP] gi|187977575|gb|EDU44201.1| 6-phosphogluconate dehydrogenase 2 [Pyrenophora tritici-repentis
  misc_feature (7)..(223): SWISSPROT Homolog: EC 1.1.1.31 3-hydroxyisobutyrate dehydrogenase
MAPQLMWIGLGNMGRGMCKNLVEKGNLEKPLILYNRTKKRAEDLAATLPAGKTEVADTIEEGVKKADIIFTIVSNDAAVQEAVTTILKSDIKGKTIIDCSTIHPDTTKQIAQDILAKGGDFVAAPVFGAPAAADAGKLIFVPAGPKASIDKLRPYNVGVMGRAEIPFNDKPYETSLKLKLLGNTFVVNMVTQIAEGMTLGEKSGVGAEPVKQLIDLLFGGVYSGYADRMVTGMYWKRDEPFFSADNARKDMRHAMNLGKSVGVEMTGAQRGDEYLKVVAEHSGGDKGDIAGIYGAVRKASGLKFENDV

SEQ ID NO: 9828 - DNA, 1530 bp, Muscodor strobelii
  misc_feature: SGI EST ID NO. CUFF.23151.0
  misc_feature: Variant of the nucleotide sequence at SEQ ID NO 9826
gcccggtccggcatatgcggggctaattatattgcttcatcatcaatacctgtacaatgaattcactttatgaagcaaatccattcgattttttgacttggacagattcgcatacagggtttgtatgacacttcatgaaagtgcgaaatccgctttgaatcctttattcttcgtagggtatgctcgcgattgcgaacttcggtgttcagcatacgaacctatcattgaggttcatagttataggacttgacaatacgcgacctttggcgaaattcgattatataaaccaacctcaatccacgatctagatattttctcaaatttgaagcactcctccttcaagaagcaattcgagctttcaaactatcatactcgcagagacctctagcttattcaagctcactgaacttgagactcccctatctactagatcagcccctaaaaattacaacttcaatcaccatggcgcctcaacttatgtggattggcctaggcaacatgggcaggggcatgtgcaagaatctggttgagaagggcaatctagagaagcctctcatcttgtacaaccgaacgaagaagcgagctgaggatcttgcggctactttgccagcgggcaaaacagaagtggctgatacgattgaagaaggtgtcaagaaagccgacatcatcttcacaattgtcagcaatgacgccgcagtgcaagaggcggtgaccactatcttgaagtctgacatcaagggcaagactatcattgactgctcgacaattcaccccgataccacgaagcagattgcccaggacatcctggccaaaggcggtgattttgtggctgctcccgtatttggcgccccagctgctgcagatgcgggtaaactcattttcgtacctgccggtcctaaggcgtcaattgataagttacgaccatataacgttggcgtgatggggcgggctgagatccccttcaacgacaagccttacgagacctcacttaagctcaagctcttgggcaatacgtttgtcgtcaacatggtgacacaaattgctgagggcatgacgctgggcgagaaatcaggcgtcggtgcagaacctgtcaagcagctcattgacttgctcttcggcggcgtatacagtggctacgcggaccgcatggtcacgggcatgtattggaagagagacgagccattcttctcggccgataatgcgaggaaggacatgaggcatgcgatgaatcttggcaaatcggtcggtgtggagatgactggagctcaacgaggagatgaatatctcaaagtcgttgctgaacattctggtggtgataagggagacattgccggtatctacggggctgtgaggaaggcgagtgggctgaagtttgagaatgatgtctaaatggtgcgaaagagttggttgtagtgccgtattagtttcggatggaacaaatcaattcgcgaaaacagtaattgcattaagacatcctccgcacatctggccataacgagtacattaacatacttcgcagttctcatcatg

SEQ ID NO: 9829 - DNA, 873 bp, Muscodor strobelii
  misc_feature: SGI cDNA ID NO. 563090
  misc_feature: Encodes the peptide sequence at SEQ ID NO 9830
atgtgtcttattggtgaaaaggcgaaagtcaacaccattgcgcctcattttggagaagagccgtgcattcaggggcataacggaagtggttcagtattcttttcgggctgtaacttgcgttgcaccttttgccaaaaccacgatattgcgcaccagcgaaacggtttcgacctgacgccggaggagcttggcgaatggtacataaagctacaagacgtaggcaatgtccacaacatcaacttagtcaccccagaacatgtcgtgccacaagtagtattgtcaatactccacgcgcggacgctcggtttaagagtccctatcgtctacaacacgtctgcgtttgattcgcttgcatcactggagctactcgatggactagttgatatctatctccctgacttcaaggtgtggagccctgcaatatcgcgacgcttgcttaaggccgacgactacgctgctactgctacagagagtattcgtgcgatgcatgcccaagttggcgatctgtgcttcaccggagacggcgttgcgaagaaaggtgttttggttcgccaccttgttatgccagggcaggaagaggaggcaaagtcgattttcaagtttctcgctgagaatgtgtctcgggataccttcgtcaatatcatggagcaatatagaccagatgcacatgttggaaagccaaagcgtcgcacgaaaagaaacgaagacaatgccctgaccgaagacaccataaaaagccaggaagaagttcgctacgcggagatcaatcggccagtgacgaaaaatgaagtctcagctgttagacgggctgccgaggctgtgggtctctggcgattttgtgatccgccgaagcatgatggatttgccatttga

SEQ ID NO: 9830 - protein, 290 aa, Muscodor strobelii
  misc_feature: SGI Peptide ID NO. 563090
  misc_feature (31)..(202): Pfam Id: PF04055 Pfam Desc: Radical SAM superfamily
  misc_feature (2)..(290): NCBI GI: 261359729 Blast Desc: pyruvate formate lyase activating enzyme [Verticillium albo-atrum VaMs.102]
  misc_feature (1)..(290): NCBI GI: 46122547 Blast Desc: FG05651.1 [Gibberella zeae PH-1]
  misc_feature (1)..(290): NCBI GI: 256729636 Blast Desc: [Nectria haematococca mpVI 77-13-4]
  misc_feature (2)..(290): NCBI GI: 240106346 Blast Desc: radical SAM domain containing protein [Coccidioides posadasii C735 delta SOWgp]
  misc_feature (2)..(290): NCBI GI: 119191790 Blast Desc: CIMG_00272 [Coccidioides immitis RS]
  misc_feature (2)..(290): NCBI GI: 238845424 Blast Desc: pyruvate formate lyase activating enzyme [Microsporum canis CBS 113480]
  misc_feature (2)..(285): NCBI GI: 258573309 Blast Desc: conserved [Uncinocarpus reesii 1704] gi|237901102|gb|EEP75503.1| conserved [Uncinocarpus reesii 1704]
  misc_feature (1)..(290): NCBI GI: 71002434 Blast Desc: pyruvate formate lyase activating enzyme [Aspergillus fumigatus Af293] gi|66853536|gb|EAL93860.1| pyruvate formate lyase activating enzyme, [Aspergillus fumigatus Af293] pyruvate
  misc_feature (1)..(290): NCBI GI: 119481993 Blast Desc: pyruvate formate lyase activating enzyme, [Neosartorya fischeri NRRL 181] gi|119409179|gb|EAW19128.1| pyruvate formate lyase activating enzyme, [Neosartorya fischeri NRRL 181]
  misc_feature (2)..(281): NCBI GI: 259483940 Blast Desc: TPA: pyruvate formate lyase activating enzyme, (AFU_orthologue; AFUA_2G15630) [Aspergillus nidulans FGSC A4]
MCLIGEKAKVNTIAPHFGEEPCIQGHNGSGSVFFSGCNLRCTFCQNHDIAHQRNGFDLTPEELGEWYIKLQDVGNVHNINLVTPEHVVPQVVLSILHARTLGLRVPIVYNTSAFDSLASLELLDGLVDIYLPDFKVWSPAISRRLLKADDYAATATESIRAMHAQVGDLCFTGDGVAKKGVLVRHLVMPGQEEEAKSIFKFLAENVSRDTFVNIMEQYRPDAHVGKPKRRTKRNEDNALTEDTIKSQEEVRYAEINRPVTKNEVSAVRRAAEAVGLWRFCDPPKHDGFAI

SEQ ID NO: 9831 - DNA, 3057 bp, Muscodor strobelii
  misc_feature: SGI EST ID NO. CUFF.23156.0
  misc_feature: Variant of the nucleotide sequence at SEQ ID NO 9829
caatgacatgctgtcctacaaacatcgaccacaacgcacttaatccatctctggttgactggtgtctaacaatgaggaaagatcaccacgatgttgtcaagcagggtacggccgatgaaaacaacggcctggcagcgcgggacaatcgctgatagatctgggggttcgtcaatatcattggcacgaacctgggttagaactcgtcaacttcacctagcaccaccttttctactagacgattatacaccgcgctatcagctactatctgatgtcgatgcttccaagaagcgctcgctcgcttacgcgcatctgcggaattgtaacctgtgtccacgcctatgcggagtcaatcgctttgagacgacagggatgtgtcttattggtgaaaaggcgaaagtcaacaccattgcgcctcattttggagaagagccgtgcattcaggggcataacggaagtggttcagtattcttttcgggctgtaacttgcgttgcaccttttgccaaaaccacgatattgcgcaccagcgaaacggtttcgacctgacgccggaggagcttggcgaatggtacataaagctacaagacgtaggcaatgtccacaacatcaacttagtcaccccagaacatgtcgtgccacaagtagtattgtcaatactccacgcgcggacgctcggtttaagagtccctatcgtctacaacacgtctgcgtttgattcgcttgcatcactggagctactcgatggactagttgatatctatctccctgacttcaaggtgtggagccctgcaatatcgcgacgcttgcttaaggccgacgactacgctgctactgctacagagagtattcgtgcgatgcatgcccaagttggcgatctgtgcttcaccggagacggcgttgcgaagaaaggtgttttggttcgccaccttgttatgccagggcaggaagaggaggcaaagtcgattttcaagtttctcgctgagaatgtgtctcgggataccttcgtcaatatcatggagcaatatagaccagatgcacatgttggaaagccaaagcgtcgcacgaaaagaaacgaagacaatgccctgaccgaagacaccataaaaagccaggaagaagttcgctacgcggagatcaatcggccagtgacgaaaaatgaagtctcagctgttagacgggctgccgaggctgtgggtctctggcgattttgtgatccgccgaagcatgatggatttgccatttgaacggctccacgcgtcggaaccactgcttcagacacaagcttcgctcctttcgcttcccgttgagctactacaacaagtctacgaatcccttggtctattcaacctcctatctcttgctctttcatgcaagacgagactggtggtcacggaagcttacggaagtgctatagacgctcatgtgggaagagtaataatctaacgatcttccgaatagaccggcgaatgacattcgtatatatatatatatacacctgaacccctctatcatgctccttggagcataccacatcacctcaggtggtaaaccgaataagcgggccactttgtgacactacttgtcttctgctagatgctcagtaaaccgagaatgatctcagactcacgatgttcatgggggagttagcgacccattgttatgcggagtaattaagtacaacactatagaagacgttgatatgtctcctgcgagactactaaactcatcctttcctccatccgatcgcgagaatcaaatctcgacaaccttttcaatatcaaacccgttagaacgacccatataatatcctttctgatttgccagcacccgtagccgtccatcttcaaggaagaaatcacagttatgatgagtgtgtccaaatgcccacaacttgactaacccacttttccagcacgcctcctgacttaaatctgtcacaaacccggactgtatatcgctacccctgtgtatttcctcgttggcctcgtcgtccatggttggactgtgatgcgtgaggatgatgatcttcctttccttgccatcttgttgcttctgttgctctatcgcggcaacttgtgtattaagccatgctagatcggtctgaaaggccttgttatgctcctccaccgtccaatttttcgtgagatagaaatcttgtaatccgagactgacgtccttcattgacttctctggaacatgagagaatagtgtacagcctaggacggtgacgacttcatcatttgcgccttcagggctagagatcgacgattcaatatcgtaccgagccttgtccataagtataaactcgcctaagccgcaccctggatccttggttcgctcgccttgtatctcagcttcgaaggcacgcatagactcaatcgcctgatcccaatccgaatgccaaggctcgtggtttcccatcacgagaaatatagctttgaagatagcgagatgacgacgcaggaataggtgataattcgtcttgtgcttgacgacgtagcctatatcccccaatagtgcgaggtagggagcctttggcgggatgggaaacatcttgtaggccttcggagactcaagatggaggtctgaaaggatctgtagctgtaccatcttcagctctggttgactgcgagcttttagaaaagatcttgatgtagcgaggttcgagagcaggatgaacgatgattattagtatgtgtggttcttagatctctgcgatggtcactaggtatgggtgatgaaacgcggactgatattccttcaggaaataaatcagtctcctataatcggtatatcctttgtctcaagacccatttgtacttaaacagaagaacaatgtccagttttgtgattatcaggacgttgaattgcagctgcctgctcttaagatgttggtgtgtcaggtttaggttctgggtgggtcgcccattggtatggatctaacagtggattagggggttcttatagaaggcagcaggttatcttacagactgccaactggttcatatcgcgctcaataagtcgtagcttgattattgagtgactcaggagtagaaatt

SEQ ID NO: 9832 - DNA, 858 bp, Muscodor strobelii
  misc_feature: SGI cDNA ID NO. 563091
  misc_feature: Encodes the peptide sequence at SEQ ID NO 9833
atggtacagctacagatcctttcagacctccatcttgagtctccgaaggcctacaagatgtttcccatcccgccaaaggctccctacctcgcactattgggggatataggctacgtcgtcaagcacaagacgaattatcacctattcctgcgtcgtcatctcgctatcttcaaagctatatttctcgtgatgggaaaccacgagccttggcattcggattgggatcaggcgattgagtctatgcgtgccttcgaagctgagatacaaggcgagcgaaccaaggatccagggtgcggcttaggcgagtttatacttatggacaaggctcggtacgatattgaatcgtcgatctctagccctgaaggcgcaaatgatgaagtcgtcaccgtcctaggctgtacactattctctcatgttccagagaagtcaatgaaggacgtcagtctcggattacaagatttctatctcacgaaaaattggacggtggaggagcataacaaggcctttcagaccgatctagcatggcttaatacacaagttgccgcgatagagcaacagaagcaacaagatggcaaggaaaggaagatcatcatcctcacgcatcacagtccaaccatggacgacgaggccaacgaggaaatacacaggggtagcgatatacagtccgggtttgtgacagatttaagtcaggaggcgtgctggaaaagtgggttagtcaagttgtgggcatttggacacactcatcataactgtgatttcttccttgaagatggacggctacgggtgctggcaaatcagaaaggatattatatgggtcgttctaacgggtttgatattgaaaaggttgtcgagatttga

SEQ ID NO: 9833 - protein, 285 aa, Muscodor strobelii
  misc_feature: SGI Peptide ID NO. 563091
  misc_feature (2)..(250): Pfam Id: PF00149 Pfam Desc: Calcineurin-like phosphoesterase
  misc_feature (6)..(250): Pfam Id: PF00149 Pfam Desc: Calcineurin-like phosphoesterase
  misc_feature (1)..(285): NCBI GI: 119180634 Blast Desc: CIMG_08936 [Coccidioides immitis RS] gi|240111643|gb|EER29789.1| calcineurin-like phosphoesterase, [Coccidioides posadasii C735 delta SOWgp]
  misc_feature (1)..(285): NCBI GI: 159131606 Blast Desc: Ser/Thr protein phosphatase superfamily [Aspergillus fumigatus A1163]
  misc_feature (2)..(285): NCBI GI: 259489271 Blast Desc: TPA: Ser/Thr protein phosphatase superfamily (AFU_orthologue; AFUA_1G14840) [Aspergillus nidulans FGSC A4]
  misc_feature (1)..(285): NCBI GI: 70996196 Blast Desc: Ser/Thr protein phosphatase superfamily [Aspergillus fumigatus Af293] gi|66850488|gb|EAL90815.1| Ser/Thr protein phosphatase superfamily [Aspergillus fumigatus Af293]
  misc_feature (1)..(285): NCBI GI: 119494952 Blast Desc: Ser/Thr protein phosphatase superfamily [Neosartorya fischeri NRRL 181] gi|119412436|gb|EAW22377.1| Ser/Thr protein phosphatase superfamily [Neosartorya fischeri NRRL 181]
  misc_feature (2)..(285): NCBI GI: 240109394 Blast Desc: CPC735_028990 [Coccidioides posadasii C735 delta SOWgp]
  misc_feature (1)..(285): NCBI GI: 121701013 Blast Desc: Ser/Thr protein phosphatase superfamily [Aspergillus clavatus NRRL 1] gi|119396914|gb|EAW07345.1| Ser/Thr protein phosphatase superfamily [Aspergillus clavatus NRRL 1]
  misc_feature (1)..(285): NCBI GI: 258565007 Blast Desc: [Uncinocarpus reesii 1704] gi|237906949|gb|EEP81350.1| [Uncinocarpus reesii 1704]
  misc_feature (2)..(285): NCBI GI: 119182771 Blast Desc: CIMG_06395 [Coccidioides immitis RS]
  misc_feature (2)..(285): NCBI GI: 255939217 Blast Desc: Pc15g01580 [Penicillium chrysogenum Wisconsin 54-1255] gi|211585000|emb|CAP83044.1| Pc15g01580 [Penicillium chrysogenum Wisconsin 54-1255]
MVQLQILSDLHLESPKAYKMFPIPPKAPYLALLGDIGYVVKHKTNYHLFLRRHLAIFKAIFLVMGNHEPWHSDWDQAIESMRAFEAEIQGERTKDPGCGLGEFILMDKARYDIESSISSPEGANDEVVTVLGCTLFSHVPEKSMKDVSLGLQDFYLTKNWTVEEHNKAFQTDLAWLNTQVAAIEQQKQQDGKERKIIILTHHSPTMDDEANEEIHRGSDIQSGFVTDLSQEACWKSGLVKLWAFGHTHHNCDFFLEDGRLRVLANQKGYYMGRSNGFDIEKVVEI

SEQ ID NO: 9834 - DNA, 231 bp, Muscodor strobelii
  misc_feature: SGI cDNA ID NO. 563092
  misc_feature: Encodes the peptide sequence at SEQ ID NO 9835
atggcgccgccgccgcccccaaaccccaagccctccgcccctaaggggcttaaacagtctactctctgctttgggccggctgcgcccgccgcgagcaccactatccccgcatcaaacgcctcaaaaaagaggccattcgacgccgccgccgacgacgacgacgatgatgacttgacctcgctgcccgcttccaagaagcttttcgtgcagacatcctcaacgcggatatga

SEQ ID NO: 9835 - protein, 76 aa, Muscodor strobelii
  misc_feature: SGI Peptide ID NO. 563092
MAPPPPPNPKPSAPKGLKQSTLCFGPAAPAASTTIPASNASKKRPFDAAADDDDDDDLTSLPASKKLFVQTSSTRI

SEQ ID NO: 9836 - DNA, 453 bp, Muscodor strobelii
  misc_feature: SGI cDNA ID NO. 563093
  misc_feature: Encodes the peptide sequence at SEQ ID NO 9837
atgttgcgtcgtgttttggaggcgaatttccgtctcaactgggaggaagaggagttccacgccgatgatgcagaagtgtttcatctgcttgtcactggtctatggcttcctctagctttaaaccctacagagccgaacattggtagcggccagcttgtagatatcggccaaagcttcggcgaccagaagagcaagcatctcccaaagcttagaaatctcgggtttccgtttcgtttcaagccatactattctggcggaaaatggaagttcgatctcgctcaatctacggtaaagaatctcgagggataccgcacagagcagatggacttaaaggaagagctcaacactgagaaacaagatcacatgatctcgtcctacctcagcttcctccatgctcacgtcgcgaagcacgcacgctttcccgtcaccaaccatgaactctacaaggcttaa

SEQ ID NO: 9837 - protein, 150 aa, Muscodor strobelii
  misc_feature: SGI Peptide ID NO. 563093
MLRRVLEANFRLNWEEEEFHADDAEVFHLLVTGLWLPLALNPTEPNIGSGQLVDIGQSFGDQKSKHLPKLRNLGFPFRFKPYYSGGKWKFDLAQSTVKNLEGYRTEQMDLKEELNTEKQDHMISSYLSFLHAHVAKHARFPVTNHELYKA

SEQ ID NO: 9838 - DNA, 960 bp, Muscodor strobelii
  misc_feature: SGI cDNA ID NO. 563094
  misc_feature: Encodes the peptide sequence at SEQ ID NO 9839
atgctgttgttggactatcagaatgtgctgatacagtccgttctgaccgagcgattctcaggagcaacgcctgcatccatcgaccagaccgtctccgacttcgacggcgtcaccttccacatctccacccccgaaaccaaaacccagatcctcgtctccctctccattcgatgttataaagagctctgtcagtatggcgccgaggaggttctgcagcgcgagtatggccaatatgttgtcgcccccgagcagggctacaacttttccgtcatggtcgacctcgagaacctgcctgctgagaaagaggaacgcgacgagctgatcaagaagatatccttgctaaagcgcaacgccatggctgcccccttcgaacacgcatacgctgagcactacaagctgaaggaggctgcttccaaatacacgagcgaagaggcgccacagggtgtgcgcgaaggcggagaggtcatggccatccactaccgcgacgaggaggctatctacgtcaaggccagtcacgatcgcgtcaccgtcatcttcagcaccatattccgtgaggagaccgacaggatctttggcaaggtcttcattcaggagtttgtcgacgccaggagacgggctattcagaatgcgccccaggtgctcttcaggaatgacccccccttagagcttcagggtgttccaggtgtttcgtccgctacaaatggcgaagtgggatatgttacttttgttttgttcccgcgacacttgacacctcagaggatgcccgatgtcatctcccatatccagaccttccgagactacttccactaccacattaaagcatccaaggcatacatccactcgcgtatgagaaggagaacagcagacttcctgcaagttttgcgtcgcgccaggcccgagaacgaagagaaggagaggaagacggcaagcggccggtccttcagagtacagggggcttag

SEQ ID NO: 9839 - protein, 319 aa, Muscodor strobelii
  misc_feature: SGI Peptide ID NO. 563094
  misc_feature (51)..(303): Pfam Id: PF04045 Pfam Desc: Arp2/3 complex, 34 kD subunit p34-Arc
  misc_feature (1)..(318): NCBI GI: 39945526 Blast Desc: conserved [Magnaporthe grisea 70-15] gi|145021369|gb|EDK05498.1| conserved [Magnaporthe grisea 70-15]
  misc_feature (1)..(319): NCBI GI: 261356184 Blast Desc: ARP2/3 complex 34 kDa subunit [Verticillium albo-atrum VaMs.102]
  misc_feature (1)..(318): NCBI GI: 256733051 Blast Desc: [Nectria haematococca mpVI 77-13-4]
  misc_feature (1)..(318): NCBI GI: 46125353 Blast Desc: FG07054.1 [Gibberella zeae PH-1]
  misc_feature (1)..(318): NCBI GI: 156061897 Blast Desc: conserved [Sclerotinia sclerotiorum 1980] gi|154700495|gb|EDO00234.1| conserved [Sclerotinia sclerotiorum 1980]
  misc_feature (1)..(318): NCBI GI: 154311742 Blast Desc: conserved [Botryotinia fuckeliana B05.10] gi|150850841|gb|EDN26034.1| conserved [Botryotinia fuckeliana B05.10]
  misc_feature (1)..(315): NCBI GI: 164427509 Blast Desc: ARP2/3 complex 34 kDa subunit [Neurospora crassa OR74A] gi|157071772|gb|EAA34660.2| ARP2/3 complex 34 kDa subunit [Neurospora crassa OR74A]
  misc_feature (1)..(315): NCBI GI: 171684539 Blast Desc: protein product [Podospora anserina] gi|170942230|emb|CAP67882.1| protein product [Podospora anserina]
  misc_feature (1)..(318): NCBI GI: 70990336 Blast Desc: ARP2/3 complex 34 kDa subunit [Aspergillus fumigatus Af293] gi|66847649|gb|EAL87979.1| ARP2/3 complex 34 kDa subunit , [Aspergillus fumigatus Af293] gi|159130497|gb|EDP55610.1| ARP2/3
  misc_feature (1)..(318): NCBI GI: 121703201 Blast Desc: ARP2/3 complex 34 kDa subunit , [Aspergillus clavatus NRRL 1] gi|119398008|gb|EAW08439.1| ARP2/3 complex 34 kDa subunit , [Aspergillus clavatus NRRL 1]
MLLLDYQNVLIQSVLTERFSGATPASIDQTVSDFDGVTFHISTPETKTQILVSLSIRCYKELCQYGAEEVLQREYGQYVVAPEQGYNFSVMVDLENLPAEKEERDELIKKISLLKRNAMAAPFEHAYAEHYKLKEAASKYTSEEAPQGVREGGEVMAIHYRDEEAIYVKASHDRVTVIFSTIFREETDRIFGKVFIQEFVDARRRAIQNAPQVLFRNDPPLELQGVPGVSSATNGEVGYVTFVLFPRHLTPQRMPDVISHIQTFRDYFHYHIKASKAYIHSRMRRRTADFLQVLRRARPENEEKERKTASGRSFRVQGA

SEQ ID NO: 9840 - DNA, 1289 bp, Muscodor strobelii
  misc_feature: SGI EST ID NO. CUFF.23187.0
  misc_feature: Variant of the nucleotide sequence at SEQ ID NO 9838
cgcagcccctccaccgtcgagtctgaggtctagttcaagctcaccttcgacttcaaaatctaacatcgcattgagcccgctgtccccaattcacttagatcgacagcggacagcacacgccttctcccaaaatgctgttgttggactatcagaatgtgctgatacagtccgttctgaccgagcgattctcaggagcaacgcctgcatccatcgaccagaccgtctccgacttcgacggcgtcaccttccacatctccacccccgaaaccaaaacccagatcctcgtctccctctccattcgatgttataaagagctctgtcagtatggcgccgaggaggttctgcagcgcgagtatggccaatatgttgtcgcccccgagcagggctacaacttttccgtcatggtcgacctcgagaacctgcctgctgagaaagaggaacgcgacgagctgatcaagaagatatccttgctaaagcgcaacgccatggctgcccccttcgaacacgcatacgctgagcactacaagctgaaggaggctgcttccaaatacacgagcgaagaggcgccacagggtgtgcgcgaaggcggagaggtcatggccatccactaccgcgacgaggaggctatctacgtcaaggccagtcacgatcgcgtcaccgtcatcttcagcaccatattccgtgaggagaccgacaggatctttggcaaggtcttcattcaggagtttgtcgacgccaggagacgggctattcagaatgcgccccaggtgctcttcaggaatgacccccccttagagcttcagggtgttccaggtgtttcgtccgctacaaatggcgaagtgggatatgttacttttgttttgttcccgcgacacttgacacctcagaggatgcccgatgtcatctcccatatccagaccttccgagactacttccactaccacattaaagcatccaaggcatacatccactcgcgtatgagaaggagaacagcagacttcctgcaagttttgcgtcgcgccaggcccgagaacgaagagaaggagaggaagacggcaagcggccggtccttcagagtacagggggcttagaatatttgatcgcggcatgggcaacttcactttacatacctcgtccaatcaccacactgcgctagacacgttgggacgtccggcagtcgagaatactaagaccaacaattacaactagaaattctccaaatattcttgctcattatactataacctatgtgaagtactacgttggctgatttcttacacttatcttcc

SEQ ID NO: 9841 - DNA, 2910 bp, Muscodor strobelii
  misc_feature: SGI cDNA ID NO. 563095
  misc_feature: Reduced expression when VOC is produced
  misc_feature: Encodes the peptide sequence at SEQ ID NO 9842
atggtcaagtcctacttgaaatatgagcatgcgaaatcctttggcctcgtcacgtctcccacctctaacatcctgtggtcctccaaggatggctccgccaccagcgccggtcaggccatcgtcgccgccaacgaggaggtgatcagctgggatataaagactggcgacgtcttgaacaggtggaaggacagtgcctgtgcagcccaggtcactgccatcgcccagagcaaggtcgacaaggatgtcttcgccgtcggatacgaggacgggagcattcggctgtgggacaagtacggaaccgtcatcgtgagcttcaacggccaccgctccgccatcacgaacctcgccttcgacagatctggtgtgcgcctagccagtggctctcgagacaccgatatcattgtttgggacctagtcgcagaagttggcatgttcaaactgcgtggccacaaagaccagatcactgggctgcagttcgtggagccccaacaggagatctcagaagaagatggctcccaatccatggtgctggacaacgagaacacgtccgacggtttcctgctaaccaccagcaaggactcactgatcaaactctgggacctagggtcgaaacactgtatagaaacacatattgcccagacaaacggcgagtgctgggcattggggttggctacagactacagcatatgtgttacggcgggaaactctggcgagctcaaagtctggactttagatgccaaatccctcgcctcctctaggaaccaagtcgatgtccctacgaatatgcaatacttacacgaccgaggaacactatttaggcaaggcaaggacaaagccaccgaggtcatctttcaccctcgccgggattactttgccgtacacgggtcagagaaggccgtcgatatatggaggattcggttagattccgaagtgaaaaagagtatggccagaaaaaggaagagaaggcgagaagaaaagaaaaagaaggcaaagaaaggaagtaaggcggacgatgacgagcctgtcgaagacgatgacgccgacgaagacgaaaatgtgggcgccgccgacgtgacagacttattcgcacagcatctcatcattcgaacgggtggcaaagtacggtcagtcgactgggcagatacctcgggcaagaagagattacagttacttgtttctacatcgaataaccagttggaactattcaatatgccattaaagcagaagagttctaagtcgaaagaagaagaggtaccagactacgaaagggcactatccgttgagcttccaggccatcgagcagatattcggtccctagcgctcagctcagatgataggttgctagcctccgcatcaaacggatccctgaagatctggtctatgcttacccagaaatgtggcaagacactcgactgtggatacgccctgtgctgcgcattcttaccgggagataagcttgtggtcataggcacgaaaagcggcgagatcgagctcttcgaggtgtcaacggggacactacttgacagcgtgacagcacacgaaggggcgatttggtctttgcaagtccatcccgacggccggtctatcgtctcgggaagcgccgacaaatcagccaaattctggaaagtccaggttgttcaggagcaggtattgggcacaacgcggacgacccaacgcctcaagttgtcccacgctaggactttgcaagtttcggacgatattctcagcttaaaattctcccccgacgccaaatacttggccgtggccctattggacagtacggtcaaggtattcttcacggactctctgaagctatacctcaatctctacggtcacaagctccctgtcttagacatggatatatcatacgacgggaaattgatcgtgacatgttcagcagacaagacagtgagaatatggggcctggactttggtgactgccataaggccattatagcacatcaggacagtattcttcaggtcaagtttgtgcccaacaatcgggagggcaacggtcatcacttcttcagcgccagtaaagaccgcacagtcaagtactgggacggagacaagtttgaacagatccaacgtcttcacgggcatcacggcgaaatctgggcgttggcgatcagccgtagcacagagccgccatttatagtcagcgctagtcacgacaagagcatacgtatctggcacgagacggacgagcagatatttttagaagaagaaaaagaaaaagagatcgaagagttgtacgaaagcacgttgacgggatcgctcgatcgggaggacgacgaggagggcgagaacggcgaggtggccgcagcctcgaagcagacatccgaaacattgaaccacggtgagcggatcgcggaggcgctggagcttggcatggcggacttgcatatcatgaaggagtgggaggaggccaaggcagccaatccgtacgtggggccaccgcagcgtgacccgatgttcatggcgcacggtaacatctctgctgaggaatacgtgatgaaggtgctttcgcggccggcggcatcggcgctgaacgatgcattgctcgtcttgccgtttgcgtcgattccgatgctcttcacattcctaaatctgtttaccgtccggtcgatgaacattccactgacctgccgcattctgttcttcatgctgaagacgcaccaccgtcagatcgtggccagccggtcgatgcgggtaatgttagatggggtccggaccaatctgcgacaggtgctcaagcgacaaaaggacgagatgggatacaacatagcggcgctcaaggtggcgggcatgcaaatctcggaaaacagcgtaaagagctacgtagacgagaactgggacgatggcagcgagccgaatgcgaggaagagggctttcgtacaggtgtcttag

SEQ ID NO: 9842 - protein, 969 aa, Muscodor strobelii
  misc_feature: SGI Peptide ID NO. 563095
  misc_feature (504)..(542): Pfam Id: PF00400 Pfam Desc: WD domain, G-beta repeat
  misc_feature (645)..(688): Pfam Id: PF00400 Pfam Desc: WD domain, G-beta repeat
  misc_feature (692)..(732): Pfam Id: PF00400 Pfam Desc: WD domain, G-beta repeat
  misc_feature (99)..(137): Pfam Id: PF00400 Pfam Desc: WD domain, G-beta repeat
  misc_feature (603)..(641): Pfam Id: PF00400 Pfam Desc: WD domain, G-beta repeat
  misc_feature (423)..(460): Pfam Id: PF00400 Pfam Desc: WD domain, G-beta repeat
  misc_feature (141)..(200): Pfam Id: PF00400 Pfam Desc: WD domain, G-beta repeat
  misc_feature (750)..(968): Pfam Id: PF04003 Pfam Desc: Dip2/Utp12 Family
  misc_feature (750)..(933): Pfam Id: PF04003 Pfam Desc: Dip2/Utp12 Family
  misc_feature (1)..(969): NCBI GI: 121703199 Blast Desc: WD domain protein [Aspergillus clavatus NRRL 1] gi|119398007|gb|EAW08438.1| WD domain protein [Aspergillus clavatus NRRL 1]
  misc_feature (1)..(969): NCBI GI: 261196492 Blast Desc: WD domain-containing protein [Ajellomyces dermatitidis SLH14081] gi|239595894|gb|EEQ78475.1| WD domain-containing protein [Ajellomyces dermatitidis SLH14081] WD domain-containing
  misc_feature (7)..(969): NCBI GI: 70990338 Blast Desc: small nucleolar ribonucleoprotein complex subunit Dip2, [Aspergillus fumigatus Af293] gi|66847650|gb|EAL87980.1| small nucleolar ribonucleoprotein complex subunit Dip2, fumigatus
  misc_feature (1)..(969): NCBI GI: 145229331 Blast Desc: An01g05500 [Aspergillus niger] gi|134055077|emb|CAK43718.1| protein product [Aspergillus niger]
  misc_feature (1)..(969): NCBI GI: 255939075 Blast Desc: Pc15g00810 [Penicillium chrysogenum Wisconsin 54-1255] gi|211584929|emb|CAP82967.1| Pc15g00810 [Penicillium chrysogenum Wisconsin 54-1255]
  misc_feature (1)..(969): NCBI GI: 226287401 Blast Desc: DOM34-interacting protein [Paracoccidioides brasiliensis Pb18]
  misc_feature (1)..(969): NCBI GI: 154280108 Blast Desc: conserved [Ajellomyces capsulatus NAm1] gi|150412810|gb|EDN08197.1| conserved [Ajellomyces capsulatus NAm1]
  misc_feature (1)..(969): NCBI GI: 225562889 Blast Desc: WD domain-containing protein [Ajellomyces capsulatus G186AR]
  misc_feature (1)..(969): NCBI GI: 226279047 Blast Desc: DOM34-interacting protein [Paracoccidioides brasiliensis Pb01]
  misc_feature (1)..(969): NCBI GI: 67516047 Blast Desc: AN0305.2 [Aspergillus nidulans FGSC A4] gi|40746555|gb|EAA65711.1| AN0305.2 [Aspergillus nidulans FGSC A4] gi|259489467|tpe|CBF89762.1| TPA: small nucleolar complex A4]
  misc_feature: Useful for introducing or modulating the production of volatile compounds
MVKSYLKYEHAKSFGLVTSPTSNILWSSKDGSATSAGQAIVAANEEVISWDIKTGDVLNRWKDSACAAQVTAIAQSKVDKDVFAVGYEDGSIRLWDKYGTVIVSFNGHRSAITNLAFDRSGVRLASGSRDTDIIVWDLVAEVGMFKLRGHKDQITGLQFVEPQQEISEEDGSQSMVLDNENTSDGFLLTTSKDSLIKLWDLGSKHCIETHIAQTNGECWALGLATDYSICVTAGNSGELKVWTLDAKSLASSRNQVDVPTNMQYLHDRGTLFRQGKDKATEVIFHPRRDYFAVHGSEKAVDIWRIRLDSEVKKSMARKRKRRREEKKKKAKKGSKADDDEPVEDDDADEDENVGAADVTDLFAQHLIIRTGGKVRSVDWADTSGKKRLQLLVSTSNNQLELFNMPLKQKSSKSKEEEVPDYERALSVELPGHRADIRSLALSSDDRLLASASNGSLKIWSMLTQKCGKTLDCGYALCCAFLPGDKLVVIGTKSGEIELFEVSTGTLLDSVTAHEGAIWSLQVHPDGRSIVSGSADKSAKFWKVQVVQEQVLGTTRTTQRLKLSHARTLQVSDDILSLKFSPDAKYLAVALLDSTVKVFFTDSLKLYLNLYGHKLPVLDMDISYDGKLIVTCSADKTVRIWGLDFGDCHKAIIAHQDSILQVKFVPNNREGNGHHFFSASKDRTVKYWDGDKFEQIQRLHGHHGEIWALAISRSTEPPFIVSASHDKSIRIWHETDEQIFLEEEKEKEIEELYESTLTGSLDREDDEEGENGEVAAASKQTSETLNHGERIAEALELGMADLHIMKEWEEAKAANPYVGPPQRDPMFMAHGNISAEEYVMKVLSRPAASALNDALLVLPFASIPMLFTFLNLFTVRSMNIPLTCRILFFMLKTHHRQIVASRSMRVMLDGVRTNLRQVLKRQKDEMGYNIAALKVAGMQISENSVKSYVDENWDDGSEPNARKRAFVQVS

SEQ ID NO: 9843 - DNA, 10356 bp, Muscodor strobelii
  misc_feature: SGI EST ID NO. CUFF.23887.0
  misc_feature: Variant of the nucleotide sequence at SEQ ID NO 9841
cgagaacgaaaggccgcctgcattttcaagtcaattggtcgcaatcatggtcaagtcctacttgaaatatgagcatgcgaaatcctttggcctcgtcacgtctcccacctctaacatcctgtggtcctccaaggatggctccgccaccagcgccggtcaggccatcgtcgccgccaacgaggaggtgatcagctgggatataaagactggcgacgtcttgaacaggtggaaggacagtgcctgtgcagcccaggtcactgccatcgcccagagcaaggtcgacaaggatgtcttcgccgtcggatacgaggacgggagcattcggctgtgggacaagtacggaaccgtcatcgtgagcttcaacggccaccgctccgccatcacgaacctcgccttcgacagatctggtgtgcgcctagccagtggctctcgagacaccgatatcattgtttgggacctagtcgcagaagttggcatgttcaaactgcgtggccacaaagaccagatcactgggctgcagttcgtggagccccaacaggagatctcagaagaagatggctcccaatccatggtgctggacaacgagaacacgtccgacggtttcctgctaaccaccagcaaggactcactgatcaaactctgggacctagggtcgaaacactgtatagaaacacatattgcccagacaaacggcgagtgctgggcattggggttggctacagactacagcatatgtgttacggcgggaaactctggcgagctcaaagtctggactttagatgccaaatccctcgcctcctctaggaaccaagtcgatgtccctacgaatatgcaatacttacacgaccgaggaacactatttaggcaaggcaaggacaaagccaccgaggtcatctttcaccctcgccgggattactttgccgtacacgggtcagagaaggccgtcgatatatggaggattcggttagattccgaagtgaaaaagagtatggccagaaaaaggaagagaaggcgagaagaaaagaaaaagaaggcaaagaaaggaagtaaggcggacgatgacgagcctgtcgaagacgatgacgccgacgaagacgaaaatgtgggcgccgccgacgtgacagacttattcgcacagcatctcatcattcgaacgggtggcaaagtacggtcagtcgactgggcagatacctcgggcaagaagagattacagttacttgtttctacatcgaataaccagttggaactattcaatatgccattaaagcagaagagttctaagtcgaaagaagaagaggtaccagactacgaaagggcactatccgttgagcttccaggccatcgagcagatattcggtccctagcgctcagctcagatgataggttgctagcctccgcatcaaacggatccctgaagatctggtctatgcttacccagaaatgtggcaagacactcgactgtggatacgccctgtgctgcgcattcttaccgggagataagcttgtggtcataggcacgaaaagcggcgagatcgagctcttcgaggtgtcaacggggacactacttgacagcgtgacagcacacgaaggggcgatttggtctttgcaagtccatcccgacggccggtctatcgtctcgggaagcgccgacaaatcagccaaattctggaaagtccaggttgttcaggagcaggtattgggcacaacgcggacgacccaacgcctcaagttgtcccacgctaggactttgcaagtttcggacgatattctcagcttaaaattctcccccgacgccaaatacttggccgtggccctattggacagtacggtcaaggtattcttcacggactctctgaagctatacctcaatctctacggtcacaagctccctgtcttagacatggatatatcatacgacgggaaattgatcgtgacatgttcagcagacaagacagtgagaatatggggcctggactttggtgactgccataaggccattatagcacatcaggacagtattcttcaggtcaagtttgtgcccaacaatcgggagggcaacggtcatcacttcttcagcgccagtaaagaccgcacagtcaagtactgggacggagacaagtttgaacagatccaacgtcttcacgggcatcacggcgaaatctgggcgttggcgatcagccgtagcacagagccgccatttatagtcagcgctagtcacgacaagagcatacgtatctggcacgagacggacgagcagatatttttagaagaagaaaaagaaaaagagatcgaagagttgtacgaaagcacgttgacgggatcgctcgatcgggaggacgacgaggagggcgagaacggcgaggtggccgcagcctcgaagcagacatccgaaacattgaaccacggtgagcggatcgcggaggcgctggagcttggcatggcggacttgcatatcatgaaggagtgggaggaggccaaggcagccaatccgtacgtggggccaccgcagcgtgacccgatgttcatggcgcacggtaacatctctgctgaggaatacgtgatgaaggtgctttcgcggccggcggcatcggcgctgaacgatgcattgctcgtcttgccgtttgcgtcgattccgatgctcttcacattcctaaatctgtttaccgtccggtcgatgaacattccactgacctgccgcattctgttcttcatgctgaagacgcaccaccgtcagatcgtggccagccggtcgatgcgggtaatgttagatggggtccggaccaatctgcgacaggtgctcaagcgacaaaaggacgagatgggatacaacatagcggcgctcaaggtggcgggcatgcaaatctcggaaaacagcgtaaagagctacgtagacgagaactgggacgatggcagcgagccgaatgcgaggaagagggctttcgtacaggtgtcttagtcgacctaccgtccaaaatatgggcggcgcagttcaactccaaccccttttctccgggtgatgttacgatagaaagcgtctggttccgcaaaaggagaccgggtacccttccaagacaccctacgacgtatctgtaccatatgtgccaactgaattgggatttcaaacgacgcaattaacaaaaaatgtgtccttcttacgataaacggtgtgatcttaagcgtctccaattccgagcccatctgactgataccaacttctcagtgttttaccccagattctccaaacagcgagggcatcggagtcttggcaggggaccatcggctctcatcagtgcccctcccccgccatggtctagtccagctctagcatccatggatgtttggttcggtgtagccggctatcgtctaccgcctgcctggttggtagctctacctcggcatcccatccacaaccaccgatgccagtcccaatgagggcctcaacttttctgctaacaggatctagcgacatccttggctcggccttggacctgcacacaccggcaccaatggctcattttcttggtcaatgtctgatctagtcttcatagcgatgcgataattgttgaaaaatttcgtcctcaatttggctttctgacgtcttgctctcacgtatctctctattcgattgacgatttgcttcatattgcttcatattaccgtcgcataaacaacaccggggtatatcacgcagtgcgccacagccaccaccatggccggacaagtgaggcatcctatcgacctcaaggccctcgaggcctacatcaccaagaatgtgcccgagatccaagtcccattggacgtgaagcaattcggcttcggacagtccaacccaacataccaactaacctcgcccaatggccaacgctacgtcctccgcaagaaacccccaggaaagctcctctccaaatccgcccacaaagtcgagcgcgagcaccgcatcatcgccagtctggggcccaccgacgtgcccgtccccaaagcctactgcctctgcgaagacagctctataatcggcacgcccttctacatcatgtccttcctcgacggccgcatcatcgaagacccagccatgcccgacgttctgcccggtgagcgcacagccctctggcgcgccgccataacgaccctcgcccgtctccacgccgtcgacgccgacgcacagggcctcggcaacttcggcaagaaaacaggcttctacgatcgccaactcaaaacctgggaaaccatctgcgccgcgcagtccagcgcaaaggacgcagataccggtattcccgtaggcgagctgccgcacttcaagtccttcctctccttcttctccggatcctcaaagaccgactccgctctgcggcccaaagataggggaaccataatccacggcgactacaaaatcgacaacatagtcttccacaagacggagccccgcgtaatcggcatcctcgactgggagatgtcgacgataggacatcctttgtcggatctagccaatatcctcaacccctactacctagcgcccatgctcacaaaccccaaatacaaaccttcctcttcctcttcctcatccccatcttcttcttcctcaggcacgtcatctcacaaatcctcaacaatagcacacccaggcttcctgcccaacacaacacccggtctaccatctgttccccaaatcctgcagtggtacgtcgaagccctcaacggcgcatgggacccccgtcccgagatgaactgggcactctccttctccatcttccgacaagcctgcatcacgcagggcatcgcggcccgcgtcgcgactagacaggcgagttccgcctcggcgaaacaacacgcggacgcgcggcacaatctggccgagttcgcctgggagcttgtagacgctgagcggaagaaggtaaacgacgggaagggggagggggagggggaggttgctaagctatgagttggctggttggctggttggctggttggttggttggtggtttgtatatatgttaagagaagaaaagaatctagatgagaatttaagcgatgagttgatgtttcctactgcggcgaagcgtgacgattgagagtgaaatgtgggaacgattaatgtacggtgagatatgctgtattatgctagatgagattcttcgaggcaagtcggtacgagacagattgttggagcctacgcgaaaggaaaattatagaaaacattacccatgacatatttcaacctttgccccatcacttgtttaaatgatcttacagcggtacatcacatgttccttgcaacatcttttggtagcaactcaagcagtcttcgaatgtctaaatcagcccagtaaactcaacgactcacaacgaaacacacagagactcatacaccgcagaatgaatttctcattatgttccatactactctatcgatatgagggggaatcactgatgatctgttcccaagccggggggggggatattccgagagagattccgagcgaagaaaagaaacgattgcacagaaatcaatgtgatagccccttgcgaaaatgccacgctgtcatgatgatgcaaactgggtagatgagtagaataaagcaagtaaaccaccgccgccgcctgattgaactcctgactggcccagaccggcgtcgagtgagaaacgggaaaagtaccgccatccccgaaagactgggaggaatcgtgttgtcacggcctaatcaagtacccatgcgaggactgacgcctaccatcgcccccgtaccattgaaataaattatgaagaacgagtcgaaaacgcccgattgaaacaccttgtttctagatggtgttggttccgaatgctgcgcattgacaggggaacagaatgagaaagatccccgccgtctatagaatggatatcggaaggcccctgccggtagacggcgagacgcagagagaagctgaacgcccgaatgcaatattagaaggaacttccgagttcttggatcagtattggttttggtgtcgtcgagtcgtatgcatgacattttcatggctttcccttctcagcgaccggtgtacagctgatccatgctttcgctccatgaaaactcctagatttgttgaaaggaagtgaattgattgggaaacgtgtgctccgacggagcgtacccgggccctcgaggtgggagagggcctgggtgcagtgacggtagcataatgggctgaccgggtgccgttgctgcgttgtcgctggccgacggaatccgctggaaaacctcatcagtatttgccatcatctgtggcagaaacggaggagtctgtgcccaaacaccgaaggggcgaggagcgtgatgagacgccgttgcatccctctgattgggactccgtggtgacctgttcgttctgggaaactgttgcgggctcctaattagtgatcgatgattgctagcgcgagctccagcattctcatagtgaacaggagagcgagagcgagaacgagagctacggaccggagtgtggggtgcgttcatcatagttgggctcccggctacgttatagcggcccgatctgctgtgccggggtcgagttctggggcgatcgctgttgtcattgtcggtgggaggaggtcgacgttcggcagggttggcctgtggtggttgcacatccgcgttccggtcgtacctctggaaaaagggaggctgcggccggctgtgtgaccctgagtccaaagagagactttgcccaagattagtaatgtgtcgcaaaatgacatcaaagggatttttctgtgtttttgcctacttgtaaggatccatggtaagatcggcgagtggttgtgcctgtggcatcgacgcttctggatttgacgggctccgaatgtgactattgttctgcatttgactttgcctcgccaccatttgctgtgattgaacctgatattggcgcatgagcctcaaaaccgagggagtcctgcaggaacggctttgctgaaactcggagtgcactttgtcccggcagtaagggcagctgtcagagtcttcgaaccacttcttgatgcagtggtcaccaaacacatgtctgcattttggcaacctcagaggagcctcattgataccctccgggttcgctacgccaaagtcgttgtaacagatcacgcacgctaagcggaaaacgttagtttccgaatcaatcacacgggtcgggctccttacttttctcgctctccggaagatccgccagatcaacggtctggagggacgcaatggctttcttggaagcaactctcttccctggcctggtgctcctgaacgctgggtgtggtctcgccggatagactggcgttgccgcactctctccttcttggactgttctcggatagccctcgacgaactccagcaggctcaggtggggccgcatttgatcctcgttgtcccctggccagtctgtatgttcatttgccctcggcaaggcacgcctgtgtcggaagccttgcatcacgggcctctggcgcatctcattaagactgttcgcgcggtatatgtattcgttgggtcgctgtggcggattcgtgaccgtgaccgatactgattgcgaatctatgagcaatttcaacgttagacagatccccaaaggacatataaaaagaggcactgacctgagcgggaggtggtattttcccccgtcgttgctacggcctgtggttgtggcaaggctgttgatcctgactgatccaataagtcacgtaatcggaaattgggaggttgttgttgttgttgtgcgggcccggggatcccataaatcattggtgtgtcctgactgatctggcctacatctctcgagggccttagcggtatggccggtgcaacaggtgcggcgagatcggagtgcggagtattcagcccaccttcagtcctttgagcagagtagctggacggctgctggctgtttgcattgtccacgtccacgtttgcagcttctcgagcaccgtgacgggagaattggtcaaacgggcggtgcatcggctgcattggttgcaccagaggccggaacggcggccggtaagaaccttgtatgaatggaaagccatctggctggcccaacatggcataggggggtaaattctgaggtggctggttgggctcggtaagagcaggtaacatgctcatcataaagtcatcttgtccgtatgcatgtgttggcagcatggccggctgccatctctgagggcttcgggattgccaatggcttctgttagacgcatttgcatggactgggtcatagaacggattgtctcgaggcggtgaagctgcctgggagtgatagttccgtgcttcagcatttgcgcgcaaagcaggacaccggatagccgaagagggcgagccatcacttgggtggtggtgatgttggtgatagtggggacggcggtggtggtggtggggggtatgcatggtatagtccatggttgacgaatccattctttcagcggctgttgtcaagagagtggcggcccttttttgtagaggccgtcactctcctcttgaactcgagcaggcttcaggactgcctcgggttggcatgagtaatgctcaaaagatcggaacagacagtgaggggtcagggtgtgggatgatagccagcgtttcttgtgaagtatgacctgcccgtaagtcggtaaccgcacagggtacagccgtcaagctccaatcctagatcctttggtggagcgggctttcagtgcacggtgagaaatgagaaacccaaacgaacggtgcaagaaaagagctccgttgaatgagttggaggcgtcaatgttttcaacctgcttgttggttcttgttggtccttgtgggctgcacgactggaatctgaaaacgcagggtcgcgatagattcccggtctaagtgtgttggtgggatgttggaaggggatggggctagtcagatcaggtcagcagcaagcccgagcatgccagggaaattggttcgaccctgctatgctgcaaggcggtgattgttggcggtgccgtcgaagaaagaaagcatgaaagagaagtacaggcgagaagaggatccaagcttgccggcaatggacctctcttatgattcatcggcgatagacaatgaaccagctgagttgagctctcgggcctcttttccacacacacgctcgatttggcttgtgttcttctcggcctgctgctgctttccagggcggcttggtcggtgctggctgatgctagctgaatcacacctccaatagtcacgacggcgccggcgggcgggtgaacagtgaataggtgctggatccgctcgggacgaaagatgcttgaacactgggaatagaattttatttctaatatgttgcggtatgacaaagagtgacaagattggagaaattactgaggttgggtgaggcaaacagagacgaacattgaattacacctaacctagtcacatgagcagccgatgaggacacgggatgtggtatctttaggtaggtaccgattgtggctccggatccacgtcgcatctaggctgaggagtagggggaggcagagaaggcggaagacgaggacagggacaagaacaacgagggaagtgcgttctgctaacttgacgacaattcaggcaagtcaagtcgggctggcttcaggaagtgacgaggatgtgactgcatttctatgccttattatagtttcctaacatgtaactaccttccgagccgccgctcctcctctttccaaggttaattcaatccgactattggatactccgtgtggccagacgtccacgggtttgcgaataatgccatacacgtatgttactagataactaaccagcctctgctggacagccctagcttcgctcccagggtcaagtttccaccagcggacattcatcacatccattcagctgatcagaacatcatagatcactctctggcgaaaagaaaaggcagtcctccatgaaatcggccggtacacatgtgcaaacgggaagagaccaagttgaacaatcctgcaaggtgtgcaggtgtgatcgatttatgatcgcacttacatcgcacttataggcgcaagggagccggtctccagttggagtctgatagtgccatcccgccgcaggtgctgaattaccttactgtaccacctaggtgatcggcccctaggataagcgacatcaatatcctttgcctatccgtccgtcaaacgataaggtatacgatattcaatagcttatgccgggagctctacccgctatcttcttagagcaaatatataatcaagcacgtatacaacaaacagcacataacgtccgtgaactgagcttccgaaacctgacccatgcatctgtgtgaacatccatcggaatgccaggaaggatcttgaggggcaag

SEQ ID NO: 9844 - DNA, 1701 bp, Muscodor strobelii
  misc_feature: SGI cDNA ID NO. 563096
  misc_feature: Reduced expression when VOC is produced
  misc_feature: Encodes the peptide sequence at SEQ ID NO 9845
atgccattaaagcagaagagttctaagtcgaaagaagaagaggtaccagactacgaaagggcactatccgttgagcttccaggccatcgagcagatattcggtccctagcgctcagctcagatgataggttgctagcctccgcatcaaacggatccctgaagatctggtctatgcttacccagaaatgtggcaagacactcgactgtggatacgccctgtgctgcgcattcttaccgggagataagcttgtggtcataggcacgaaaagcggcgagatcgagctcttcgaggtgtcaacggggacactacttgacagcgtgacagcacacgaaggggcgatttggtctttgcaagtccatcccgacggccggtctatcgtctcgggaagcgccgacaaatcagccaaattctggaaagtccaggttgttcaggagcaggtattgggcacaacgcggacgacccaacgcctcaagttgtcccacgctaggactttgcaagtttcggacgatattctcagcttaaaattctcccccgacgccaaatacttggccgtggccctattggacagtacggtcaaggtattcttcacggactctctgaagctatacctcaatctctacggtcacaagctccctgtcttagacatggatatatcatacgacgggaaattgatcgtgacatgttcagcagacaagacagtgagaatatggggcctggactttggtgactgccataaggccattatagcacatcaggacagtattcttcaggtcaagtttgtgcccaacaatcgggagggcaacggtcatcacttcttcagcgccagtaaagaccgcacagtcaagtactgggacggagacaagtttgaacagatccaacgtcttcacgggcatcacggcgaaatctgggcgttggcgatcagccgtagcacagagccgccatttatagtcagcgctagtcacgacaagagcatacgtatctggcacgagacggacgagcagatatttttagaagaagaaaaagaaaaagagatcgaagagttgtacgaaagcacgttgacgggatcgctcgatcgggaggacgacgaggagggcgagaacggcgaggtggccgcagcctcgaagcagacatccgaaacattgaaccacggtgagcggatcgcggaggcgctggagcttggcatggcggacttgcatatcatgaaggagtgggaggaggccaaggcagccaatccgtacgtggggccaccgcagcgtgacccgatgttcatggcgcacggtaacatctctgctgaggaatacgtgatgaaggtgctttcgcggccggcggcatcggcgctgaacgatgcattgctcgtcttgccgtttgcgtcgattccgatgctcttcacattcctaaatctgtttaccgtccggtcgatgaacattccactgacctgccgcattctgttcttcatgctgaagacgcaccaccgtcagatcgtggccagccggtcgatgcgggtaatgttagatggggtccggaccaatctgcgacaggtgctcaagcgacaaaaggacgagatgggatacaacatagcggcgctcaaggtggcgggcatgcaaatctcggaaaacagcgtaaagagctacgtagacgagaactgggacgatggcagcgagccgaatgcgaggaagagggctttcgtacaggtgtcttag

SEQ ID NO: 9845 - protein, 566 aa, Muscodor strobelii
  misc_feature: SGI Peptide ID NO. 563096
  misc_feature (101)..(139): Pfam Id: PF00400 Pfam Desc: WD domain, G-beta repeat
  misc_feature (242)..(285): Pfam Id: PF00400 Pfam Desc: WD domain, G-beta repeat
  misc_feature (289)..(329): Pfam Id: PF00400 Pfam Desc: WD domain, G-beta repeat
  misc_feature (200)..(238): Pfam Id: PF00400 Pfam Desc: WD domain, G-beta repeat
  misc_feature (20)..(57): Pfam Id: PF00400 Pfam Desc: WD domain, G-beta repeat
  misc_feature (347)..(565): Pfam Id: PF04003 Pfam Desc: Dip2/Utp12 Family
  misc_feature (347)..(530): Pfam Id: PF04003 Pfam Desc: Dip2/Utp12 Family
  misc_feature (1)..(561): NCBI GI: 261356185 Blast Desc: DOM34-interacting protein [Verticillium albo-atrum VaMs.102]
  misc_feature (16)..(566): NCBI GI: 256732605 Blast Desc: [Nectria haematococca mpVI 77-13-4]
  misc_feature (9)..(566): NCBI GI: 171684537 Blast Desc: protein product [Podospora anserina] gi|170942229|emb|CAP67881.1| protein product [Podospora anserina]
  misc_feature (14)..(566): NCBI GI: 85110971 Blast Desc: NCU03051 [Neurospora crassa OR74A] gi|28925433|gb|EAA34479.1| NCU03051 [Neurospora crassa OR74A]
  misc_feature (13)..(566): NCBI GI: 46125355 Blast Desc: FG07055.1 [Gibberella zeae PH-1]
  misc_feature (17)..(566): NCBI GI: 39945528 Blast Desc: MGG_04746 [Magnaporthe grisea 70-15] gi|145021368|gb|EDK05497.1| MGG_04746 [Magnaporthe grisea 70-15]
  misc_feature (15)..(566): NCBI GI: 156061899 Blast Desc: SS1G_03095 [Sclerotinia sclerotiorum 1980] gi|154700496|gb|EDO00235.1| SS1G_03095 [Sclerotinia sclerotiorum 1980]
  misc_feature (7)..(566): NCBI GI: 70990338 Blast Desc: small nucleolar ribonucleoprotein complex subunit Dip2, [Aspergillus fumigatus Af293] gi|66847650|gb|EAL87980.1| small nucleolar ribonucleoprotein complex subunit Dip2, fumigatus
  misc_feature (15)..(566): NCBI GI: 154311744 Blast Desc: BC1G_06331 [Botryotinia fuckeliana B05.10] gi|150850842|gb|EDN26035.1| BC1G_06331 [Botryotinia fuckeliana B05.10]
  misc_feature (18)..(566): NCBI GI: 119497237 Blast Desc: WD domain protein [Neosartorya fischeri NRRL 181] gi|119413542|gb|EAW23483.1| WD domain protein [Neosartorya fischeri NRRL 181]
  misc_feature: Useful for introducing or modulating the production of volatile compounds
MPLKQKSSKSKEEEVPDYERALSVELPGHRADIRSLALSSDDRLLASASNGSLKIWSMLTQKCGKTLDCGYALCCAFLPGDKLVVIGTKSGEIELFEVSTGTLLDSVTAHEGAIWSLQVHPDGRSIVSGSADKSAKFWKVQVVQEQVLGTTRTTQRLKLSHARTLQVSDDILSLKFSPDAKYLAVALLDSTVKVFFTDSLKLYLNLYGHKLPVLDMDISYDGKLIVTCSADKTVRIWGLDFGDCHKAIIAHQDSILQVKFVPNNREGNGHHFFSASKDRTVKYWDGDKFEQIQRLHGHHGEIWALAISRSTEPPFIVSASHDKSIRIWHETDEQIFLEEEKEKEIEELYESTLTGSLDREDDEEGENGEVAAASKQTSETLNHGERIAEALELGMADLHIMKEWEEAKAANPYVGPPQRDPMFMAHGNISAEEYVMKVLSRPAASALNDALLVLPFASIPMLFTFLNLFTVRSMNIPLTCRILFFMLKTHHRQIVASRSMRVMLDGVRTNLRQVLKRQKDEMGYNIAALKVAGMQISENSVKSYVDENWDDGSEPNARKRAFVQVS

SEQ ID NO: 9846 - DNA, 10356 bp, Muscodor strobelii; identical to SEQ ID NO: 9843
  misc_feature: SGI EST ID NO. CUFF.23887.0
  misc_feature: Variant of the nucleotide sequence at SEQ ID NO 9844

SEQ ID NO: 9847 - DNA, 1056 bp, Muscodor strobelii
  misc_feature: SGI cDNA ID NO. 563097
  misc_feature: Encodes the peptide sequence at SEQ ID NO 9848
atggatatatcatacgacgggaaattgatcgtgacatgttcagcagacaagacagtgagaatatggggcctggactttggtgactgccataaggccattatagcacatcaggacagtattcttcaggtcaagtttgtgcccaacaatcgggagggcaacggtcatcacttcttcagcgccagtaaagaccgcacagtcaagtactgggacggagacaagtttgaacagatccaacgtcttcacgggcatcacggcgaaatctgggcgttggcgatcagccgtagcacagagccgccatttatagtcagcgctagtcacgacaagagcatacgtatctggcacgagacggacgagcagatatttttagaagaagaaaaagaaaaagagatcgaagagttgtacgaaagcacgttgacgggatcgctcgatcgggaggacgacgaggagggcgagaacggcgaggtggccgcagcctcgaagcagacatccgaaacattgaaccacggtgagcggatcgcggaggcgctggagcttggcatggcggacttgcatatcatgaaggagtgggaggaggccaaggcagccaatccgtacgtggggccaccgcagcgtgacccgatgttcatggcgcacggtaacatctctgctgaggaatacgtgatgaaggtgctttcgcggccggcggcatcggcgctgaacgatgcattgctcgtcttgccgtttgcgtcgattccgatgctcttcacattcctaaatctgtttaccgtccggtcgatgaacattccactgacctgccgcattctgttcttcatgctgaagacgcaccaccgtcagatcgtggccagccggtcgatgcgggtaatgttagatggggtccggaccaatctgcgacaggtgctcaagcgacaaaaggacgagatgggatacaacatagcggcgctcaaggtggcgggcatgcaaatctcggaaaacagcgtaaagagctacgtagacgagaactgggacgatggcagcgagccgaatgcgaggaagagggctttcgtacaggtgtcttag

SEQ ID NO: 9848 - protein, 351 aa, Muscodor strobelii
  misc_feature: SGI Peptide ID NO. 563097
  misc_feature (27)..(70): Pfam Id: PF00400 Pfam Desc: WD domain, G-beta repeat
  misc_feature (74)..(114): Pfam Id: PF00400 Pfam Desc: WD domain, G-beta repeat
  misc_feature (132)..(350): Pfam Id: PF04003 Pfam Desc: Dip2/Utp12 Family
  misc_feature (132)..(315): Pfam Id: PF04003 Pfam Desc: Dip2/Utp12 Family
  misc_feature (1)..(23): Pfam Id: PF00400 Pfam Desc: WD domain, G-beta repeat
  misc_feature (1)..(351): NCBI GI: 85110971 Blast Desc: NCU03051 [Neurospora crassa OR74A] gi|28925433|gb|EAA34479.1| NCU03051 [Neurospora crassa OR74A]
  misc_feature (1)..(351): NCBI GI: 171684537 Blast Desc: protein product [Podospora anserina] gi|170942229|emb|CAP67881.1| protein product [Podospora anserina]
  misc_feature (1)..(351): NCBI GI: 46125355 Blast Desc: FG07055.1 [Gibberella zeae PH-1]
  misc_feature (1)..(351): NCBI GI: 256732605 Blast Desc: [Nectria haematococca mpVI 77-13-4]
  misc_feature (1)..(346): NCBI GI: 261356185 Blast Desc: DOM34-interacting protein [Verticillium albo-atrum VaMs.102]
  misc_feature (1)..(351): NCBI GI: 39945528 Blast Desc: MGG_04746 [Magnaporthe grisea 70-15] gi|145021368|gb|EDK05497.1| MGG_04746 [Magnaporthe grisea 70-15]
  misc_feature (1)..(351): NCBI GI: 116192471 Blast Desc: CHGG_05953 [Chaetomium globosum CBS 148.51] gi|88181866|gb|EAQ89334.1| CHGG_05953 [Chaetomium globosum CBS 148.51]
  misc_feature (1)..(351): NCBI GI: 156061899 Blast Desc: SS1G_03095 [Sclerotinia sclerotiorum 1980] gi|154700496|gb|EDO00235.1| SS1G_03095 [Sclerotinia sclerotiorum 1980]
  misc_feature (1)..(351): NCBI GI: 119497237 Blast Desc: WD domain protein [Neosartorya fischeri NRRL 181] gi|119413542|gb|EAW23483.1| WD domain protein [Neosartorya fischeri NRRL 181]
  misc_feature (1)..(351): NCBI GI: 70990338 Blast Desc: small nucleolar ribonucleoprotein complex subunit Dip2, [Aspergillus fumigatus Af293] gi|66847650|gb|EAL87980.1| small nucleolar ribonucleoprotein complex subunit Dip2, fumigatus
MDISYDGKLIVTCSADKTVRIWGLDFGDCHKAIIAHQDSILQVKFVPNNREGNGHHFFSASKDRTVKYWDGDKFEQIQRLHGHHGEIWALAISRSTEPPFIVSASHDKSIRIWHETDEQIFLEEEKEKEIEELYESTLTGSLDREDDEEGENGEVAAASKQTSETLNHGERIAEALELGMADLHIMKEWEEAKAANPYVGPPQRDPMFMAHGNISAEEYVMKVLSRPAASALNDALLVLPFASIPMLFTFLNLFTVRSMNIPLTCRILFFMLKTHHRQIVASRSMRVMLDGVRTNLRQVLKRQKDEMGYNIAALKVAGMQISENSVKSYVDENWDDGSEPNARKRAFVQVS

SEQ ID NO: 9849 - DNA, 10356 bp, Muscodor strobelii; identical to SEQ ID NO: 9843
  misc_feature: SGI EST ID NO. CUFF.23887.0
  misc_feature: Variant of the nucleotide sequence at SEQ ID NO 9847

SEQ ID NO: 9850 - DNA, 1227 bp, Muscodor strobelii
  misc_feature: SGI cDNA ID NO. 563098
  misc_feature: Reduced expression when VOC is produced
  misc_feature: Encodes the peptide sequence at SEQ ID NO 9851
atggccggacaagtgaggcatcctatcgacctcaaggccctcgaggcctacatcaccaagaatgtgcccgagatccaagtcccattggacgtgaagcaattcggcttcggacagtccaacccaacataccaactaacctcgcccaatggccaacgctacgtcctccgcaagaaacccccaggaaagctcctctccaaatccgcccacaaagtcgagcgcgagcaccgcatcatcgccagtctggggcccaccgacgtgcccgtccccaaagcctactgcctctgcgaagacagctctataatcggcacgcccttctacatcatgtccttcctcgacggccgcatcatcgaagacccagccatgcccgacgttctgcccggtgagcgcacagccctctggcgcgccgccataacgaccctcgcccgtctccacgccgtcgacgccgacgcacagggcctcggcaacttcggcaagaaaacaggcttctacgatcgccaactcaaaacctgggaaaccatctgcgccgcgcagtccagcgcaaaggacgcagataccggtattcccgtaggcgagctgccgcacttcaagtccttcctctccttcttctccggatcctcaaagaccgactccgctctgcggcccaaagataggggaaccataatccacggcgactacaaaatcgacaacatagtcttccacaagacggagccccgcgtaatcggcatcctcgactgggagatgtcgacgataggacatcctttgtcggatctagccaatatcctcaacccctactacctagcgcccatgctcacaaaccccaaatacaaaccttcctcttcctcttcctcatccccatcttcttcttcctcaggcacgtcatctcacaaatcctcaacaatagcacacccaggcttcctgcccaacacaacacccggtctaccatctgttccccaaatcctgcagtggtacgtcgaagccctcaacggcgcatgggacccccgtcccgagatgaactgggcactctccttctccatcttccgacaagcctgcatcacgcagggcatcgcggcccgcgtcgcgactagacaggcgagttccgcctcggcgaaacaacacgcggacgcgcggcacaatctggccgagttcgcctgggagcttgtagacgctgagcggaagaaggtaaacgacgggaagggggagggggagggggaggttgctaagctatga

SEQ ID NO: 9851 - protein, 408 aa, Muscodor strobelii
  misc_feature: SGI Peptide ID NO. 563098
  misc_feature (30)..(323): Pfam Id: PF01636 Pfam Desc: Phosphotransferase enzyme family
  misc_feature (30)..(265): Pfam Id: PF01636 Pfam Desc: Phosphotransferase enzyme family
  misc_feature (1)..(391): NCBI GI: 171684759 Blast Desc: protein product [Podospora anserina] gi|170942340|emb|CAP67992.1| protein product [Podospora anserina]
  misc_feature (1)..(392): NCBI GI: 85112283 Blast Desc: NCU00513 [Neurospora crassa OR74A] gi|28926094|gb|EAA35081.1| NCU00513 [Neurospora crassa OR74A]
  misc_feature (1)..(387): NCBI GI: 189203893 Blast Desc: acyl-CoA dehydrogenase family member 11 [Pyrenophora tritici-repentis Pt-1C-BFP] gi|187985381|gb|EDU50869.1| acyl-CoA dehydrogenase family member 11 [Pyrenophora tritici-repentis
  misc_feature (1)..(391): NCBI GI: 154311768 Blast Desc: BC1G_06343 [Botryotinia fuckeliana B05.10] gi|150850854|gb|EDN26047.1| BC1G_06343 [Botryotinia fuckeliana B05.10]
  misc_feature (1)..(391): NCBI GI: 116192439 Blast Desc: CHGG_05937 [Chaetomium globosum CBS 148.51] gi|88181850|gb|EAQ89318.1| CHGG_05937 [Chaetomium globosum CBS 148.51]
  misc_feature (1)..(386): NCBI GI: 46105456 Blast Desc: FG00356.1 [Gibberella zeae PH-1]
  misc_feature (1)..(392): NCBI GI: 156061921 Blast Desc: SS1G_03106 [Sclerotinia sclerotiorum 1980] gi|154700507|gb|EDO00246.1| SS1G_03106 [Sclerotinia sclerotiorum 1980]
  misc_feature (1)..(408): NCBI GI: 256735325 Blast Desc: [Nectria haematococca mpVI 77-13-4]
  misc_feature (1)..(392): NCBI GI: 169602873 Blast Desc: SNOG_04439 [Phaeosphaeria nodorum SN15] gi|160706277|gb|EAT88199.2| SNOG_04439 [Phaeosphaeria nodorum SN15]
  misc_feature (1)..(388): NCBI GI: 115388385 Blast Desc: conserved [Aspergillus terreus NIH2624] gi|114195782|gb|EAU37482.1| conserved [Aspergillus terreus NIH2624]
  misc_feature: Useful for introducing or modulating the production of volatile compounds
MAGQVRHPIDLKALEAYITKNVPEIQVPLDVKQFGFGQSNPTYQLTSPNGQRYVLRKKPPGKLLSKSAHKVEREHRIIASLGPTDVPVPKAYCLCEDSSIIGTPFYIMSFLDGRIIEDPAMPDVLPGERTALWRAAITTLARLHAVDADAQGLGNFGKKTGFYDRQLKTWETICAAQSSAKDADTGIPVGELPHFKSFLSFFSGSSKTDSALRPKDRGTIIHGDYKIDNIVFHKTEPRVIGILDWEMSTIGHPLSDLANILNPYYLAPMLTNPKYKPSSSSSSSPSSSSSGTSSHKSSTIAHPGFLPNTTPGLPSVPQILQWYVEALNGAWDPRPEMNWALSFSIFRQACITQGIAARVATRQASSASAKQHADARHNLAEFAWELVDAERKKVNDGKGEGEGEVAKL

SEQ ID NO: 9852 - DNA, 10356 bp, Muscodor strobelii; identical to SEQ ID NO: 9843
  misc_feature: SGI EST ID NO. CUFF.23887.0
  misc_feature: Variant of the nucleotide sequence at SEQ ID NO 9850

SEQ ID NO: 9853 - DNA, 1824 bp, Muscodor strobelii
  misc_feature: SGI cDNA ID NO. 563099
  misc_feature: Encodes the peptide sequence at SEQ ID NO 9854
atgctgccaacacatgcatacggacaagatgactttatgatgagcatgttacctgctcttaccgagcccaaccagccacctcagaatttacccccctatgccatgttgggccagccagatggctttccattcatacaaggttcttaccggccgccgttccggcctctggtgcaaccaatgcagccgatgcaccgcccgtttgaccaattctcccgtcacggtgctcgagaagctgcaaacgtggacgtggacaatgcaaacagccagcagccgtccagctactctgctcaaaggactgaaggtgggctgaatactccgcactccgatctcgccgcacctgttgcaccggccataccgctaaggccctcgagagatgtaggccagatcagtcaggacacaccaatgatttatgggatccccgggcccgcacaacaacaacaacaacctcccaatttccgattacgtgacttattggatcagtcaggatcaacagccttgccacaaccacaggccgtagcaacgacgggggaaaataccacctcccgctcagattcgcaatcagtatcggtcacggtcacgaatccgccacagcgacccaacgaatacatataccgcgcgaacagtcttaatgagatgcgccagaggcccgtgatgcaaggcttccgacacaggcgtgccttgccgagggcaaatgaacatacagactggccaggggacaacgaggatcaaatgcggccccacctgagcctgctggagttcgtcgagggctatccgagaacagtccaagaaggagagagtgcggcaacgccagtctatccggcgagaccacacccagcgttcaggagcaccaggccagggaagagagttgcttccaagaaagccattgcgtccctccagaccgttgatctggcggatcttccggagagcgagaaaacgtgcgtgatctgttacaacgactttggcgtagcgaacccggagggtatcaatgaggctcctctgaggttgccaaaatgcagacatgtgtttggtgaccactgcatcaagaagtggttcgaagactctgacagctgcccttactgccgggacaaagtgcactccgagtttcagcaaagccgttcctgcaggactccctcggttttgaggctcatgcgccaatatcaggttcaatcacagcaaatggtggcgaggcaaagtcaaatgcagaacaatagtcacattcggagcccgtcaaatccagaagcgtcgatgccacaggcacaaccactcgccgatcttaccatggatccttacaatctctctttggactcagggtcacacagccggccgcagcctccctttttccagaggtacgaccggaacgcggatgtgcaaccaccacaggccaaccctgccgaacgtcgacctcctcccaccgacaatgacaacagcgatcgccccagaactcgaccccggcacagcagatcgggccgctataacgtagccgggagcccaactatgatgaacgcaccccacactccgtttcccagaacgaacaggtcaccacggagtcccaatcagagggatgcaacggcgtctcatcacgctcctcgccccttcggtgtttgggcacagactcctccgtttctgccacagatgatggcaaatactgatgaggttttccagcggattccgtcggccagcgacaacgcagcaacggcacccggtcagcccattatgctaccgtcactgcacccaggccctctcccacctcgagggcccgggagttttcatggagcgaaagcatggatcagctgtacaccggtcgctgagaagggaaagccatga

SEQ ID NO: 9854 - protein, 607 aa, Muscodor strobelii
  misc_feature: SGI Peptide ID NO. 563099
  misc_feature (287)..(367): NCBI GI: 171684757 Blast Desc: protein product [Podospora anserina] gi|170942339|emb|CAP67991.1| protein product [Podospora anserina]
  misc_feature (222)..(367): NCBI GI: 116192437 Blast Desc: CHGG_05936 [Chaetomium globosum CBS 148.51] gi|88181849|gb|EAQ89317.1| CHGG_05936 [Chaetomium globosum CBS 148.51]
  misc_feature (281)..(580): NCBI GI: 46108330 Blast Desc: FG01047.1 [Gibberella zeae PH-1]
  misc_feature (287)..(489): NCBI GI: 261355927 Blast Desc: conserved [Verticillium albo-atrum VaMs.102]
  misc_feature (287)..(485): NCBI GI: 256735155 Blast Desc: NECHADRAFT_98772 [Nectria haematococca mpVI 77-13-4]
  misc_feature (287)..(398): NCBI GI: 156049913 Blast Desc: SS1G_07542 [Sclerotinia sclerotiorum 1980] gi|154691944|gb|EDN91682.1| SS1G_07542 [Sclerotinia sclerotiorum 1980]
  misc_feature (286)..(399): NCBI GI: 154318088 Blast Desc: BC1G_03027 [Botryotinia fuckeliana B05.10] gi|150843685|gb|EDN18878.1| BC1G_03027 [Botryotinia fuckeliana B05.10]
  misc_feature (311)..(367): NCBI GI: 145614458 Blast Desc: MGG_11362 [Magnaporthe grisea 70-15] gi|145021382|gb|EDK05511.1| MGG_11362 [Magnaporthe grisea 70-15]
  misc_feature (285)..(370): NCBI GI: 213402117 Blast Desc: [Schizosaccharomyces japonicus yFS275] gi|211999878|gb|EEB05538.1| [Schizosaccharomyces japonicus yFS275]
  misc_feature (287)..(361): NCBI GI: 196009474 Blast Desc: TRIADDRAFT_64121 [Trichoplax adhaerens] gi|190582664|gb|EDV22736.1| TRIADDRAFT_64121 [Trichoplax adhaerens]
MLPTHAYGQDDFMMSMLPALTEPNQPPQNLPPYAMLGQPDGFPFIQGSYRPPFRPLVQPMQPMHRPFDQFSRHGAREAANVDVDNANSQQPSSYSAQRTEGGLNTPHSDLAAPVAPAIPLRPSRDVGQISQDTPMIYGIPGPAQQQQQPPNFRLRDLLDQSGSTALPQPQAVATTGENTTSRSDSQSVSVTVTNPPQRPNEYIYRANSLNEMRQRPVMQGFRHRRALPRANEHTDWPGDNEDQMRPHLSLLEFVEGYPRTVQEGESAATPVYPARPHPAFRSTRPGKRVASKKAIASLQTVDLADLPESEKTCVICYNDFGVANPEGINEAPLRLPKCRHVFGDHCIKKWFEDSDSCPYCRDKVHSEFQQSRSCRTPSVLRLMRQYQVQSQQMVARQSQMQNNSHIRSPSNPEASMPQAQPLADLTMDPYNLSLDSGSHSRPQPPFFQRYDRNADVQPPQANPAERRPPPTDNDNSDRPRTRPRHSRSGRYNVAGSPTMMNAPHTPFPRTNRSPRSPNQRDATASHHAPRPFGVWAQTPPFLPQMMANTDEVFQRIPSASDNAATAPGQPIMLPSLHPGPLPPRGPGSFHGAKAWISCTPVAEKGKP

SEQ ID NO: 9855 - DNA, 10049 bp, Muscodor strobelii
  misc_feature: SGI EST ID NO. CUFF.23888.2
  misc_feature: Variant of the nucleotide sequence at SEQ ID NO 9853
cttgcccctcaagatccttcctggcattccgatggatgttcacacagatgcatgggtcaggtttcggaagctcagttcacggacgttatgtgctgtttgttgtatacgtgcttgattatatatttgctctaagaagatagcgggtagagctcccggcataagctattgaatatcgtataccttatcgtttgacggacggataggcaaaggatattgatgtcgcttatcctaggggccgatcacctaggtggtacagtaaggtaattcagcacctgcggcgggatggcactatcagactccaactggagaccggctcccttgcgcctataagtgcgatgtaagtgcgatcataaatcgatcacacctgcacaccttgcaggattgttcaacttggtctcttcccgtttgcacatgtgtaccggccgatttcatggaggactgccttttcttttcgccagagagtgatctatgatgttctgatcagctgaatggatgtgatgaatgtccgctggtggaaacttgaccctgggagcgaagctagggctgtccagcagaggctggttagttatctagtaacatacgtgtatggcattattcgcaaacccgtggacgtctggccacacggagtatccaatagtcggattgaattaaccttggaaagaggaggagcggcggctcggaaggtagttacatgttaggaaactataataaggcatagaaatgcagtcacatcctcgtcacttcctgaagccagcccgacttgacttgcctgaattgtcgtcaagttagcagaacgcacttccctcgttgttcttgtccctgtcctcgtcttccgccttctctgcctccccctactcctcagcctagatgcgacgtggatccggagccacaatcggtacctacctaaagataccacatcccgtgtcctcatcggctgctcatgtgactaggttaggtgtaattcaatgttcgtctctgtttgcctcacccaacctcagtaatttctccaatcttgtcactctttgtcataccgcaacatattagaaataaaattctattcccagtgttcaagcatctttcgtcccgagcggatccagcacctattcactgttcacccgcccgccggcgccgtcgtgactattggaggtgtgattcagctagcatcagccagcaccgaccaagccgccctggaaagcagcagcaggccgagaagaacacaagccaaatcgagcgtgtgtgtggaaaagaggcccgagagctcaactcagctggttcattgtctatcgccgatgaatcataagagaggtccattgccggcaagcttggatcctcttctcgcctgtacttctctttcatgctttctttcttcgacggcaccgccaacaatcaccgccttgcagcatagcagggtcgaaccaatttccctggcatgctcgggcttgctgctgacctgatctgactagccccatccccttccaacatcccaccaacacacttagaccgggaatctatcgcgaccctgcgttttcagattccagtcgtgcagcccacaaggaccaacaagaaccaacaagcaggttgaaaacattgacgcctccaactcattcaacggagctcttttcttgcaccgttcgtttgggtttctcatttctcaccgtgcactgaaagcccgctccaccaaaggatctaggattggagcttgacggctgtaccctgtgcggttaccgacttacgggcaggtcatacttcacaagaaacgctggctatcatcccacaccctgacccctcactgtctgttccgatcttttgagcattactcatgccaacccgaggcagtcctgaagcctgctcgagttcaagaggagagtgacggcctctacaaaaaagggccgccactctcttgacaacagccgctgaaagaatggattcgtcaaccatggactataccatgcataccccccaccaccaccaccgccgtccccactatcaccaacatcaccaccacccaagtgatggctcgccctcttcggctatccggtgtcctgctttgcgcgcaaatgctgaagcacggaactatcactcccaggcagcttcaccgcctcgagacaatccgttctatgacccagtccatgcaaatgcgtctaacagaagccattggcaatcccgaagccctcagagatggcagccggccatgctgccaacacatgcatacggacaagatgactttatgatgagcatgttacctgctcttaccgagcccaaccagccacctcagaatttacccccctatgccatgttgggccagccagatggctttccattcatacaaggttcttaccggccgccgttccggcctctggtgcaaccaatgcagccgatgcaccgcccgtttgaccaattctcccgtcacggtgctcgagaagctgcaaacgtggacgtggacaatgcaaacagccagcagccgtccagctactctgctcaaaggactgaaggtgggctgaatactccgcactccgatctcgccgcacctgttgcaccggccataccgctaaggccctcgagagatgtaggccagatcagtcaggacacaccaatgatttatgggatccccgggcccgcacaacaacaacaacaacctcccaatttccgattacgtgacttattggatcagtcaggatcaacagccttgccacaaccacaggccgtagcaacgacgggggaaaataccacctcccgctcagattcgcaatcagtatcggtcacggtcacgaatccgccacagcgacccaacgaatacatataccgcgcgaacagtcttaatgagatgcgccagaggcccgtgatgcaaggcttccgacacaggcgtgccttgccgagggcaaatgaacatacagactggccaggggacaacgaggatcaaatgcggccccacctgagcctgctggagttcgtcgagggctatccgagaacagtccaagaaggagagagtgcggcaacgccagtctatccggcgagaccacacccagcgttcaggagcaccaggccagggaagagagttgcttccaagaaagccattgcgtccctccagaccgttgatctggcggatcttccggagagcgagaaaacgtgcgtgatctgttacaacgactttggcgtagcgaacccggagggtatcaatgaggctcctctgaggttgccaaaatgcagacatgtgtttggtgaccactgcatcaagaagtggttcgaagactctgacagctgcccttactgccgggacaaagtgcactccgagtttcagcaaagccgttcctgcaggactccctcggttttgaggctcatgcgccaatatcaggttcaatcacagcaaatggtggcgaggcaaagtcaaatgcagaacaatagtcacattcggagcccgtcaaatccagaagcgtcgatgccacaggcacaaccactcgccgatcttaccatggatccttacaatctctctttggactcagggtcacacagccggccgcagcctccctttttccagaggtacgaccggaacgcggatgtgcaaccaccacaggccaaccctgccgaacgtcgacctcctcccaccgacaatgacaacagcgatcgccccagaactcgaccccggcacagcagatcgggccgctataacgtagccgggagcccaactatgatgaacgcaccccacactccgtttcccagaacgaacaggtcaccacggagtcccaatcagagggatgcaacggcgtctcatcacgctcctcgccccttcggtgtttgggcacagactcctccgtttctgccacagatgatggcaaatactgatgaggttttccagcggattccgtcggccagcgacaacgcagcaacggcacccggtcagcccattatgctaccgtcactgcacccaggccctctcccacctcgagggcccgggtacgctccgtcggagcacacgtttcccaatcaattcacttcctttcaacaaatctaggagttttcatggagcgaaagcatggatcagctgtacaccggtcgctgagaagggaaagccatgaaaatgtcatgcatacgactcgacgacaccaaaaccaatactgatccaagaactcggaagttccttctaatattgcattcgggcgttcagcttctctctgcgtctcgccgtctaccggcaggggccttccgatatccattctatagacggcggggatctttctcattctgttcccctgtcaatgcgcagcattcggaaccaacaccatctagaaacaaggtgtttcaatcgggcgttttcgactcgttcttcataatttatttcaatggtacgggggcgatggtaggcgtcagtcctcgcatgggtacttgattaggccgtgacaacacgattcctcccagtctttcggggatggcggtacttttcccgtttctcactcgacgccggtctgggccagtcaggagttcaatcaggcggcggcggtggtttacttgctttattctactcatctacccagtttgcatcatcatgacagcgtggcattttcgcaaggggctatcacattgatttctgtgcaatcgtttcttttcttcgctcggaatctctctcggaatatccccccccccggcttgggaacagatcatcagtgattccccctcatatcgatagagtagtatggaacataatgagaaattcattctgcggtgtatgagtctctgtgtgtttcgttgtgagtcgttgagtttactgggctgatttagacattcgaagactgcttgagttgctaccaaaagatgttgcaaggaacatgtgatgtaccgctgtaagatcatttaaacaagtgatggggcaaaggttgaaatatgtcatgggtaatgttttctataattttcctttcgcgtaggctccaacaatctgtctcgtaccgacttgcctcgaagaatctcatctagcataatacagcatatctcaccgtacattaatcgttcccacatttcactctcaatcgtcacgcttcgccgcagtaggaaacatcaactcatcgcttaaattctcatctagattcttttcttctcttaacatatatacaaaccaccaaccaaccaaccagccaaccagccaaccagccaactcatagcttagcaacctccccctccccctcccccttcccgtcgtttaccttcttccgctcagcgtctacaagctcccaggcgaactcggccagattgtgccgcgcgtccgcgtgttgtttcgccgaggcggaactcgcctgtctagtcgcgacgcgggccgcgatgccctgcgtgatgcaggcttgtcggaagatggagaaggagagtgcccagttcatctcgggacgggggtcccatgcgccgttgagggcttcgacgtaccactgcaggatttggggaacagatggtagaccgggtgttgtgttgggcaggaagcctgggtgtgctattgttgaggatttgtgagatgacgtgcctgaggaagaagaagatggggatgaggaagaggaagaggaaggtttgtatttggggtttgtgagcatgggcgctaggtagtaggggttgaggatattggctagatccgacaaaggatgtcctatcgtcgacatctcccagtcgaggatgccgattacgcggggctccgtcttgtggaagactatgttgtcgattttgtagtcgccgtggattatggttcccctatctttgggccgcagagcggagtcggtctttgaggatccggagaagaaggagaggaaggacttgaagtgcggcagctcgcctacgggaataccggtatctgcgtcctttgcgctggactgcgcggcgcagatggtttcccaggttttgagttggcgatcgtagaagcctgttttcttgccgaagttgccgaggccctgtgcgtcggcgtcgacggcgtggagacgggcgagggtcgttatggcggcgcgccagagggctgtgcgctcaccgggcagaacgtcgggcatggctgggtcttcgatgatgcggccgtcgaggaaggacatgatgtagaagggcgtgccgattatagagctgtcttcgcagaggcagtaggctttggggacgggcacgtcggtgggccccagactggcgatgatgcggtgctcgcgctcgactttgtgggcggatttggagaggagctttcctgggggtttcttgcggaggacgtagcgttggccattgggcgaggttagttggtatgttgggttggactgtccgaagccgaactggagatgtcattgttagcaatgtgtttaatgtggtaggttaagcgtggagagaggtgacgaacttgcttcacgtccaatgggacttggatctcgggcacattcttggtgatgtaggcctcgagggccttgaggtcgataggatgcctcacttgtccggccatggtggtggctgtggcgcactgcgtgatataccccggtgttgtttatgcgacggtaatatgaagcaatatgaagcaaatcgtcaatcgaatagagagatacgtgagagcaagacgtcagaaagccaaattgaggacgaaatttttcaacaattatcgcatcgctatgaagactagatcagacattgaccaagaaaatgagccattggtgccggtgtgtgcaggtccaaggccgagccaaggatgtcgctagatcctgttagcagaaaagttgaggccctcattgggactggcatcggtggttgtggatgggatgccgaggtagagctaccaaccaggcaggcggtagacgatagccggctacaccgaaccaaacatccatggatgctagagctggactagaccatggcgggggaggggcactgatgagagccgatggtcccctgccaagactccgatgccctcgctgtttggagaatctggggtaaaacactgagaagttggtatcagtcagatgggctcggaattggagacgcttaagatcacaccgtttatcgtaagaaggacacattttttgttaattgcgtcgtttgaaatcccaattcagttggcacatatggtacagatacgtcgtagggtgtcttggaagggtacccggtctccttttgcggaaccagacgctttctatcgtaacatcacccggagaaaaggggttggagttgaactgcgccgcccatattttggacggtaggtcgactaagacacctgtacgaaagccctcttcctcgcattcggctcgctgccatcgtcccagttctcgtctacgtagctctttacgctgttttccgagatttgcatgcccgccaccttgagcgccgctatgttgtatcccatctcgtccttttgtcgcttgagcacctgtcgcagattggtccggaccccatctaacattacccgcatcgaccggctggccacgatctgacggtggtgcgtcttcagcatgaagaacagaatgcggcaggtcagtggaatgttcatcgaccggacggtaaacagatttaggaatgtgaagagcatcggaatcgacgcaaacggcaagacgagcaatgcatcgttcagcgccgatgccgccggccgcgaaagcaccttcatcacgtattcctcagcagagatgttaccgtgcgccatgaacatcgggtcacgctgcggtggccccacgtacggattggctgccttggcctcctcccactccttcatgatatgcaagtccgccatgccaagctccagcgcctccgcgatccgctcaccgtggttcaatgtttcggatgtctgcttcgaggctgcggccacctcgccgttctcgccctcctcgtcgtcctcccgatcgagcgatcccgtcaacgtgctttcgtacaactcttcgatctctttttctttttcttcttctaaaaatatctgctcgtccgtctcgtgccagatacgtatgctcttgtcgtgactagcgctgactataaatggcggctctgtgctacggctgatcgccaacgcccagatttcgccgtgatgcccgtgaagacgttggatctgttcaaacttgtctccgtcccagtacttgactgtgcggtctttactggcgctgaagaagtgatgaccgttgccctcccgattgttgggcacaaacttgacctgaagaatactgtcctgatgtgctataatggccttatggcagtcaccaaagtccaggccccatattctcactgtcttgtctgctgaacatgtcacgatcaatttcccgtcgtatgatatatccatgtctaagacagggagcttgtgaccgtagagattgaggtatagcttcagagagtccgtgaagaataccttgaccgtactgtccaatagggccacggccaagtatttggcgtcgggggagaattttaagctgagaatatcgtccgaaacttgcaaagtcctagcgtgggacaacttgaggcgttgggtcgtccgcgttgtgcccaatacctgctcctgaacaacctggactttccagaatttggctgatttgtcggcgcttcccgagacgatagaccggccgtcgggatggacttgcaaagaccaaatcgccccttcgtgtgctgtcacgctgtcaagtagtgtccccgttgacacctcgaagagctcgatctcgccgcttttcgtgcctatgaccacaagcttatctcccggtaagaatgcgcagcacagggcgtatccacagtcgagtgtcttgccacatttctgggtaagcatagaccagatcttcagggatccgtttgatgcggaggctagcaacctatcatctgagctgagcgctagggaccgaatatctgctcgatggcctggaagctcaacggatagtgccctttcgtagtctggtacctcttcttctttcgacttagaactcttctgctttaatggcatattgaatagttccaactggttattcgatgtagaaacaagtaactgtaatctcttcttgcccgaggtatctgcccagtcgactgaccgtactttgccacccgttcgaatgatgagatgctgtgcgaataagtctgtcacgtcggcggcgcccacattttcgtcttcgtcggcgtcatcgtcttcgacaggctcgtcatcgtccgccttacttcctttctttgccttctttttcttttcttctcgccttctcttcctttttctggccatactctttttcacttcggaatctaaccgaatcctccatatatcgacggccttctctgacccgtgtacggcaaagtaatcccggcgagggtgaaagatgacctcggtggctttgtccttgccttgcctaaatagtgttcctcggtcgtgtaagtattgcatattcgtagggacatcgacttggttcctagaggaggcgagggatttggcatctaaagtccagactttgagctcgccagagtttcccgccgtaacacatatgctgtagtctgtagccaaccccaatgcccagcactcgccgtttgtctgggcaatatgtgtttctatacagtgtttcgaccctaggtcccagagtttgatcagtgagtccttgctggtggttagcaggaaaccgtcggacgtgttctcgttgtccagcaccatggattgggagccatcttcttctgagatctcctgttggggctccacgaactgcagcccagtgatctggtctttgtggccacgcagtttgaacatgccaacttctgcgactaggtcccaaacaatgatatcggtgtctcgagagccactggctaggcgcacaccagatctgtcgaaggcgaggttcgtgatggcggagcggtggccgttgaagctcacgatgacggttccgtacttgtcccacagccgaatgctcccgtcctcgtatccgacggcgaagacatccttgtcgaccttgctctgggcgatggcagtgacctgggctgcacaggcactgtccttccacctgttcaagacgtcgccagtctttatatcccagctgatcacctcctcgttggcggcgacgatggcctgaccggcgctggtggcggagccatccttggaggaccacaggatgttagaggtgggagacgtg

SEQ ID NO: 9856 - DNA, 2667 bp, Muscodor strobelii
  misc_feature: SGI cDNA ID NO. 563100
  misc_feature: Encodes the peptide sequence at SEQ ID NO 9857
atggcggcagtggaatcgaggtggaaggcgcggaagcgacgcattgttctatccgtcttcccaacggagagtttctcgcagcccacgccgtcctccaccccctcggttcgcttcgcagaccagggtcagccttttggaggtcctctcgcacagcaacagactcttaagcttcggacacctcgaaaggggatgctgcctgctgctggcccgtcgcacatgcatctaacagcttcacctgagaatcctcacgccgataatcagactcgcttcgaccgagcttggcatactgtaacagccaggattgtgttgcccccttctgtctcggcagaagactcattcgggtcccttccgggctcgcaggacgtagacgacggtgcgtttgaccaggcgcttcttgacgtcctgcatccttccgcgcgtctacccctggctagtcataccgaggatatcattgcctggcacacgcagcaagtgcgccatcattttgtaaaccatgtcttgccactgctagccatatgtgatggtcattcggacccagcacaagtcgtgctaggtagtatgcggacgctagaagctgcacatcggcaatatctctatggcttgtccttgatcacgcgggttatggatcaaaagcatgcaagcctggcgcttagaaagttttgccgagacttgcatgcaatcgttggtaactccatatccactgcccttatgaaagctctgtcaagcgtcctgaatgacctcatgaaggagatctttggaatccgcgggtctcaacacacaagactcagggggaagagagccgaggacaactcaatcgaaatcgaacgttcgagacaagagcttctacacttagtggaatctcttttcaaggttggtcttgctggcgagcgattccagatcttatttgccgaacttttggatggaatgatggtgacatatgtccgcgagtcttttaccggggtctggcaatctaatcgacatgcagctctacagagcctgacccatcttgactatcagcaaggttcacagccgccgtgtgtaacccagttgctagattgggttgagaatcattattctcgtctcgctgctgaagtccttaacaaactcggcggagttcaagttgcatggacggatgtagttaagtggaaggagactgcaattgggcggctcgcagcacttcgtattagcgaaatgtttgagatagtcttggattggcctgacagcagaggtggcatcgatgatcttcgctttgcggtcacaacaccccagaggcgaatgcagctcactgacgccttctcagctgctttacaaagccgactgcttcacccagggcgctctactctcgaaatactgcgcacatatatcgccatgatccggaccttccacacattagatcattcgcgggtcctgcttgatcgtgtagcttactcgctacagctctatctttgcacacgcgaagacacggtccgcattattgtctctggcttattggccagtcccgaagaagtgaaggctaacaagggtgagacaaaattgatcgaacttgtaaatctactctatgaccccacacaataccgttcggagcgtcaagacgatgaatgggacgatatgacgtgggtcccaccacctgtggatgcaggctccaattataaacgccgtaaatcagaagatgttattgggactttaatcagtgctttgggatcacccgaagttttcatcaaagagttccaaagtataattggcgaacgccttctgtctgaaaaaccgggcttcgaccaagagatcgaggtccttggcctccttaaaaagcggtttggtgagtcatcgttgcagtcctgtgacgtgatgattaaagacattcaagactctcgaaggcttgacggcgttattgctcgaagtgctcttagtcttccccagggattgacacagtcttgggacattcatgcaaaaattctctcgcgcctctactggccggaagtaggcgaagacagttttcagctgccttctgcagtcgccaaaatgcaagagacgtacgcatccatcttcgaacatctcaaaccctctcgtaagcttaagtggctcaaccatcttggacaagcaactgtggagcttgagtttgcagatcgcactatcgtggaaaaagttcgcacttacgaagcagctgtcatcaacgcgttcagtgaagaaaacaagtctagctggatgtttgaagaattatggatggaactacagatggacgaggatctgctgttagccgcgcttgaattttggcagaaaaagcgtgttgttcgtaaacagatcgatgacagttatgtagtcgtcgagcggatatcagatgcgatgaatctgccatcagcacaaccaactctagatacgccgccaacaacaatggcagccactaccgctaggagtaccccccgcaaggctagacctggcatgagcgaaaaagaaaaagagaggcgcacagtttactggcaattcatagtgggaatgttgacaaaccaaggtccagtcatgcccctggccaatatctcaatgatgatgaagatgctcataccagatggctttccatggagtaacgaggaattgcaggaatttttgggcgagaagctcgccgaaggcgagctagagcttgtcgggggcaaatataagcttgtcaaaaaatag

SEQ ID NO: 9857 - protein, 888 aa, Muscodor strobelii
  misc_feature: SGI Peptide ID NO. 563100
  misc_feature (827)..(885): Pfam Id: PF08672 Pfam Desc: Anaphase promoting complex (APC) subunit 2
  misc_feature (448)..(795): Pfam Id: PF00888 Pfam Desc: Cullin family
  misc_feature (551)..(773): Pfam Id: PF00888 Pfam Desc: Cullin family
  misc_feature (1)..(888): NCBI GI: 46108328 Blast Desc: FG01046.1 [Gibberella zeae PH-1]
  misc_feature (1)..(888): NCBI GI: 256735156 Blast Desc: NECHADRAFT_103124 [Nectria haematococca mpVI 77-13-4]
  misc_feature (2)..(888): NCBI GI: 145614454 Blast Desc: MGG_04724 [Magnaporthe grisea 70-15] gi|145021380|gb|EDK05509.1| MGG_04724 [Magnaporthe grisea 70-15]
  misc_feature (8)..(887): NCBI GI: 154318092 Blast Desc: BC1G_03029 [Botryotinia fuckeliana B05.10] gi|150843687|gb|EDN18880.1| BC1G_03029 [Botryotinia fuckeliana B05.10]
  misc_feature (10)..(887): NCBI GI: 156049919 Blast Desc: SS1G_07545 [Sclerotinia sclerotiorum 1980] gi|154691947|gb|EDN91685.1| SS1G_07545 [Sclerotinia sclerotiorum 1980]
  misc_feature (13)..(886): NCBI GI: 238842246 Blast Desc: anaphase-promoting complex subunit 2 [Microsporum canis CBS 113480]
  misc_feature (10)..(887): NCBI GI: 159129058 Blast Desc: anaphase-promoting complex subunit ApcB, [Aspergillus fumigatus A1163]
  misc_feature (10)..(887): NCBI GI: 70989603 Blast Desc: anaphase-promoting complex subunit ApcB [Aspergillus fumigatus Af293] gi|66847282|gb|EAL87613.1| anaphase-promoting complex subunit ApcB, [Aspergillus fumigatus Af293]
  misc_feature (12)..(887): NCBI GI: 212528980 Blast Desc: anaphase-promoting complex subunit ApcB, [Penicillium marneffei ATCC 18224] gi|210074045|gb|EEA28132.1| anaphase-promoting complex subunit ApcB, [Penicillium marneffei
  misc_feature (1)..(887): NCBI GI: 242764861 Blast Desc: anaphase-promoting complex subunit ApcB, [Talaromyces stipitatus ATCC 10500] gi|218724053|gb|EED23470.1| anaphase-promoting complex subunit ApcB, [Talaromyces stipitatus
MAAVESRWKARKRRIVLSVFPTESFSQPTPSSTPSVRFADQGQPFGGPLAQQQTLKLRTPRKGMLPAAGPSHMHLTASPENPHADNQTRFDRAWHTVTARIVLPPSVSAEDSFGSLPGSQDVDDGAFDQALLDVLHPSARLPLASHTEDIIAWHTQQVRHHFVNHVLPLLAICDGHSDPAQVVLGSMRTLEAAHRQYLYGLSLITRVMDQKHASLALRKFCRDLHAIVGNSISTALMKALSSVLNDLMKEIFGIRGSQHTRLRGKRAEDNSIEIERSRQELLHLVESLFKVGLAGERFQILFAELLDGMMVTYVRESFTGVWQSNRHAALQSLTHLDYQQGSQPPCVTQLLDWVENHYSRLAAEVLNKLGGVQVAWTDVVKWKETAIGRLAALRISEMFEIVLDWPDSRGGIDDLRFAVTTPQRRMQLTDAFSAALQSRLLHPGRSTLEILRTYIAMIRTFHTLDHSRVLLDRVAYSLQLYLCTREDTVRIIVSGLLASPEEVKANKGETKLIELVNLLYDPTQYRSERQDDEWDDMTWVPPPVDAGSNYKRRKSEDVIGTLISALGSPEVFIKEFQSIIGERLLSEKPGFDQEIEVLGLLKKRFGESSLQSCDVMIKDIQDSRRLDGVIARSALSLPQGLTQSWDIHAKILSRLYWPEVGEDSFQLPSAVAKMQETYASIFEHLKPSRKLKWLNHLGQATVELEFADRTIVEKVRTYEAAVINAFSEENKSSWMFEELWMELQMDEDLLLAALEFWQKKRVVRKQIDDSYVVVERISDAMNLPSAQPTLDTPPTTMAATTARSTPRKARPGMSEKEKERRTVYWQFIVGMLTNQGPVMPLANISMMMKMLIPDGFPWSNEELQEFLGEKLAEGELELVGGKYKLVKK

SEQ ID NO: 9858 - DNA, 3421 bp, Muscodor strobelii
  misc_feature: SGI EST ID NO. CUFF.23216.0
  misc_feature: Variant of the nucleotide sequence at SEQ ID NO 9856
cgacattgaccgtgttgccaaacaccaaactgcccaataggcctcggtgcccatacaccaaggaactttcgcggctcagctgaccgcacgttcgctttcacttacgaccgccgagcctgtctagctgcgcgacgtcgataccgtggcactgggaaggcacgctgtctactgctaatgcagacctgacagacggctcaagatggtcgatgaccgccgctagctgcagacaccactgcacttgggcaaaccattgcagcagacgacgctgtcagaccagggctgcaaaacacatctaatacagtatccccgcagaagaagtgatacacgcaatggcggcagtggaatcgaggtggaaggcgcggaagcgacgcattgttctatccgtcttcccaacggagagtttctcgcagcccacgccgtcctccaccccctcggttcgcttcgcagaccagggtcagccttttggaggtcctctcgcacagcaacagactcttaagcttcggacacctcgaaaggggatgctgcctgctgctggcccgtcgcacatgcatctaacagcttcacctgagaatcctcacgccgataatcagactcgcttcgaccgagcttggcatactgtaacagccaggattgtgttgcccccttctgtctcggcagaagactcattcgggtcccttccgggctcgcaggacgtagacgacggtgcgtttgaccaggcgcttcttgacgtcctgcatccttccgcgcgtctacccctggctagtcataccgaggatatcattgcctggcacacgcagcaagtgcgccatcattttgtaaaccatgtcttgccactgctagccatatgtgatggtcattcggacccagcacaagtcgtgctaggtagtatgcggacgctagaagctgcacatcggcaatatctctatggcttgtccttgatcacgcgggttatggatcaaaagcatgcaagcctggcgcttagaaagttttgccgagacttgcatgcaatcgttggtaactccatatccactgcccttatgaaagctctgtcaagcgtcctgaatgacctcatgaaggagatctttggaatccgcgggtctcaacacacaagactcagggggaagagagccgaggacaactcaatcgaaatcgaacgttcgagacaagagcttctacacttagtggaatctcttttcaaggttggtcttgctggcgagcgattccagatcttatttgccgaacttttggatggaatgatggtgacatatgtccgcgagtcttttaccggggtctggcaatctaatcgacatgcagctctacagagcctgacccatcttgactatcagcaaggttcacagccgccgtgtgtaacccagttgctagattgggttgagaatcattattctcgtctcgctgctgaagtccttaacaaactcggcggagttcaagttgcatggacggatgtagttaagtggaaggagactgcaattgggcggctcgcagcacttcgtattagcgaaatgtttgagatagtcttggattggcctgacagcagaggtggcatcgatgatcttcgctttgcggtcacaacaccccagaggcgaatgcagctcactgacgccttctcagctgctttacaaagccgactgcttcacccagggcgctctactctcgaaatactgcgcacatatatcgccatgatccggaccttccacacattagatcattcgcgggtcctgcttgatcgtgtagcttactcgctacagctctatctttgcacacgcgaagacacggtccgcattattgtctctggcttattggccagtcccgaagaagtgaaggctaacaagggtgagacaaaattgatcgaacttgtaaatctactctatgaccccacacaataccgttcggagcgtcaagacgatgaatgggacgatatgacgtgggtcccaccacctgtggatgcaggctccaattataaacgccgtaaatcagaagatgttattgggactttaatcagtgctttgggatcacccgaagttttcatcaaagagttccaaagtataattggcgaacgccttctgtctgaaaaaccgggcttcgaccaagagatcgaggtccttggcctccttaaaaagcggtttggtgagtcatcgttgcagtcctgtgacgtgatgattaaagacattcaagactctcgaaggcttgacggcgttattgctcgaagtgctcttagtcttccccagggattgacacagtcttgggacattcatgcaaaaattctctcgcgcctctactggccggaagtaggcgaagacagttttcagctgccttctgcagtcgccaaaatgcaagagacgtacgcatccatcttcgaacatctcaaaccctctcgtaagcttaagtggctcaaccatcttggacaagcaactgtggagcttgagtttgcagatcgcactatcgtggaaaaagttcgcacttacgaagcagctgtcatcaacgcgttcagtgaagaaaacaagtctagctggatgtttgaagaattatggatggaactacagatggacgaggatctgctgttagccgcgcttgaattttggcagaaaaagcgtgttgttcgtaaacagatcgatgacagttatgtagtcgtcgagcggatatcagatgcgatgaatctgccatcagcacaaccaactctagatacgccgccaacaacaatggcagccactaccgctaggagtaccccccgcaaggctagacctggcatgagcgaaaaagaaaaagagaggcgcacagtttactggcaattcatagtgggaatgttgacaaaccaaggtccagtcatgcccctggccaatatctcaatgatgatgaagatgctcataccagatggctttccatggagtaacgaggaattgcaggaatttttgggcgagaagctcgccgaaggcgagctagagcttgtcgggggcaaatataagcttgtcaaaaaatagcatcactaatttcacctgttgggggccatcaacggtatcgacattagccgcgttctgcacctcgttcgcactttcatgatgcttatgtcagctctagcttgttccatcggaagctgaacatatatttagacttgcagctattaaatgcacaacccgttggcaacctatacaagtgcatgtcttatgtcgtttcttgtgtagcatgataggtgtcttgtcgtacttttgctgctacatcacgtgccatccaatttgatgaagtacgagagagatcatagtataacaccacccctaaggggcgttcgtcgtccattgtcgcgatttggccgccctcgcttaatgcttactgagtttttttaatctgtagtggccttgctagatcattgactaagctgtgttcctcgagtctggtgaatatcagtact

SEQ ID NO: 9859 - DNA, 969 bp, Muscodor strobelii
  misc_feature: SGI cDNA ID NO. 563101
  misc_feature: Encodes the peptide sequence at SEQ ID NO 9860
atgaggttagtaagactcgacgactcgacgaaggattaccggactaatttaggcgacagtgctgtggcggtctcttatgatccccggatggagatgggtattcctcgctcctcctacacctggcctggtcttcctggtcttgagtcaagtcccgagctattgcctcatgaactatcaagtgttgcccatcactccgatattagcagcctcacaccacccccaagtggctcgagatcgttaacatccagccctccccggtctattttgacgccagagcaacgcgagttgaaacgccaagttgatcaagcgcggcgggattcaaaagccactgcgagagtgcgtcgcgggatgagcagcacttcatactcatcagcaggacaatctccacctatgactatgcacgacttctcttctgcgtcaccactccccatctatacaaccgctccatctcaaatatctcttctcgccgagccagtgacaacagttggaccttcatacatgcctgcctattcgacatcacccttgccggaccatagcagctcccacgttttcacacctcactactcacctttaccatcaaacgattacatggggatgaattactcgcctgccttccctcctccaccagctcagagcctttcgtcgcagtatagtagtcgggcctcttcgatgtctgagtctgggatgatgtatcctgtccagccacccgtcctaccatcagggaatcctcagggaccagacggaggccacgttcgagttgttcagagtcggcctaagcctcaatgttgggaacatggttgcaacggaaggcaattttcgacgtttagcaatcttctacgacaccaacgcgagaagtcgggccaagcggcgaaagctacgtgtcctaactgcggcgctgagttcacgagaacaacagctcgcaatggtcacctattacacgacaagtgcaaacaaagacgtaactcatag

SEQ ID NO: 9860 - protein, 322 aa, Muscodor strobelii
  misc_feature: SGI Peptide ID NO. 563101
  misc_feature (20)..(319): NCBI GI: 171684801 Blast Desc: protein product [Podospora anserina] gi|170942361|emb|CAP68013.1| protein product [Podospora anserina]
  misc_feature (20)..(322): NCBI GI: 39945494 Blast Desc: MGG_04729 [Magnaporthe grisea 70-15] gi|145021377|gb|EDK05506.1| MGG_04729 [Magnaporthe grisea 70-15]
  misc_feature (47)..(322): NCBI GI: 116192433 Blast Desc: CHGG_05934 [Chaetomium globosum CBS 148.51] gi|88181847|gb|EAQ89315.1| CHGG_05934 [Chaetomium globosum CBS 148.51]
  misc_feature (26)..(322): NCBI GI: 154323936 Blast Desc: BC1G_00367 [Botryotinia fuckeliana B05.10] gi|150842596|gb|EDN17789.1| BC1G_00367 [Botryotinia fuckeliana B05.10]
  misc_feature (214)..(322): NCBI GI: 46108326 Blast Desc: FG01045.1 [Gibberella zeae PH-1]
  misc_feature (252)..(320): NCBI GI: 169624973 Blast Desc: SNOG_15754 [Phaeosphaeria nodorum SN15] gi|111055729|gb|EAT76849.1| SNOG_15754 [Phaeosphaeria nodorum SN15]
  misc_feature (223)..(320): NCBI GI: 119193328 Blast Desc: CIMG_01041 [Coccidioides immitis RS]
  misc_feature (221)..(320): NCBI GI: 240105756 Blast Desc: CPC735_053190 [Coccidioides posadasii C735 delta SOWgp]
  misc_feature (250)..(320): NCBI GI: 261195144 Blast Desc: conserved [Ajellomyces dermatitidis SLH14081] gi|239587848|gb|EEQ70491.1| conserved [Ajellomyces dermatitidis SLH14081]
  misc_feature (250)..(320): NCBI GI: 239610665 Blast Desc: conserved [Ajellomyces dermatitidis ER-3]
MRLVRLDDSTKDYRTNLGDSAVAVSYDPRMEMGIPRSSYTWPGLPGLESSPELLPHELSSVAHHSDISSLTPPPSGSRSLTSSPPRSILTPEQRELKRQVDQARRDSKATARVRRGMSSTSYSSAGQSPPMTMHDFSSASPLPIYTTAPSQISLLAEPVTTVGPSYMPAYSTSPLPDHSSSHVFTPHYSPLPSNDYMGMNYSPAFPPPPAQSLSSQYSSRASSMSESGMMYPVQPPVLPSGNPQGPDGGHVRVVQSRPKPQCWEHGCNGRQFSTFSNLLRHQREKSGQAAKATCPNCGAEFTRTTARNGHLLHDKCKQRRNS

SEQ ID NO: 9861 - DNA, 2081 bp, Muscodor strobelii
  misc_feature: SGI EST ID NO. CUFF.23251.2
  misc_feature: Variant of the nucleotide sequence at SEQ ID NO 9859
gatggcacaggcggcgttctcactagaaccccatgcacatcacatacgaaagctcgcaaggtcgctcagtctcgctccacatgtgtaccgccccaaggctctacttcgacttataagtcttcaacttcccccagtccttgtctggctgttcgcatgctttgaacgttgaggctgagactgaaatctgaacttaaataccttgtctgctaccaaacttagcagtgaaacaagctcttctagatatcattgatcgggcacattatcagacgacgactcagccttgagactcgagacctggttgtgcttacgtttttacatatatcatcatcgtagacaaccctcgctcctgcagagcaaaaactggcgagtttgataaacacccatcagcctgcagcatcattagacgttgccgacttgaaatcaacaaacacaatagacagatcgttcatagaatatcgggaatcgttgaacaggccgagccccgaacactacctggacccagcaccacgaagtgttattgcccaacgtgaaattggttcatcttgtcagacattggcaggtaatccaccgactgctagttcggtgttggagagaaaccggacaacattggatgctcgctcggatagggatcggatacagactcaaaacactctaccgccccgacgagaatcacgtaacgaacctcatcgatttactcctaccagttttgcaaaaaccagcccaaatatgagtgctgtggcggtctcttatgatccccggatggagatgggtattcctcgctcctcctacacctggcctggtcttcctggtcttgagtcaagtcccgagctattgcctcatgaactatcaagtgttgcccatcactccgatattagcagcctcacaccacccccaagtggctcgagatcgttaacatccagccctccccggtctattttgacgccagagcaacgcgagttgaaacgccaagttgatcaagcgcggcgggattcaaaagccactgcgagagtgcgtcgcgggatgagcagcacttcatactcatcagcaggacaatctccacctatgactatgcacgacttctcttctgcgtcaccactccccatctatacaaccgctccatctcaaatatctcttctcgccgagccagtgacaacagttggaccttcatacatgcctgcctattcgacatcacccttgccggaccatagcagctcccacgttttcacacctcactactcacctttaccatcaaacgattacatggggatgaattactcgcctgccttccctcctccaccagctcagagcctttcgtcgcagtatagtagtcgggcctcttcgatgtctgagtctgggatgatgtatcctgtccagccacccgtcctaccatcagggaatcctcagggaccagacggaggccacgttcgagttgttcagagtcggcctaagcctcaatgttgggaacatggttgcaacggaaggcaattttcgacgtttagcaatcttctacgacaccaacgcgagaagtcgggccaagcggcgaaagctacgtgtcctaactgcggcgctgagttcacgagaacaacagctcgcaatggtcacctattacacgacaagtgcaaacaaagacgtaactcataggctctcattgccatgtgctcataacattatttcgattctcacggtctcatttgggttcatgacaatgttttacgaagacttgtttcaacgatacgaaattgtcatttggcgtaacggaagggatttgggtcttgggggctccggatggaaaattagcctccgattgggacaacgggcggaagagaaatcgtctgttgtctatttcacttcgatttgctcgacaacaatatgtgttgcgacgagcgaaatgcaaggaagatgctgtcgactttgcagcaagcgatatactatatacccctttttgtattcttgtcgagtcatctcgaatgtgtataggttgtacatacagaggcattaaaagaagttctacctgtcgctataatacccattttcctgctagccggtcgagcatcgctactgtcttgctatcattgctgaat

SEQ ID NO: 9862 - DNA, 966 bp, Muscodor strobelii
  misc_feature: SGI cDNA ID NO. 563102
  misc_feature: Encodes the peptide sequence at SEQ ID NO 9863
atgaggttagtaagactcgacgactcgacgaaggattaccggactaatttaggcgacagtgctgtggcggtctcttatgatccccggatggagatgggtattcctcgctcctcctacacctggcctggtcttcctggtcttgagtcaagtcccgagctattgcctcatgaactatcaagtgttgcccatcactccgatattagcagcctcacaccacccccaagtggctcgagatcgttaacatccagccctccccggtctattttgacgccagagcaacgcgagttgaaacgccaagttgatcaagcgcggcgggattcaaaagccactgcgagagtgcgtcgcgggatgagcagcacttcatactcatcagcaggacaatctccacctatgactatgcacgacttctcttctgcgtcaccactccccatctatacaaccgctccatctcaaatatctcttctcgccgagccagtgacaacagttggaccttcatacatgcctgcctattcgacatcacccttgccggaccatagcagctcccacgttttcacacctcactactcacctttaccatcaaacgattacatggggatgaattactcgcctgccttccctcctccaccagctcagagcctttcgtcgcagtatagtcgggcctcttcgatgtctgagtctgggatgatgtatcctgtccagccacccgtcctaccatcagggaatcctcagggaccagacggaggccacgttcgagttgttcagagtcggcctaagcctcaatgttgggaacatggttgcaacggaaggcaattttcgacgtttagcaatcttctacgacaccaacgcgagaagtcgggccaagcggcgaaagctacgtgtcctaactgcggcgctgagttcacgagaacaacagctcgcaatggtcacctattacacgacaagtgcaaacaaagacgtaactcatag

SEQ ID NO: 9863 - protein, 321 aa, Muscodor strobelii
  misc_feature: SGI Peptide ID NO. 563102
  misc_feature (20)..(318): NCBI GI: 171684801 Blast Desc: protein product [Podospora anserina] gi|170942361|emb|CAP68013.1| protein product [Podospora anserina]
  misc_feature (20)..(321): NCBI GI: 39945494 Blast Desc: MGG_04729 [Magnaporthe grisea 70-15] gi|145021377|gb|EDK05506.1| MGG_04729 [Magnaporthe grisea 70-15]
  misc_feature (47)..(321): NCBI GI: 116192433 Blast Desc: CHGG_05934 [Chaetomium globosum CBS 148.51] gi|88181847|gb|EAQ89315.1| CHGG_05934 [Chaetomium globosum CBS 148.51]
  misc_feature (26)..(321): NCBI GI: 154323936 Blast Desc: BC1G_00367 [Botryotinia fuckeliana B05.10] gi|150842596|gb|EDN17789.1| BC1G_00367 [Botryotinia fuckeliana B05.10]
  misc_feature (225)..(321): NCBI GI: 46108326 Blast Desc: FG01045.1 [Gibberella zeae PH-1]
  misc_feature (251)..(319): NCBI GI: 169624973 Blast Desc: SNOG_15754 [Phaeosphaeria nodorum SN15] gi|111055729|gb|EAT76849.1| SNOG_15754 [Phaeosphaeria nodorum SN15]
  misc_feature (222)..(319): NCBI GI: 119193328 Blast Desc: CIMG_01041 [Coccidioides immitis RS]
  misc_feature (217)..(319): NCBI GI: 240105756 Blast Desc: CPC735_053190 [Coccidioides posadasii C735 delta SOWgp]
  misc_feature (249)..(319): NCBI GI: 261195144 Blast Desc: conserved [Ajellomyces dermatitidis SLH14081] gi|239587848|gb|EEQ70491.1| conserved [Ajellomyces dermatitidis SLH14081]
  misc_feature (249)..(319): NCBI GI: 239610665 Blast Desc: conserved [Ajellomyces dermatitidis ER-3]
MRLVRLDDSTKDYRTNLGDSAVAVSYDPRMEMGIPRSSYTWPGLPGLESSPELLPHELSSVAHHSDISSLTPPPSGSRSLTSSPPRSILTPEQRELKRQVDQARRDSKATARVRRGMSSTSYSSAGQSPPMTMHDFSSASPLPIYTTAPSQISLLAEPVTTVGPSYMPAYSTSPLPDHSSSHVFTPHYSPLPSNDYMGMNYSPAFPPPPAQSLSSQYSRASSMSESGMMYPVQPPVLPSGNPQGPDGGHVRVVQSRPKPQCWEHGCNGRQFSTFSNLLRHQREKSGQAAKATCPNCGAEFTRTTARNGHLLHDKCKQRRNS

SEQ ID NO: 9864 - DNA, 2081 bp, Muscodor strobelii; identical to SEQ ID NO: 9861
  misc_feature: SGI EST ID NO. CUFF.23251.2
  misc_feature: Variant of the nucleotide sequence at SEQ ID NO 9862

SEQ ID NO: 9865 - DNA, 1164 bp, Muscodor strobelii
  misc_feature: SGI cDNA ID NO. 563103
  misc_feature: Encodes the peptide sequence at SEQ ID NO 9866
atggccgcggtacccggaggtcgtgacaccagtgagccacctctaaagcgccttagatcttacgatgaagatagaataggagatgacatacgagcggtatttccgaattggacaccagaagatcctaacttgctgcggacacacggcttcgtaaactcgccttcctcaacctcatcgtcatgctccccgccatccgcatcctcaacccccatcaccaaggactctcagcccgctgaagatgcccaactcgttgaagctccggtctctagcatgcgccttgggtccgtcagtgacaatctcatcctggggctacgagcctacggagagccacaagagagcgatagaaacgctaaaagcggaaaaaccagatggaaaaagcagaaagtatcggcaaaaaatagcagaccagcgcaagctgtagctcctcttcgcaatatagcgcacgacttaccagacatcacggacggtgcatacgccaattttctcgatagacacggcctgcgacccgaacactatccacacgagatgctgagacgtctcgagaaacagcgcatagagcgttcacattcaagcaccagcggcaatgccgcaccctcgtcactctcaccaagtccattgtcacaagacctctatcatccgccggcgacgagaccaagcacttcgaagaacaacgatgagggagccgtctggatagtaagtcacacgcagcgcggcggctacgactggtacggcaccgatagcttcgcggaatccagttctggcgtccgattccacggcgtgttcggctccctcgaagctgcgaatgttcaggcactggaaattttccatcgtctacaccgagatttcctgccccgtgtcacgaggactggggcctctgcgcctaatactggcttgagtatggtttacggctcgagacaagacactgtcgagtctcaggatgctgtaaagatggatttagcaactggccattcctttgttgaaaagcatccggtgccgcaaaagcccgagtatgaagagggagatggcggcagtggtgacagaaagagtgacgaatctggcgcatcttggtgggttgactctggtggctgtttatggcttcgagcagctaattggggaatcggagactcgcgcatctttgttgttcggcaggatttcagtccgtga

SEQ ID NO: 9866 - protein, 387 aa, Muscodor strobelii
  misc_feature: SGI Peptide ID NO. 563103
MAAVPGGRDTSEPPLKRLRSYDEDRIGDDIRAVFPNWTPEDPNLLRTHGFVNSPSSTSSSCSPPSASSTPITKDSQPAEDAQLVEAPVSSMRLGSVSDNLILGLRAYGEPQESDRNAKSGKTRWKKQKVSAKNSRPAQAVAPLRNIAHDLPDITDGAYANFLDRHGLRPEHYPHEMLRRLEKQRIERSHSSTSGNAAPSSLSPSPLSQDLYHPPATRPSTSKNNDEGAVWIVSHTQRGGYDWYGTDSFAESSSGVRFHGVFGSLEAANVQALEIFHRLHRDFLPRVTRTGASAPNTGLSMVYGSRQDTVESQDAVKMDLATGHSFVEKHPVPQKPEYEEGDGGSGDRKSDESGASWWVDSGGCLWLRAANWGIGDSRIFVVRQDFSP

SEQ ID NO: 9867 - DNA, 576 bp, Muscodor strobelii
  misc_feature: SGI cDNA ID NO. 563104
  misc_feature: Reduced expression when VOC is produced
  misc_feature: Encodes the peptide sequence at SEQ ID NO 9868
atgtgccgcgtcggtgccatcttgatgactggttgcaaccatgtacgacaggcaggatggcaggatgcttctgttgctacacatctgagcgcactcatcactcgatgctcttcttgcaagaacgatcagtctttctgtggtacactctccattgacaagaatggtgatacccagcctcgcgcttctggtcgccgcacctcgtccggccgtcatcattcatcttcggtgcattcactgtcggattcaaatcgcccattgggcagtctagacgacaagtgcaagttctgtgcttgctacgagtccgaaattcgccttgccgatcacatcaagcagagtctgatggactacaatatggcactactttcagacgacgcacgtatttttgtccaagccgagatggatcgagcttttgaccgcgctgtggacatggctgtgagagcctacggccccgatgggagaagtcgagacaaggcatttcgaaccttggactcggagtaccaaaaagccagtgcagaaatcagcaggatgtgcggcgaacgacaactcgccccataccgggaactgtacggcaggtga

SEQ ID NO: 9868 - protein, 191 aa, Muscodor strobelii
  misc_feature: SGI Peptide ID NO. 563104
  misc_feature: Useful for introducing or modulating the production of volatile compounds
MCRVGAILMTGCNHVRQAGWQDASVATHLSALITRCSSCKNDQSFCGTLSIDKNGDTQPRASGRRTSSGRHHSSSVHSLSDSNRPLGSLDDKCKFCACYESEIRLADHIKQSLMDYNMALLSDDARIFVQAEMDRAFDRAVDMAVRAYGPDGRSRDKAFRTLDSEYQKASAEISRMCGERQLAPYRELYGR

SEQ ID NO: 9869 - DNA, 1797 bp, Muscodor strobelii
  misc_feature: SGI EST ID NO. CUFF.23333.0
  misc_feature: Variant of the nucleotide sequence at SEQ ID NO 9867
gatcaagctacgaaggacttgatcagagtttccaagcgcgtcgttagccttactacggagctcagtaagatgttccgacgccagccgggcaaatctaagtgacctcattgtttatcctggcgagcttggcatcagtgaagtgcatttacgcctagatctataaatctgggcctgaagaagaaacggtaaacacgatgtttttcccaccagctcggttaacgacaaatcatggccaattgaacatgcaataaggtttacttccgatgtgtggtcgatgacgaattagatgatatcatattcctacgttgattggcgccttttccgccatggttattggtggcagatgatgggatttgacgacagcttattgaggctgtaggacaaaaaacgtgctcaaaaacaccgaggagatgcttcgtacgagtgacgcagggcaacgcagggctgtatgcgcccgcttcacaaagaatacgcaatttttagtcgaacaaaacaattcaagtttcccacatgctacctgtccccgcacgtcatttgctctataaatgcgccagtctgatggggcccaatacgttccatcttgttaggtaatagcatcaagaatcccggccgtcgccatccgagcagccatcttaccgtctgtttgttcacgacacacgaaaatcacaaagatccaatggcgccacgtcttgttccatagttagtcatggagaactggtgtggtcgtgcagagtggctacgaagccactcgtgatttgattgacttgcaaactcagtcctgtcttttgggatgattgtcttcagtgccctatatcgagacaaattctttgatgatccgagacaccgacctagagcgccgcaattgcagccgtgtcggaccttgtgagagtgaggcaaccaaatacaaccatgtgccgcgtcggtgccatcttgatgactggttgcaaccatgtacgacaggcaggatggcaggatgcttctgttgctacacatctgagcgcactcatcactcgatgctcttcttgcaagaacgatcagtctttctgtggtacactctccattgacaagaatggtgatacccagcctcgcgcttctggtcgccgcacctcgtccggccgtcatcattcatcttcggtgcattcactgtcggattcaaatcgcccattgggcagtctagacgacaagtgcaagttctgtgcttgctacgagtccgaaattcgccttgccgatcacatcaagcagagtctgatggactacaatatggcactactttcagacgacgcacgtatttttgtccaagccgagatggatcgagcttttgaccgcgctgtggacatggctgtgagagcctacggccccgatgggagaagtcgagacaaggcatttcgaaccttggactcggagtaccaaaaagccagtgcagaaatcagcaggatgtgcggcgaacgacaactcgccccataccgggaactgtacggcaggtgaatttatggcgacgacttttatgtgaggaagacggtagtcatagtgatcatctgtgtgtttatgggagcatagccttggattcagcgaggcgtcaacgggacatgtggcttcagcgatcgggtcgcacgccatcgatggaaagcatcatgagcataagattcgaattacattcttaatgattgtctcggcatcgcgttaggtccttcgaaacgaatcatgtgggattggttagctataggtctttgtgataatcgcatttcttttctgcgtagacgatcatcgatctcatatgccaagttgtcctgatatgca

SEQ ID NO: 9870 - DNA, 645 bp, Muscodor strobelii
  misc_feature: SGI cDNA ID NO. 563105
  misc_feature: Encodes the peptide sequence at SEQ ID NO 9871
atggatactttccacatgatgagtgacactcctgctactagagctaatgcagccgctgttcaacatccaccggctcgcaacagcgtaccagcaggctacgggatccttagctcagatcatgtatccatggccccggattccgtagttaatggtgatctagagcctggcgaagtctctcctcgcaatttcaaagtcgaggaggatcctgattcatatctggactatggtctcaggctgccttctgaggaccgcaagcgtctcgaggaagaagtaagccgtgcttcccatgatcaccgggatagtgagcggatcctgcagccgttcgatagactcgaagctcgcaaccagaggcgtctcgccgctgtgatcgggcgactgcagaactttgacggttcgatcacggagatgctagccgtcgccaatgtccagcaccagattgatgcttccttcacggacctcgagcgcgctactgctcagctcaaagatgtcttccatcatctcgaccttgatggccacttcactgatcgacaggttcgaagacgagatcaagctacgaaggacttgatcagagtttccaagcgcgtcgttagccttactacggagctcagtaagatgttccgacgccagccgggcaaatctaagtga

SEQ ID NO: 9871 - protein, 214 aa, Muscodor strobelii
  misc_feature: SGI Peptide ID NO. 563105
MDTFHMMSDTPATRANAAAVQHPPARNSVPAGYGILSSDHVSMAPDSVVNGDLEPGEVSPRNFKVEEDPDSYLDYGLRLPSEDRKRLEEEVSRASHDHRDSERILQPFDRLEARNQRRLAAVIGRLQNFDGSITEMLAVANVQHQIDASFTDLERATAQLKDVFHHLDLDGHFTDRQVRRRDQATKDLIRVSKRVVSLTTELSKMFRRQPGKSK

SEQ ID NO: 9872 - DNA, 583 bp, Muscodor strobelii
  misc_feature: SGI cDNA ID NO. 563106
  misc_feature: Reduced expression when VOC is produced
  misc_feature: Encodes the peptide sequence at SEQ ID NO 9873
atggcgactccacgtctcacacagtcggccacatgtataagctgtttgcgaaggatagcacagccgaccaggacttcgccgctgtatttgacccagattcgcacgcgaacgacgaaagccgagctcgaagatctccagggcattcccgtgcgtctgctgagggacatccccaaattcggtcggaaggatgccatcattcgcgtcaaaggcggccgcatgcggaacatatggtttcccaagggccaggccgagtacatgaccaagaagcggttcgaggagctgggcttgaccgaggccgccgttggaacccgtgatcgcaccttcggccaggtccacaaagtagagagccaggacaagcagacgggccacgtcttcgccgccaaggtcgagggggaagcgttgaagcagcagcctaaggtgtcgttggctttgcctgccgacgaagtctcagccctcctcacatcactcctccccgaaaccttgactttcgagcgcatcaccagcgtgcctgaagccgcagcaccagagccaaagccagaacccgtcgtagtccgttccccaagtctcgccgccaacgccgcga

SEQ ID NO: 9873 - protein, 194 aa, Muscodor strobelii
  misc_feature: SGI Peptide ID NO. 563106
  misc_feature (1)..(189): NCBI GI: 85089340 Blast Desc: NCU09999 [Neurospora crassa OR74A] gi|28919195|gb|EAA28681.1| [Neurospora crassa OR74A]
  misc_feature (11)..(194): NCBI GI: 39945006 Blast Desc: MGG_04485 [Magnaporthe grisea 70-15] gi|145011406|gb|EDJ96062.1| MGG_04485 [Magnaporthe grisea 70-15]
  misc_feature (1)..(166): NCBI GI: 171680357 Blast Desc: protein product [Podospora anserina] gi|170939805|emb|CAP65031.1| protein product [Podospora anserina]
  misc_feature (25)..(109): NCBI GI: 116206856 Blast Desc: CHGG_02721 [Chaetomium globosum CBS 148.51] gi|88183318|gb|EAQ90786.1| CHGG_02721 [Chaetomium globosum CBS 148.51]
  misc_feature (1)..(163): NCBI GI: 156052783 Blast Desc: [Sclerotinia sclerotiorum 1980] gi|154704337|gb|EDO04076.1| [Sclerotinia sclerotiorum 1980]
  misc_feature (12)..(109): NCBI GI: 189204620 Blast Desc: conserved [Pyrenophora tritici-repentis Pt-1C-BFP] gi|187985744|gb|EDU51232.1| conserved [Pyrenophora tritici-repentis Pt-1C-BFP]
  misc_feature (1)..(163): NCBI GI: 154314991 Blast Desc: BC1G_04837 [Botryotinia fuckeliana B05.10] gi|150848375|gb|EDN23568.1| BC1G_04837 [Botryotinia fuckeliana B05.10]
  misc_feature: Useful for introducing or modulating the production of volatile compounds
MATPRLTQSATCISCLRRIAQPTRTSPLYLTQIRTRTTKAELEDLQGIPVRLLRDIPKFGRKDAIIRVKGGRMRNIWFPKGQAEYMTKKRFEELGLTEAAVGTRDRTFGQVHKVESQDKQTGHVFAAKVEGEALKQQPKVSLALPADEVSALLTSLLPETLTFERITSVPEAAAPEPKPEPVVVRSPSLAANAA

SEQ ID NO: 9874 - DNA, 682 bp, Muscodor strobelii
  misc_feature: SGI EST ID NO. CUFF.23329.0
  misc_feature: Variant of the nucleotide sequence at SEQ ID NO 9872
cccaaagcttgtagctggcggctctccatactcgagtctagacctccacgcccaattcaaccgtcccccttcgccatcggtcaattggcctcgatcacgatggcgactccacgtctcacacagtcggccacatgtataagctgtttgcgaaggatagcacagccgaccaggacttcgccgctgtatttgacccagattcgcacgcgaacgacgaaagccgagctcgaagatctccagggcattcccgtgcgtctgctgagggacatccccaaattcggtcggaaggatgccatcattcgcgtcaaaggcggccgcatgcggaacatatggtttcccaagggccaggccgagtacatgaccaagaagcggttcgaggagctgggcttgaccgaggccgccgttggaacccgtgatcgcaccttcggccaggtccacaaagtagagagccaggacaagcagacgggccacgtcttcgccgccaaggtcgagggggaagcgttgaagcagcagcctaaggtgtcgttggctttgcctgccgacgaagtctcagccctcctcacatcactcctccccgaaaccttgactttcgagcgcatcaccagcgtgcctgaagccgcagcaccagagccaaagccagaacccgtcgtagtccgttccccaagtctcgccgccaacgccgcga

SEQ ID NO: 9875 - DNA, 546 bp, Muscodor strobelii
  misc_feature: SGI cDNA ID NO. 563107
  misc_feature: Reduced expression when VOC is produced
  misc_feature: Encodes the peptide sequence at SEQ ID NO 9876
atggcctcctcacatccgttcatgtctccccagacaggttctcggactgcccccagcgaaaaggttgaacaggtcgagcctttgcagggtagcgactaccgccctgtcaaaaggaagatggtcacgatgcgcaacttcgtcctggctgtgcttctctgtgtatctgctagtgttggtatgtccaatgctgcgtatttacggcatgagaatgttgtggcagtagacttgtcgcgagatagtgtggaccaagatctatccacgttctctcgcttgctaaacatagcttcacctaaagcattgcggcactttcttcacgaacttgtgccggctacgacgaaaccaggtgtcttgtattctgaacgttctgctatcgaggccctcaacgtcgtcgatggaatcaacgacaagctcatcatccacgtcctcgcaaccgccatcgtcaacttccgagcaaagcacatccacttctactccaatgctgcctacttcgacgacctcgtcttcatcgtcagcatcttcttcttcatcaagctccatgttttctag

SEQ ID NO: 9876 - protein, 181 aa, Muscodor strobelii
  misc_feature: SGI Peptide ID NO. 563107
  misc_feature: Useful for introducing or modulating the production of volatile compounds
MASSHPFMSPQTGSRTAPSEKVEQVEPLQGSDYRPVKRKMVTMRNFVLAVLLCVSASVGMSNAAYLRHENVVAVDLSRDSVDQDLSTFSRLLNIASPKALRHFLHELVPATTKPGVLYSERSAIEALNVVDGINDKLIIHVLATAIVNFRAKHIHFYSNAAYFDDLVFIVSIFFFIKLHVF

SEQ ID NO: 9877 - DNA, 399 bp, Muscodor strobelii
  misc_feature: SGI cDNA ID NO. 563108
  misc_feature: Encodes the peptide sequence at SEQ ID NO 9878
atgcctgcagacgactatatcgcgtcaggcggtggcgcgttgcgtctcaagggcgccaaagtccagaaggccaagaagaagaagagcagcaagagcaaggacaaagacaaatctgccatcctggagagctccctgtctgcctccaagcaaacctccaagtccgacaaacatgaggttgtcgatgacgccgcacatgaatccgaggacgacgtcgaatacaagacagcggcagagcgccgacacgaggaggcaaataggaagaagatacaaagaatactcgaggacccggtgctcgcctcggagatccgtaagacacacaaagaaagagtcgagggcctcaatacctacctctccaaactcagcgaacaccacgatatgcccaagatcggccctggataa

SEQ ID NO: 9878 - protein, 132 aa, Muscodor strobelii
  misc_feature: SGI Peptide ID NO. 563108
  misc_feature (5)..(132): Pfam Id: PF08555 Pfam Desc: Eukaryotic family of function (DUF1754)
  misc_feature (1)..(132): NCBI GI: 39960864 Blast Desc: MGG_09476 [Magnaporthe grisea 70-15] gi|145010972|gb|EDJ95628.1| MGG_09476 [Magnaporthe grisea 70-15]
  misc_feature (1)..(132): NCBI GI: 85101266 Blast Desc: NCU03774 [Neurospora crassa OR74A] gi|16944699|emb|CAC28824.2| [Neurospora crassa] gi|28922659|gb|EAA31884.1| [Neurospora crassa OR74A]
  misc_feature (1)..(132): NCBI GI: 171694097 Blast Desc: protein product [Podospora anserina] gi|170946997|emb|CAP73801.1| protein product [Podospora anserina]
  misc_feature (1)..(132): NCBI GI: 212532071 Blast Desc: conserved [Penicillium marneffei ATCC 18224] gi|210071556|gb|EEA25645.1| conserved [Penicillium marneffei ATCC 18224]
  misc_feature (1)..(132): NCBI GI: 189207843 Blast Desc: conserved [Pyrenophora tritici-repentis Pt-1C-BFP] gi|187976348|gb|EDU42974.1| conserved [Pyrenophora tritici-repentis Pt-1C-BFP]
  misc_feature (1)..(132): NCBI GI: 242774649 Blast Desc: conserved [Talaromyces stipitatus ATCC 10500] gi|218722102|gb|EED21520.1| conserved [Talaromyces stipitatus ATCC 10500]
  misc_feature (2)..(132): NCBI GI: 225683764 Blast Desc: PABG_04259 [Paracoccidioides brasiliensis Pb03] gi|226293128|gb|EEH48548.1| PADG_04627 [Paracoccidioides brasiliensis Pb18]
  misc_feature (2)..(132): NCBI GI: 226277853 Blast Desc: PAAG_04469 [Paracoccidioides brasiliensis Pb01]
  misc_feature (2)..(132): NCBI GI: 238840498 Blast Desc: conserved [Microsporum canis CBS 113480]
  misc_feature (46)..(132): NCBI GI: 119181235 Blast Desc: [Coccidioides immitis RS]
MPADDYIASGGGALRLKGAKVQKAKKKKSSKSKDKDKSAILESSLSASKQTSKSDKHEVVDDAAHESEDDVEYKTAAERRHEEANRKKIQRILEDPVLASEIRKTHKERVEGLNTYLSKLSEHHDMPKIGPG

SEQ ID NO: 9879 - DNA, 3046 bp, Muscodor strobelii
  misc_feature: SGI EST ID NO. CUFF.23820.1
  misc_feature: Variant of the nucleotide sequence at SEQ ID NO 9877
atctaactgaccttcactattcatctgttgcagttggcttggttcaccaagctcggctcctgctatgcctgcagacgactatatcgcgtcaggcggtggcgcgttgcgtctcaagggcgccaaagtccagaaggccaagaagaagaagagcagcaagagcaaggacaaagacaaatctgccatcctggagagctccctgtctgcctccaagcaaacctccaagtccgacaaacatgaggttgtcgatgacgccgcacatgaatccgaggacgacgtcgaatacaagacagcggcagagcgccgacacgaggaggcaaataggaagaagatacaaagaatactcgaggacccggtgctcgcctcggagatccgtaagacacacaaagaaagagtcgagggcctcaatacctacctctccaaactcagcgaacaccacgatatgcccaagatcggccctggataaacagagcccaccagattctgatggctgatggatggatgtaccgccggctttgctgcaagtgacgtcgcaatctgtgatacctgtgaatcttgattctgcatgtttgaagtcgtatcgcatggccttcaccactcacgtgtcatgcttagtcatcatcgtgccaagagcactatgttcacagagacccagctgtctcatgcgaggatgggtccatctcattaggacattacgggtgaaggttgcctatggtatgggaggcttttcatgccgatggcaacggtggatatccaatcacgagctttagcatcagacatcttgagctcaggggtgaggattatccagttaccacgctttcaagtccacgccaggtcgaagctgctccattctcgacgggaggataacaaaaaaatgccaggacgaaagttaaaagtacatgtgatcaaactcctcgtcgcttgtgctatgcgatgctgcctagtaggataaggggaagagctgttctggttgagtgcgcaagataattcttaacagtcaagagtgtaattaagtaatatcattgcgccgcgacgattaatgtgtgtgcttaggccctccgatcttgccatttatgccttttccacgacacgctttgtttattcccgtatgcctataccactctatttgtcatgaacgtcgttacacggagcaagtatgccgaatgctctaaatacttcgcactgtgttgctagtaaagtctatctattaagcatgaatatgaaccaagtccgaccgtgaaatagcaaaggatgcacctagatcattagagcaccaccgacaacgatgccgaacaaaagctcgagggctgggagttgcgctctgatagctggcgacccggtctgcagattgcccatgccactcgacgtcgaggttggttcaccggtggcacccggtgtgacgatggcaacttccgttatcgttgtcaccgcacccccgggcaaagtagatgtgaaagtcgatgtcgcagatgttggggtggggatggagctagaagtcgtcgttgtcgtcgtggacagtgtcgacatagttgaggctaagtcttcatgagaacaaatctaattttacaatacgggagtacgggatgctcttgagcgaagggagacagaaaaggggtaaagtaaatagtacatgtaactggcaataatagtgtgcagagttgtctggtctacaaaggtatcgccagctatcattaataatacaagaaagtaggctaacttactgcttgatgggctagaaaacatggagcttgatgaagaagaagatgctgacgatgaagacgaggtcgtcgaagtaggcagcattggagtagaagtggatgtgctttgctcggaagttgacgatggcggttgcgaggacgtggatgatgagcttgtcgttgattccatcgacgacgttgagctaggcgtcgaggttgtggacatcgtagaagtagaactagacgtaggagttggagtaggagtagtgctcgtggaggtcgttgtgtctgcggtggttgtagtggtagttgtggtgttgcctggatcctgccgaacagccaggtgcacgatactcgaggccaattctgggttctccgcacgtacggcctcgatagcagaacgttcagaatacaagacacctggtttcgtcgtagccggcacaagttcgtgaagaaagtgccgcaatgctttaggtgaagctatgtttagcaagcgagagaacgtggatagatcttggtccacactatctcgcgacaagtctactgccacaacattctcatgccgtaaatacgcagcattggacataccaacactagcagatacacagagaagcacagccaggacgaagttgcgcatcgtgaccatcttccttttgacagggcggtagtcgctaccctgcaaaggctcgacctgttcaaccttttcgctgggggcagtccgagaacctgtctggggagacatgaacggatgtgaggaggccattatgtgtgaaagcagagtattattccttatattcacactgatccgaatgtgtattgcagcgtggctaatgcagaccaggttgaacgcggacttgacacacaagtgggatatcctagctgccgccgcattaacaagtggtggcgtgtacgagatcagacgaatggcaagagcaagaggcgtctcgcagcaaatcaaaatgcagtcagctccgtgtaagtcacggagtacaatgattgtttgagctcgtatgtctggaggtgggtgccgcttagtctgcctgcaggtaggactactgcagccgaactatgtcgctgcagcttgaacctgatgtatcagggtgttggtcggcaagcttaaagaacttggttagaagagtggcaaaaaaaaaagtaacagaagggcagtggatgagatcgggttgaattcctccacggagctgaccatcagctcggtccaacgtgagagagaggaagactctcgattttaacgagcgttactacgactagagttgggatctcacgcctctgtcccaccagcaccgtctcgcgacttctcatgtgcctttctgaggaaacaggcaagaaaagtt

SEQ ID NO: 9880 - DNA, 558 bp, Muscodor strobelii
  misc_feature: SGI cDNA ID NO. 563109
  misc_feature: Encodes the peptide sequence at SEQ ID NO 9881
atgtctctcaacatcacctcatcggctttcttgtactgccctcccgtcactcagactctcttcaccactgtttacgagacggtcctggttgccgcctgtgagactggctcttgggaagccacctacaccatcaccgagacctgcgctggcaacccgagcgactacgtcactcccactattcctcccggattcgtggtcaccactgtcagctgcagtgtttgcgaagaggaagagatcgagatcacttgccccggcgctcagcccaccggtatgggcatgcccaccgtcgaagtcgcaggcaacggtgtcacggccagcatctgtgctacacctcctccggctcctgctatgggtggatcgcctgctcctgctgctcctaccgctaccggcgagagcgtgccaccaactaacgagagtggcatgggagctgccggaagcaacggcaccgtcatcagcagcaacccaactatgcccattacagctggtgcctcatctgtcaaacgatctctcctcgccgcagctggcatggcagtcttggctgtacccctcttgctataa

SEQ ID NO: 9881 - protein, 185 aa, Muscodor strobelii
  misc_feature: SGI Peptide ID NO. 563109
  misc_feature (5)..(131): NCBI GI: 171694099 Blast Desc: protein product [Podospora anserina] gi|170946998|emb|CAP73802.1| protein product [Podospora anserina]
  misc_feature (5)..(75): NCBI GI: 85101270 Blast Desc: NCU03775 [Neurospora crassa OR74A] gi|16944698|emb|CAC28823.2| [Neurospora crassa] gi|28922660|gb|EAA31885.1| [Neurospora crassa OR74A]
MSLNITSSAFLYCPPVTQTLFTTVYETVLVAACETGSWEATYTITETCAGNPSDYVTPTIPPGFVVTTVSCSVCEEEEIEITCPGAQPTGMGMPTVEVAGNGVTASICATPPPAPAMGGSPAPAAPTATGESVPPTNESGMGAAGSNGTVISSNPTMPITAGASSVKRSLLAAAGMAVLAVPLLL

SEQ ID NO: 9882 - DNA, 1758 bp, Muscodor strobelii
  misc_feature: SGI EST ID NO. CUFF.23338.0
  misc_feature: Variant of the nucleotide sequence at SEQ ID NO 9880
atcaaaaagtatacacagagtcgccacgaccgtcacctcgaatcctcacagtgatgagttgccatcctcaaaatgaggattactctggagatcgatctccttgctaggaagtctctcgatcgtcttcgggctgtgatcgtgagatgctgaaataatgagggtacataccataaatctacggcttctttcgtaattcttgcttgatgtccacgcacgacgcgaagacaaatatctggtgggctagttacaaaatcatttggctctcaccagtccaggtaagcgtggtgatgggacccagtattatcatctgggtgtatacgttgagtgcttgtgatgttcggtatcgtgttatgatgtcttcgaggctgcaacgagaaagcaccattataggcgcgcaataacgtacaagccatgccatgagttctcttatccctagagacataccaggaacccaccgattctcattgggcggcgtgaagctcctcctagatccgggatgccgtcgcgcgagttaagcatggggagtctcagtccatgtctgagatcgcatgcggcttcgagtgcccacaacacggaaaccgcctcgaacacaccataccaaatcataatccacggccctcgggaatggcttgcaatcaccgcaccattcttcaggccccgagaaaggtttgttatggctcacttggttgctatgcatcagtcctaagacacatccccctcgacgagtctgtgttggcgatgctgctgtccgtcttcgtataaagatgggagaacatcccgctgcaaacgatctattttttgtatcctcatcaccaacagtctaatcatcacagtcactcattcaacaaaagcctctcggctaccacactcatttaactatcaacaacagtatacactcgtttgcacccttcggcacagcactatcacctcaacagtacattatatcacatcaccaagtgtatttatcaatttaccttcaacatgtctctcaacatcacctcatcggctttcttgtactgccctcccgtcactcagactctcttcaccactgtttacgagacggtcctggttgccgcctgtgagactggctcttgggaagccacctacaccatcaccgagacctgcgctggcaacccgagcgactacgtcactcccactattcctcccggattcgtggtcaccactgtcagctgcagtgtttgcgaagaggaagagatcgagatcacttgccccggcgctcagcccaccggtatgggcatgcccaccgtcgaagtcgcaggcaacggtgtcacggccagcatctgtgctacacctcctccggctcctgctatgggtggatcgcctgctcctgctgctcctaccgctaccggcgagagcgtgccaccaactaacgagagtggcatgggagctgccggaagcaacggcaccgtcatcagcagcaacccaactatgcccattacagctggtgcctcatctgtcaaacgatctctcctcgccgcagctggcatggcagtcttggctgtacccctcttgctataattcttgcttcgtacatgattttctgacgattggttgacgtgctcgggtgtgttgagggagtggcgattttgtatgacttatggccttttcatcttagcggtttctcatccgcgtggcaacgggggcagggggttcgagctatacacgcgggttttggctttttcaatgttgtcttattgtttgtttttgcacagtttcttggcattaattaaaatacgc

SEQ ID NO: 9883 - DNA, 507 bp, Muscodor strobelii
  misc_feature: SGI cDNA ID NO. 563110
  misc_feature: Encodes the peptide sequence at SEQ ID NO 9884
atgcagatcaatatctgtgcctacttcattgcctgcgagatagccagcctccttagcatggctatcgcagcctcgccttatgtccacagcatgactttatctcagtactcggatgctattgcccgttcaattgctcatgtcgactacagaaacgagcccttcaagcgagctgctggaactccggtggatgctagatatgcctgtcatgatccgcatcaagagatctttggcccagcacctccagtcgaggattgtcaagatgttatcagacagtactccgccttgaccacgagtatcgacgtgaagcttgttgaaggctgttaccagatcgcttctggtaattgcactggccttgtgtgcccccagcgcgagggtgaaagcagcatgcccggccctgtcgccgcccagttcatgcaaaagcctcttcttgaagagtgcatcgcaaatgggcaccgaggatggtggatcgatggtctgaactggggtattggtatttacctgacctaa

SEQ ID NO: 9884 - protein, 168 aa, Muscodor strobelii
  misc_feature: SGI Peptide ID NO. 563110
MQINICAYFIACEIASLLSMAIAASPYVHSMTLSQYSDAIARSIAHVDYRNEPFKRAAGTPVDARYACHDPHQEIFGPAPPVEDCQDVIRQYSALTTSIDVKLVEGCYQIASGNCTGLVCPQREGESSMPGPVAAQFMQKPLLEECIANGHRGWWIDGLNWGIGIYLT

SEQ ID NO: 9885 - DNA, 492 bp, Muscodor strobelii
  misc_feature: SGI cDNA ID NO. 563111
  misc_feature: Encodes the peptide sequence at SEQ ID NO 9886
atgaagctcagtaccgtgttgacacccatggcaattgccatgctctttgctgttatcggctttgcagctccgtttaccaatgttgcccagcatattgactccctagagccgtattcagatcgtgcactcggtaaaagagatgcgtatacatgctttggacgcaacgcgactgcgactgccatcgactgccaggctgttcttggccagcttcagcagcttggcgacaaagaattcagtctctattccggtctctgtttaagctgggcttcaggaacctgcaatttccgtttctgcgcagagccttgggtcgtcagccgtgtcaatcgaacagcgtcctggatggcaggctacgcgaatgattacttgatgaactgcatctcagatggtcagtacgcagttatgggggacaacctcaacctcaatagcaatgggggtacatatcgtctttggattgaagaagccgttccagaacatagagctaccctgctctaa

SEQ ID NO: 9886 - protein, 163 aa, Muscodor strobelii
  misc_feature: SGI Peptide ID NO. 563111
MKLSTVLTPMAIAMLFAVIGFAAPFTNVAQHIDSLEPYSDRALGKRDAYTCFGRNATATAIDCQAVLGQLQQLGDKEFSLYSGLCLSWASGTCNFRFCAEPWVVSRVNRTASWMAGYANDYLMNCISDGQYAVMGDNLNLNSNGGTYRLWIEEAVPEHRATLL

SEQ ID NO: 9887 - DNA, 1074 bp, Muscodor strobelii
  misc_feature: SGI EST ID NO. CUFF.23348.0
  misc_feature: Variant of the nucleotide sequence at SEQ ID NO 9885
gtcattctttccaacaagccatccgtcaaataatttaacaagccatcttcggcttttgtcatcacgtttacctcacggatttattcgcaatctacacataccgccgccacgctcccatcctgttactcccatatctagtctcctattcaatatctcaccgaaaacaatcaatgatgaagctcagtaccgtgttgacacccatggcaattgccatgctctttgctgttatcggctttgcagctccgtttaccaatgttgcccagcatattgactccctagagccgtattcagatcgtgcactcggtaaaagagatgcgtatacatgctttggacgcaacgcgactgcgactgccatcgactgccaggctgttcttggccagcttcagcagcttggcgacaaagaattcagtctctattccggtctctgtttaagctgggcttcaggaacctgcaatttccgtttctgcgcagagccttgggtcgtcagccgtgtcaatcgaacagcgtcctggatggcaggctacgcgaatgattacttgatgaactgcatctcagatggtcagtacgcagttatgggggacaacctcaacctcaatagcaatgggggtacatatcgtctttggattgaagaagccgttccagaacatagagctaccctgctctaattaaagagaatggtcagatcgtgatgtggagaataggacatttgtgtttaatgtcttaggcaaaagaactatgaggaaattgcgatcgagcaatgaggcaaagatggagaggagtgaggatctcgcaactgtctgctatattcgagtgtgaaaagccatcaatcgtgatgtacaacccttatcccgattccgagtacattgtgtagcttcatgaacaattaatgatgagctaatagcatggtgctgcgtattctgtgcttgaaaaacatatattctgcgattgtaagcgagttactggtcgtcacgatgcgttctttgagctggaggatcgagggcaccttgagcatcgtgcccgacaagctattccgtactaccacagatatgctagcatcaatggacttcactatct

SEQ ID NO: 9888 - DNA, 549 bp, Muscodor strobelii
  misc_feature: SGI cDNA ID NO. 563112
  misc_feature: Encodes the peptide sequence at SEQ ID NO 9889
atgtcagtctctttaggtggtaaccaggcgtcgaagccggtccaattgaccgtgtcaacgaaggaaattgttccagactctacacatcggcattcttccgacttagacccaaatgcccagctaaacatggatgtatcgacccccgtgtcgcttaacaacgggtttgacaccgacatcgaagctgtaatgcctgtcaagtctactgagcctatcaataaaaaggtgacaggcgagcattgggacaatgctggtggcaacgtctggccaggtcaggcgcattggaaggagaaggcccgcgctgcaaggcgcaagaatcgatcttgccaatgcatggctgggctgagcaagcggactagaataatcgtcaaaatcgccatcgccctcttggtcattggaatcgctattggggtcggagtaggcataagcaaaccacgtaagcaaaacctgaagttatcttcaacacattcgggaaatttcaagaaagcagtatcgttatacccggagcagctgctctatgggcacgttttgactcttccgaaatcccgctga

SEQ ID NO: 9889 - protein, 182 aa, Muscodor strobelii
  misc_feature: SGI Peptide ID NO. 563112
  misc_feature (19)..(144): NCBI GI: 85098776 Blast Desc: NCU08870 [Neurospora crassa OR74A] gi|18375948|emb|CAD21247.1| [Neurospora crassa] gi|28922177|gb|EAA31427.1| [Neurospora crassa OR74A]
  misc_feature (36)..(144): NCBI GI: 171692951 Blast Desc: protein product [Podospora anserina] gi|170946424|emb|CAP73225.1| protein product [Podospora anserina]
  misc_feature (45)..(144): NCBI GI: 39974257 Blast Desc: MGG_00725 [Magnaporthe grisea 70-15] gi|145018344|gb|EDK02623.1| MGG_00725 [Magnaporthe grisea 70-15]
  misc_feature (53)..(144): NCBI GI: 46130836 Blast Desc: FG08973.1 [Gibberella zeae PH-1]
  misc_feature (44)..(144): NCBI GI: 116198827 Blast Desc: CHGG_07569 [Chaetomium globosum CBS 148.51] gi|88178848|gb|EAQ86316.1| CHGG_07569 [Chaetomium globosum CBS 148.51]
  misc_feature (13)..(144): NCBI GI: 256727854 Blast Desc: [Nectria haematococca mpVI 77-13-4]
  misc_feature (55)..(143): NCBI GI: 156054612 Blast Desc: [Sclerotinia sclerotiorum 1980] gi|154703934|gb|EDO03673.1| [Sclerotinia sclerotiorum 1980]
  misc_feature (55)..(143): NCBI GI: 154320981 Blast Desc: [Botryotinia fuckeliana B05.10] gi|150851903|gb|EDN27095.1| [Botryotinia fuckeliana B05.10]
  misc_feature (102)..(142): NCBI GI: 242801422 Blast Desc: conserved [Talaromyces stipitatus ATCC 10500] gi|218717107|gb|EED16528.1| conserved [Talaromyces stipitatus ATCC 10500]
  misc_feature (103)..(142): NCBI GI: 212540548 Blast Desc: conserved [Penicillium marneffei ATCC 18224] gi|210067728|gb|EEA21820.1| conserved [Penicillium marneffei ATCC 18224]
MSVSLGGNQASKPVQLTVSTKEIVPDSTHRHSSDLDPNAQLNMDVSTPVSLNNGFDTDIEAVMPVKSTEPINKKVTGEHWDNAGGNVWPGQAHWKEKARAARRKNRSCQCMAGLSKRTRIIVKIAIALLVIGIAIGVGVGISKPRKQNLKLSSTHSGNFKKAVSLYPEQLLYGHVLTLPKSR

SEQ ID NO: 9890 - DNA, 1465 bp, Muscodor strobelii
  misc_feature: SGI EST ID NO. CUFF.23365.0
  misc_feature: Variant of the nucleotide sequence at SEQ ID NO 9888
gtagtgacattccctcgcttgccgtaagtagtcccgccctgtcgcctaggccagtgccatcccagctaattgacctcatccttgtctctcctctcacctccacacgcgttcgaactcctatcatggcattgaaagacgcactcctgtccttcgtacttctacgagcgcactttggagtgtatgcctcacatttgtccttcatacctacctaaatgcgtttgaccgacgattattctgacattaccacccgctcttttctccatttggccgtatggtaaagataggatattgagacggctgaaaccccgattttgaaacaagcactttctagtccaaccccgaaatcttttgttcgagcagcgccttatttttaaagttgaatgagacagtgggcaaccgtggcgcagggtggctctgtcctttggtgcagttgctctttctctctgaaatagctttcctgcatatcacgtcctggttgatcccagagagtcttcgcaattgaaggcgcgtaatagttcgggtgcatacctactcatggttaatacatctcataggttctgttgttctgcgaaagacctgctggtcaacgcattaaacacccccgccgatctgtgtttcggataagtcaagcaatcggacgcgcatatatcttacgtgcatccccaaaccccggaagaggcacctcagacccttgaactgccttttactttactcgtagacgcaacgttttctacaaacgcgccagaagtagccatgtcagtctctttaggtggtaaccaggcgtcgaagccggtccaattgaccgtgtcaacgaaggaaattgttccagactctacacatcggcattcttccgacttagacccaaatgcccagctaaacatggatgtatcgacccccgtgtcgcttaacaacgggtttgacaccgacatcgaagctgtaatgcctgtcaagtctactgagcctatcaataaaaaggtgacaggcgagcattgggacaatgctggtggcaacgtctggccaggtcaggcgcattggaaggagaaggcccgcgctgcaaggcgcaagaatcgatcttgccaatgcatggctgggctgagcaagcggactagaataatcgtcaaaatcgccatcgccctcttggtcattggaatcgctattggggtcggagtaggcataagcaaaccactgggcgctgctatttggaaaacaactccgccatgacgccgggcatcgacaaagtcaatatcgacaattcgctagaacgccattcacatcaatgctgatagttctcgacactggaaacatccgagccgtagccgaacaccgcacactcgcgataactatatcttcttttcggcgtttcagtaagatgtcaaaattcaagatgaccactaccttttcgatatggtgcagaacgggatgaagtcttgcgcggctcgctctatcgtctcatcatagcccctga

SEQ ID NO: 9891 - DNA, 543 bp, Muscodor strobelii
  misc_feature: SGI cDNA ID NO. 563113
  misc_feature: Encodes the peptide sequence at SEQ ID NO 9892
atgcacatccgaacgtcacgccacggcgtagccctctccctagctaccatcttcaccaccgtcacagcacaaggagactacagcggcacgtactggcactacaccgtaaaatccgggcccgcatccctcgtcggctcaagtttagtccctgtcggcgatgctacgggaccatatgctgcaatgggcttccagtccgccgccgaaacatggctaatgcttctcactaccatcgacgggtactcaatgaccagtgaacgcgatgcttccgcggcttacttcggcgtatatcctgaaggggacggccccgtagtcctcatcaaatacggatcgggctccgggctcttctacaactttgaaaatggcgagctgcgatatcatgaaggtgctaaccctgcggttacctggtacgcttgcaccggcacatcgagttttggcggccagcccgtcccggggtatgctctggcttggtatgatgtttcgacgagcgacaccgtgcctacggaatgtactcaaatcgttattgctgctacacgagcctcttag

SEQ ID NO: 9892 - protein, 180 aa, Muscodor strobelii
  misc_feature: SGI Peptide ID NO. 563113
MHIRTSRHGVALSLATIFTTVTAQGDYSGTYWHYTVKSGPASLVGSSLVPVGDATGPYAAMGFQSAAETWLMLLTTIDGYSMTSERDASAAYFGVYPEGDGPVVLIKYGSGSGLFYNFENGELRYHEGANPAVTWYACTGTSSFGGQPVPGYALAWYDVSTSDTVPTECTQIVIAATRAS

SEQ ID NO: 9893 - DNA, 1413 bp, Muscodor strobelii
  misc_feature: SGI cDNA ID NO. 563114
  misc_feature: Encodes the peptide sequence at SEQ ID NO 9894
atggattctcagtcgcctcattgtcatgaggagaatacgtcaatgcctcactacgacgtgttgggctcagatgacttcgcgacacacgttgctgacctcgactcggagttgccaagtgatccattcggtaacgaatggttaggtttggatgatgttctgaccgacaatcgtgacttggagcagtccattttcgaaacggaaacagtggtcaacgtgtttgataacatctctgcagtagacattgctggtgttccacaaatggtgggcggactcagtgatgtatcttcttcggatatgctgggtttcatcgatccgtctatattgactgttgggtctgttgagccacatacaacctctgtctatgtctctgaggcaccagttgtggaggcgccagactttgtcgtgtcaccttcggtttacctacccctttgtggggacacactcacttccagcacaaacgattcaagcgatgtaggccacacctatcaagaccttcagactgagctcttggagagaacttcaatagtcgcaagcgtgccgaggcacttggagaagaacagctcctctcagccagcatcgacgcagactcgccaacttcttccaatcgcacccaaaggcctactacccaagcgcccaataagcgaaagtcctgaagtgttagactgctaccatgtgttttctgcggttccaactggtaacagtgaagcaatactcgcgcctaagaaaaagcagaagcggcataagtactcttcgaagacgtgtttgagatgccagagccagaaaatcaagtgctctggcacctttccatgtaccaattgctcggtgcactggaaaagtatgaagtctcgaacgagcgccattctgaagtggaagcaatgtttcgattcggacatcatggaactcaacggcttttgggccttatgggaatttattaacccgcacggtctcgatgaccgtgcaatgaccaacagcaacgaggaatacttgaatgcaagagcagaaaccagtccagagaaccattacacggaaattgcaacagcagcgactgatctttggctcaccgcggaagcctcaagagccctccatggccctcttgaccgtgacatttaccaaccttgtctttgggaagtttctaggcggcatcctgcgacaattgcaccgggtactccatggttctctgagtcacgtcttcctcccggccaactctcctcgtatcgtgcgacttacgattctggcccggtctggatctttgccgtcgttcacctacaacccacctggatcgctcggcgggctgcactctctgacatacagatatgggacttcaggcaatggatttcgctgaaggactgggatgatgtgcatggattctggtttggaagcgtgctcactttgcagcaagctcgagggcattag

SEQ ID NO: 9894 - protein, 470 aa, Muscodor strobelii
  misc_feature: SGI Peptide ID NO. 563114
MDSQSPHCHEENTSMPHYDVLGSDDFATHVADLDSELPSDPFGNEWLGLDDVLTDNRDLEQSIFETETVVNVFDNISAVDIAGVPQMVGGLSDVSSSDMLGFIDPSILTVGSVEPHTTSVYVSEAPVVEAPDFVVSPSVYLPLCGDTLTSSTNDSSDVGHTYQDLQTELLERTSIVASVPRHLEKNSSSQPASTQTRQLLPIAPKGLLPKRPISESPEVLDCYHVFSAVPTGNSEAILAPKKKQKRHKYSSKTCLRCQSQKIKCSGTFPCTNCSVHWKSMKSRTSAILKWKQCFDSDIMELNGFWALWEFINPHGLDDRAMTNSNEEYLNARAETSPENHYTEIATAATDLWLTAEASRALHGPLDRDIYQPCLWEVSRRHPATIAPGTPWFSESRLPPGQLSSYRATYDSGPVWIFAVVHLQPTWIARRAALSDIQIWDFRQWISLKDWDDVHGFWFGSVLTLQQARGH

SEQ ID NO: 9895 - DNA, 2793 bp, Muscodor strobelii
  misc_feature: SGI cDNA ID NO. 563115
  misc_feature: Reduced expression when VOC is produced
  misc_feature: Encodes the peptide sequence at SEQ ID NO 9896
atggccgaggaacacggtgccgctgcgccggccatcaacaccaacatcgagtcgggcaacttcgacgagaaggccacccacggcgcccaccacggcaccgagaccacttccgcccctcccaaggccaagcccgaggacggcgatgacgaggatgaggacattgacgccctgatcgaggacctcgagtcccaggatggtggcgatgcattcgacgaggaggaggaggaaggcactcccggtggcggccgcaccgtccccgaggagatgctccagaccgatacccgccttggtcttactgagtccgaggtcaccaaccgtcgtcgcaagtacggtctcaaccagatgaaggaggagaaggagaacctgcttctcaagttcttcggtttcttcgttggtcctatccagttcgtcatggaggctgccgccgtccttgctgctggtcttgaggactgggtcgatttcggtgtcattattgccctgctccttcttaacgccgctgttggtttcatccaggagtaccaggctggctctatcgtcgatgagttgaagaagactctcgctctcaaggctgttgttctccgtgacggtactctcaaggaggttgaggctcccttcgtcgtgcctggtgatatcctccaggttgaggagggtaccatcattcctgctgatggccgcattgttaccgaagacgcttttctccaggtcgatcagtccgccctcacgggtgagtctctcgccgtcgacaagcacatgggcgaccagtgctttgcctcttcctcagtcaagcgtggtgaggcttttgtcgtcattacggctaccggtgataacaccttcgtcggtcgtgctgcggctctcgtgtctcaggcttcttccggaactggtcacttcactgaggtgctcaacggcattggtacggttcttctcgtccttgtcattgccactctcttggttgtctgggtttcttctttctaccgctccaacaacattgtcgacatcttgcgcttcactctcggaatcaccatcgtcggtgtccccgtcggtctgcctgccgtcgttaccaccaccatggctgtcggtgctgcctacctcgccaagaagaaggccatcgttcagaagctttccgccatcgagtctcttgctggtgtcgagattctctgctccgacaagaccggtactctgaccaagaacaagctctctctctccgagcccttcactgtcgccggtgttgagcccgatgacctcatgcttactgcttgtttggctgcttctcgcaagaagaagggtatcgatgccattgacaaggctttcctcaaggccctcaagttctaccctcgcgccaagtctgttctctccaagtaccaggtcaagcagttcatccccttcgaccctgtctccaagaaggtcaccgctgttgttgagtcccctcaaggcgaggtcatcacctgtgtcaagggtgctcctctgttcgttctgaagactgtcgaggaggaccaccccatccctgaggagatcgaccaggcctacaagaacaaggttgctgagttcgccacccgtggtttccgttcccttggtgttgcccgcaagcgtggtgagggtgcttgggagattctcggtatcatgccctgctccgaccctccccgtcacgatactgcccgcactatcaacgaagcgaagcgcatgggtctttctattaagatgcttactggtgatgccgtcggcatcgctcgcgagacctctcgtcaactcggtctcggtactaacgtctacaatgctgagcgtcttggtcttggtggtggcggtgacatgcctggttctgaggtctacgatttcgtcgaagctgccgatggtttcgccgaggtcttcccccagcacaagtacaatgtcgtcgagattctgcaacagcgtggctaccttgttggtatgactggtgacggtgtcaacgatgccccatccttgaagaaggctgatactggtattgctgtcgagggtgcctctgacgctgcccgatccgctgccgatatcgtcttcttggctcctggtctgggagctattattgatgctctcaagacttctcgccagattttccaccgcatgtacgcctacgtcgtataccgcatcgccctgtctctccacttggaaatcttccttggtctctggattgccatcttgaaccgatcgctcaacattgagttgattgtcttcattgccatttttgccgatgttgccactcttgccattgcctacgacaatgctccctactccatgagccccgtcaagtggaacctgcccaagctctggggtatgtccgtcctcctcggcttcatcttggccgtcggtacctggatcactgttaccactctctacgccaacggccccaacggtggtatcgtccagaacttcggtaacgttgacgaggttgtcttccttgagatctctcttactgagaactggcttatctttatcacccgtgccaacggtcccttctggtcctccatcccctcgtggcagctcgctggcgctgtgctgatcgtagatatcctcgccactgctttctgtatctgggggttcttcgagtcctcgatcacctctattgtcgccgtcgtccgtatctggatcttctcgttcggtgtcttctgcgtcatgggtggtgtctactacttcctccaggacagcactggattcgacaatttgatgcacggcaaatctcccaagggcagccagaagcagcgctccctcgaggactttgtcgtctcactccagcgtgtctccacccagcacgagaagtcgcagtaa

SEQ ID NO: 9896 - protein, 930 aa, Muscodor strobelii
  misc_feature: SGI Peptide ID NO. 563115
  misc_feature (382)..(665): Pfam Id: PF00702 Pfam Desc: haloacid dehalogenase-like hydrolase
  misc_feature (71)..(155): Pfam Id: PF00690 Pfam Desc: Cation transporter/ATPase, N-terminus
  misc_feature (156)..(378): Pfam Id: PF00122 Pfam Desc: E1-E2 ATPase
  misc_feature (53)..(930): NCBI GI: 119497279 Blast Desc: h(+)-transporting atpase plant/fungi plasma membrane type [Neosartorya fischeri NRRL 181] gi|119413561|gb|EAW23502.1| h(+)-transporting atpase plant/fungi plasma membrane type NRRL
  misc_feature (44)..(930): NCBI GI: 70990296 Blast Desc: P-type ATPase [Aspergillus fumigatus Af293] gi|66847629|gb|EAL87959.1| P-type ATPase, [Aspergillus fumigatus Af293]
  misc_feature (49)..(929): NCBI GI: 121703229 Blast Desc: h(+)-transporting atpase plant/fungi plasma membrane type [Aspergillus clavatus NRRL 1] gi|119398022|gb|EAW08453.1| h(+)-transporting atpase plant/fungi plasma membrane type NRRL 1]
  misc_feature (8)..(930): NCBI GI: 145612543 Blast Desc: MGG_07200 [Magnaporthe grisea 70-15] gi|145019688|gb|EDK03916.1| MGG_07200 [Magnaporthe grisea 70-15]
  misc_feature (54)..(929): NCBI GI: 191174826 Blast Desc: plasma membrane ATPase 2 [Leptosphaeria maculans]
  misc_feature (57)..(929): NCBI GI: 189194962 Blast Desc: plasma membrane ATPase [Pyrenophora tritici-repentis Pt-1C-BFP] gi|187979698|gb|EDU46324.1| plasma membrane ATPase [Pyrenophora tritici-repentis Pt-1C-BFP]
  misc_feature (48)..(929): NCBI GI: 238880508 Blast Desc: plasma membrane ATPase [Candida albicans WO-1]
  misc_feature (15)..(929): NCBI GI: 225678950 Blast Desc: plasma membrane ATPase [Paracoccidioides brasiliensis Pb03]
  misc_feature (41)..(929): NCBI GI: 149245819 Blast Desc: plasma membrane ATPase 1 [Lodderomyces elongisporus NRRL YB-4239] gi|146449776|gb|EDK44032.1| plasma membrane ATPase 1 [Lodderomyces elongisporus NRRL YB-4239]
  misc_feature (48)..(929): NCBI GI: 68476219 Blast Desc: CaO19.5383 [Candida albicans SC5314] gi|68476408|ref|XP_717665.1| CaO19.12838 [Candida albicans SC5314] gi|46439386|gb|EAK98704.1| CaO19.12838 [Candida albicans
  misc_feature (1)..(930): SWISSPROT Homolog: EC 3.6.3.6 Proton-exporting ATPase
  misc_feature: Useful for introducing or modulating the production of volatile compounds
MAEEHGAAAPAINTNIESGNFDEKATHGAHHGTETTSAPPKAKPEDGDDEDEDIDALIEDLESQDGGDAFDEEEEEGTPGGGRTVPEEMLQTDTRLGLTESEVTNRRRKYGLNQMKEEKENLLLKFFGFFVGPIQFVMEAAAVLAAGLEDWVDFGVIIALLLLNAAVGFIQEYQAGSIVDELKKTLALKAVVLRDGTLKEVEAPFVVPGDILQVEEGTIIPADGRIVTEDAFLQVDQSALTGESLAVDKHMGDQCFASSSVKRGEAFVVITATGDNTFVGRAAALVSQASSGTGHFTEVLNGIGTVLLVLVIATLLVVWVSSFYRSNNIVDILRFTLGITIVGVPVGLPAVVTTTMAVGAAYLAKKKAIVQKLSAIESLAGVEILCSDKTGTLTKNKLSLSEPFTVAGVEPDDLMLTACLAASRKKKGIDAIDKAFLKALKFYPRAKSVLSKYQVKQFIPFDPVSKKVTAVVESPQGEVITCVKGAPLFVLKTVEEDHPIPEEIDQAYKNKVAEFATRGFRSLGVARKRGEGAWEILGIMPCSDPPRHDTARTINEAKRMGLSIKMLTGDAVGIARETSRQLGLGTNVYNAERLGLGGGGDMPGSEVYDFVEAADGFAEVFPQHKYNVVEILQQRGYLVGMTGDGVNDAPSLKKADTGIAVEGASDAARSAADIVFLAPGLGAIIDALKTSRQIFHRMYAYVVYRIALSLHLEIFLGLWIAILNRSLNIELIVFIAIFADVATLAIAYDNAPYSMSPVKWNLPKLWGMSVLLGFILAVGTWITVTTLYANGPNGGIVQNFGNVDEVVFLEISLTENWLIFITRANGPFWSSIPSWQLAGAVLIVDILATAFCIWGFFESSITSIVAVVRIWIFSFGVFCVMGGVYYFLQDSTGFDNLMHGKSPKGSQKQRSLEDFVVSLQRVSTQHEKSQ

SEQ ID NO: 9897 - DNA, 3352 bp, Muscodor strobelii
  misc_feature: SGI EST ID NO. CUFF.24967.1
  misc_feature: Variant of the nucleotide sequence at SEQ ID NO 9895
tttttctctcttttctctcctaccgcgttgatgacttgtctacctgcactcgtcaatcactcctaggctcaaggtccttgacgctggtgccttccgctctcccccctctcccctctttgtctcttgtattgtcaccgctagactgttaattcctaaggtcctacacctaattcctatttgtccaagcgagtagatctcggctatagactagaaccccacagacactcgccgccatggccgaggaacacggtgccgctgcgccggccatcaacaccaacatcgagtcgggcaacttcgacgagaaggccacccacggcgcccaccacggcaccgagaccacttccgcccctcccaaggccaagcccgaggacggcgatgacgaggatgaggacattgacgccctgatcgaggacctcgagtcccaggatggtggcgatgcattcgacgaggaggaggaggaaggcactcccggtggcggccgcaccgtccccgaggagatgctccagaccgatacccgccttggtcttactgagtccgaggtcaccaaccgtcgtcgcaagtacggtctcaaccagatgaaggaggagaaggagaacctgcttctcaagttcttcggtttcttcgttggtcctatccagttcgtcatggaggctgccgccgtccttgctgctggtcttgaggactgggtcgatttcggtgtcattattgccctgctccttcttaacgccgctgttggtttcatccaggagtaccaggctggctctatcgtcgatgagttgaagaagactctcgctctcaaggctgttgttctccgtgacggtactctcaaggaggttgaggctcccttcgtcgtgcctggtgatatcctccaggttgaggagggtaccatcattcctgctgatggccgcattgttaccgaagacgcttttctccaggtcgatcagtccgccctcacgggtgagtctctcgccgtcgacaagcacatgggcgaccagtgctttgcctcttcctcagtcaagcgtggtgaggcttttgtcgtcattacggctaccggtgataacaccttcgtcggtcgtgctgcggctctcgtgtctcaggcttcttccggaactggtcacttcactgaggtgctcaacggcattggtacggttcttctcgtccttgtcattgccactctcttggttgtctgggtttcttctttctaccgctccaacaacattgtcgacatcttgcgcttcactctcggaatcaccatcgtcggtgtccccgtcggtctgcctgccgtcgttaccaccaccatggctgtcggtgctgcctacctcgccaagaagaaggccatcgttcagaagctttccgccatcgagtctcttgctggtgtcgagattctctgctccgacaagaccggtactctgaccaagaacaagctctctctctccgagcccttcactgtcgccggtgttgagcccgatgacctcatgcttactgcttgtttggctgcttctcgcaagaagaagggtatcgatgccattgacaaggctttcctcaaggccctcaagttctaccctcgcgccaagtctgttctctccaagtaccaggtcaagcagttcatccccttcgaccctgtctccaagaaggtcaccgctgttgttgagtcccctcaaggcgaggtcatcacctgtgtcaagggtgctcctctgttcgttctgaagactgtcgaggaggaccaccccatccctgaggagatcgaccaggcctacaagaacaaggttgctgagttcgccacccgtggtttccgttcccttggtgttgcccgcaagcgtggtgagggtgcttgggagattctcggtatcatgccctgctccgaccctccccgtcacgatactgcccgcactatcaacgaagcgaagcgcatgggtctttctattaagatgcttactggtgatgccgtcggcatcgctcgcgagacctctcgtcaactcggtctcggtactaacgtctacaatgctgagcgtcttggtcttggtggtggcggtgacatgcctggttctgaggtctacgatttcgtcgaagctgccgatggtttcgccgaggtcttcccccagcacaagtacaatgtcgtcgagattctgcaacagcgtggctaccttgttggtatgactggtgacggtgtcaacgatgccccatccttgaagaaggctgatactggtattgctgtcgagggtgcctctgacgctgcccgatccgctgccgatatcgtcttcttggctcctggtctgggagctattattgatgctctcaagacttctcgccagattttccaccgcatgtacgcctacgtcgtataccgcatcgccctgtctctccacttggaaatcttccttggtctctggattgccatcttgaaccgatcgctcaacattgagttgattgtcttcattgccatttttgccgatgttgccactcttgccattgcctacgacaatgctccctactccatgagccccgtcaagtggaacctgcccaagctctggggtatgtccgtcctcctcggcttcatcttggccgtcggtacctggatcactgttaccactctctacgccaacggccccaacggtggtatcgtccagaacttcggtaacgttgacgaggttgtcttccttgagatctctcttactgagaactggcttatctttatcacccgtgccaacggtcccttctggtcctccatcccctcgtggcagctcgctggcgctgtgctgatcgtagatatcctcgccactgctttctgtatctgggggttcttcgagtcctcgatcacctctattgtcgccgtcgtccgtatctggatcttctcgttcggtgtcttctgcgtcatgggtggtgtctactacttcctccaggacagcactggattcgacaatttgatgcacggcaaatctcccaagggcagccagaagcagcgctccctcgaggactttgtcgtctcactccagcgtgtctccacccagcacgagaagtcgcagtaaacgcgcatgaacgtgaatcggcgcggcattccccgccaggccccgcctaccggccccccttctccgaatgtgttacatacctgtactctgcctttcggactatagagtctctccgtctggcttgggggtctatcactctttattattccctatctctgtaaactgaatgatgcggcgggcagacttcggtcatatacccatacgtcttttagacattaatcaatcaataagaagaaagtaaaaaattaataagctgcattgtccattgtgtgaatgtttctaaaatcccggcccacctgcgaatatgtgctatgatctgttcgaag

SEQ ID NO: 9898 - DNA, 1650 bp, Muscodor strobelii
  misc_feature: SGI cDNA ID NO. 563116
  misc_feature: Encodes the peptide sequence at SEQ ID NO 9899
atgaatcacagcattccaggctactactacgacactgagaaacgtcgctacttcaaggtcgagaagagtaagacggcgcctaccacagccgcctggtcagcggaaaacgtgaagaggcggaagctcgacgacgccgaggcagccgccgctctgcgtcggctagacttgaccaaaaatcgcatcaagcgtgctagggtgttgaatgagcctctcactggcggcttcttcgctcgcgagcatggagaggtctgggatgacctacagcccgcgtgctttgcagctggcttgaaggggaagggaagcgtaccacttagtcctccaggcttccaggggcaagtgaaacacatgtatattgacggtcaggatgatcggacaggaatgtgcacaatttgggcgactgttgacgagagaacactttcgactacatatattcctcgtagcacggacggccgtcttgatacacgcctacttgcaaattaccgcctcgccaaccagaattctcaggccgtttacaatgagttcgtcttgaaccagttatctgatatcggatacgatgcacacagcaatcatattctgttcacttgcagaagtcccggcttagattccaatatcctttggacatgcagccccgaaatctcaactgcaacggacgaccgtacgccgcatttcagtttacccacaagtgtcttctcaagtttgcccatacgaagtgccacaccctttgtacgcaggacgtgccaggggatttgcgtatcctctgcacctgcaaattcaccccttctatgcgccgttggcacgaatttcggagttgtcaaatggacacgcggttacgatcatttgacctgggtgacgccacagcctcaacaagggaaagatggctcgaactatacatacccagcccattttcgtgatatcttcgcagtgggcttccatccaactaataattatattctgcgctttggtggacgtcgcggggttctggtctcggcggacacgcgtgccccattgccatcgtgggtgaatcttaaactcccatcaacgatcacccatattcagaatctcagtaacgagaatcaagtgttggttgctggtatacaaaactccctaggtgtatatgacatgcgcttcgctcgggagaagtcgagagaagaggaaacccgtcttgaggcggaatcatataagtcccaagtttctcggccgttgttccagtctaaaggctacgcttggcaaaaaggaagtcaagtaacacaatcaaaccacccaggccacaatagcagaagtcaaaaagaacacaggaaagatgaagacgtttgccgtccagttgtatcgttcgagaactaccggaataatgcacatatcgatattgggtttgcctacgacgtgtcaacgggtctcgtagccgctgcacaagacgacaagcccgggactgtcgcactgtattcagtccgtactggcggaaaagtccggacactcgacttcacaccccccggaatgacccggatgcaacaagcctcggcaccggttgtccgaagtctgcagtttcagacttttcctcgggatcatatgcctacgctctttgtaggcgctggagtagatgggggcgttactgcatactcgtttggagttgatgatttgaacgatgaagagtga

SEQ ID NO: 9899 - protein, 549 aa, Muscodor strobelii
  misc_feature: SGI Peptide ID NO. 563116
  misc_feature (1)..(548): NCBI GI: 46109088 Blast Desc: FG01426.1 [Gibberella zeae PH-1]
  misc_feature (1)..(548): NCBI GI: 261354502 Blast Desc: conserved [Verticillium albo-atrum VaMs.102]
  misc_feature (1)..(548): NCBI GI: 256730844 Blast Desc: NECHADRAFT_103014 [Nectria haematococca mpVI 77-13-4]
  misc_feature (1)..(543): NCBI GI: 85082290 Blast Desc: NCU01679 [Neurospora crassa OR74A] gi|28917965|gb|EAA27649.1| [Neurospora crassa OR74A]
  misc_feature (1)..(543): NCBI GI: 7800810 Blast Desc: related to myocyte-specific enhancer factor 2d [Neurospora crassa]
  misc_feature (1)..(540): NCBI GI: 116204921 Blast Desc: CHGG_10344 [Chaetomium globosum CBS 148.51] gi|88176472|gb|EAQ83940.1| CHGG_10344 [Chaetomium globosum CBS 148.51]
  misc_feature (5)..(100): NCBI GI: 156063062 Blast Desc: SS1G_01647 [Sclerotinia sclerotiorum 1980] gi|154696983|gb|EDN96721.1| SS1G_01647 [Sclerotinia sclerotiorum 1980]
  misc_feature (302)..(530): NCBI GI: 171689088 Blast Desc: protein product [Podospora anserina] gi|170944506|emb|CAP70617.1| protein product [Podospora anserina]
  misc_feature (252)..(488): NCBI GI: 156063062 Blast Desc: SS1G_01647 [Sclerotinia sclerotiorum 1980] gi|154696983|gb|EDN96721.1| SS1G_01647 [Sclerotinia sclerotiorum 1980]
  misc_feature (5)..(146): NCBI GI: 39971767 Blast Desc: [Magnaporthe grisea 70-15] gi|145019687|gb|EDK03915.1| [Magnaporthe grisea 70-15]
MNHSIPGYYYDTEKRRYFKVEKSKTAPTTAAWSAENVKRRKLDDAEAAAALRRLDLTKNRIKRARVLNEPLTGGFFAREHGEVWDDLQPACFAAGLKGKGSVPLSPPGFQGQVKHMYIDGQDDRTGMCTIWATVDERTLSTTYIPRSTDGRLDTRLLANYRLANQNSQAVYNEFVLNQLSDIGYDAHSNHILFTCRSPGLDSNILWTCSPEISTATDDRTPHFSLPTSVFSSLPIRSATPFVRRTCQGICVSSAPANSPLLCAVGTNFGVVKWTRGYDHLTWVTPQPQQGKDGSNYTYPAHFRDIFAVGFHPTNNYILRFGGRRGVLVSADTRAPLPSWVNLKLPSTITHIQNLSNENQVLVAGIQNSLGVYDMRFAREKSREEETRLEAESYKSQVSRPLFQSKGYAWQKGSQVTQSNHPGHNSRSQKEHRKDEDVCRPVVSFENYRNNAHIDIGFAYDVSTGLVAAAQDDKPGTVALYSVRTGGKVRTLDFTPPGMTRMQQASAPVVRSLQFQTFPRDHMPTLFVGAGVDGGVTAYSFGVDDLNDEE

SEQ ID NO: 9900 - DNA, 2121 bp, Muscodor strobelii
  misc_feature: SGI EST ID NO. CUFF.23407.0
  misc_feature: Variant of the nucleotide sequence at SEQ ID NO 9898
gcaggatccatggaaagctcgatactcattattcataatcacctttcagcatggatttcaattaagataaacctgtcatcgctaatgttttgaacgattaaaacatccgggcagttcattcactcaatgcaccgcattcgtggggcatgtgtccgtcatgaatcacagcattccaggctactactacgacactgagaaacgtcgctacttcaaggtcgagaagagtaagacggcgcctaccacagccgcctggtcagcggaaaacgtgaagaggcggaagctcgacgacgccgaggcagccgccgctctgcgtcggctagacttgaccaaaaatcgcatcaagcgtgctagggtgttgaatgagcctctcactggcggcttcttcgctcgcgagcatggagaggtctgggatgacctacagcccgcgtgctttgcagctggcttgaaggggaagggaagcgtaccacttagtcctccaggcttccaggggcaagtgaaacacatgtatattgacggtcaggatgatcggacaggaatgtgcacaatttgggcgactgttgacgagagaacactttcgactacatatattcctcgtagcacggacggccggtactagatcaaacgctcaacccttatgaatggagaacacggactaacaatctgtttcatgtgatgcagtcttgatacacgcctacttgcaaattaccgcctcgccaaccagaattctcaggccgtttacaatgagttcgtcttgaaccagttatctgatatcggatacgatgcacacagcaatcatattctgttcacttgcagaagtcccggcttagattccaatatcctttggacatgcagccccgaaatctcaactgcaacggacgaccgtacgccgcatttcagtttacccacaagtgtcttctcaagtttgcccatacgaagtgccacaccctttgtacgcaggacgtgccaggggatttgcgtatcctctgcacctgcaaattcaccccttctatgcgccgttggcacgaatttcggagttgtcaaatggacacgcggttacgatcatttgacctgggtgacgccacagcctcaacaagggaaagatggctcgaactatacatacccagcccattttcgtgatatcttcgcagtgggcttccatccaactaataattatattctgcgctttggtggacgtcgcggggttctggtctcggcggacacgcgtgccccattgccatcgtgggtgaatcttaaactcccatcaacgatcacccatattcagaatctcagtaacgagaatcaagtgttggttgctggtatacaaaactccctaggtgtatatgacatgcgcttcgctcgggagaagtcgagagaagaggaaacccgtcttgaggcggaatcatataagtcccaagtttctcggccgttgttccagtctaaaggctacgcttggcaaaaaggaagtcaagtaacacaatcaaaccacccaggccacaatagcagaagtcaaaaagaacacaggaaagatgaagacgtttgccgtccagttgtatcgttcgagaactaccggaataatgcacatatcgatattgggtttgcctacgacgtgtcaacgggtctcgtagccgctgcacaagacgacaagcccgggactgtcgcactgtattcagtccgtactggcggaaaagtccggacactcgacttcacaccccccggaatgacccggatgcaacaagcctcggcaccggttgtccgaagtctgcagtttcagacttttcctcgggatcatatgcctacgctctttgtaggcgctggagtagatgggggcgttactgcatactcgtttggagttgatgatttgaacgatgaagagtgaggcggtgttattatgcgctggggtcagcgcaaattacgatcaggtcttgatgctctactgtatcatattaaatacctttctagaaccctgaagcttaattaatgttatgataacggcaatggaactcggtgcttaattaatgtgatgaaggatgaagagagcatgaactgttagccacctctgggtcacatattggcatagaaaaggcatggagcagaggctgggaggttaaccttaaggtagag

SEQ ID NO: 9901 - DNA, 3399 bp, Muscodor strobelii
  misc_feature: SGI cDNA ID NO. 563117
  misc_feature: Elevated expression when VOC is produced
  misc_feature: Encodes the peptide sequence at SEQ ID NO 9902
atgagtttcggcttcagtgttggtgacattgttactatccttcagctggtcaagaaagtacgcagggactttctgggtgctcccgatcaattccggcatttcgctcaagagtttgtcatctccatatatctattctacacagataagctaaatctcggcagcctgggatctctgcaacatgctctcgtggatatcgagatgctggatgatggcgaatatgggtatggtaaaaccggagcgcttgaagtgcttaacgacaccatgaaacactgccacgaagtcttagaagattgccaaaatgcactccagcaatgctcactagagcctcgagataataggatcaaaggaaagatgagacgcgcgtggaatcggctaagatgggaacctagtgatatctctgagcttcgaggacgaatcacgtcgataatcaccacgctgaattttcagatcgaaagactgacttattcttacgtcaccaagcttgcaagtgggcagaatgagttagctcggggccagtctaaactactcaaggggcataaagaattctccgactggcaaaggcacagccaaaagcagacactctgtgactggctcgcgccagtggattttgcggttcgacatgcagatgtaatcagcaagcgtcaagacggtactggcaagtggcttctcgaattaccggaatatcaggactggtcgaacgcaaagatcaagagcgaagttttcttttgttatggcattcctggatcgggaaagacaatgattgcatcaatcgtggtgaatgatttgtacggacgtttccatgacgataaatctgtcgcagtctgccatctctttttcagctaccagaacatcagagaacagaagttggaagatatccttggcagtattctgcaacagcttgtccagcgcctcgtcaacattccccaggacctcaagctactacacagcagacatgaggagcagaggactagaccgtcttttgacgagcttcgccgatctctccattctactatagcaagttactcccaagttttcgtcgttgttgatgctcttgacgagtgcgaggcaaatatacaacagaggttcatatgtgaacttctgtatctttggtctcatcttcaagttaacgtgctcgcaacttctcgctttatcccacagcccatatcagagctcaaaggagtactgacagtagaagtccgcgcccatgacgacgatgttctcaaattcttggaggcaagaatgtacttgcttcccaaattcgtgtctaatgattttgctttacaagaggagattaaggcgagcattgtgaaacgcatcgatggcatgttcctactcgcagagctacatatcaattctttaagagatgagctcaacctaagatcactgcgtgctgcactagggagactcgcggcgggttcagatgcctatcgtcgtacttatgatgatgcaatgagtcgcattgagagccaagcacagagccgcaaagatcttgcgcttcgagtcttgatgtggatagtctttgctaagactccattaacagcagagcagctccaagatgccctcggcgttgatttggacgacacggctttcgacaaagacgcattgcctgatttcgacactataatttcttgttgctgtggacttgttgtctttgacaaacgaagcaatgcaatgcgacttgttcactatactgtgcaagagtatcttggtgaaaacgaagacaaatggttcccttctgcacattcgaagatcggcaggatatgtgttacatatatctcatacagaaattttggaaatgggccctgcttatccgacttcaacctcaagggccggttggaaatgtatccattctacagctacgcaagtcagttctggggagagcacgcgttgctcgactcgagttggggccattatctcaaatttctctctatgccggcccaatttcgcgcagctagccaagtattgatggtatatcatcgcaagttgatctatgaaattgaacaaccttccgatttaaaatcattttggcctgagaaagctagagaacgcgtcgatagtgtacccacgggtcttacgccccttcacatcgcagccttttttggacttgcagaaattgtcgacaagtttttaaaagattacgcgtcaagttcagctcctaccatgccaaaagatagttatggccagacgccggtaatatatgccattgaaaatggccatacagctgttgttaagctgatcatcggtcagagcgctgatactgattccacgggcacatcctggcggcgtagagctccaacggcagcaagaagtagtacgcaagagttcatcttgcaagacatactttttgatctcgactatactgcatcgatgctaacgccacttgagtacgccattcggcaacaccaagtcgacattgtgcagttacttctcgacgaaggcgccgaagtcaattctcagaatccacacagaacaccgctcatatatgctgtccagtatggaaacgaggcaatagtacggattcttctcaagaaaggggcagaaattgagcctaaaaattgcgatattccgccgtttgtgcatgcagtcgtggctggcaatgagtctatagtacggctactttttgaagaggcgcagagaatcaatgtcgaatatgtacgtacggcgctcgtgtatgctataaagaactcagatgagcggatggtgcgactacttttgggcaaaggggcggatgccaatctcagaacccatgaattaccaccacttttatgggctatcaatgagggacaagatattctggtcagcctgctcattgaacatgacgccaacgtcaactctatcagtagacttggcacaccactctgttacgctgctgagcgtggatatgagggcatagttcgaattctcatcaccaatggagccgaaatcaatcccagtaactggccagagacaccacttgattgtgccataaggggcaacaaagatgccgttgtagatctgattttccctgatccaactgagcagatagctcatccaagtcattggttctacaagcgattctcgtccgctacgaaaggctataagcacgaggcaatagtcgctctacttctcgagcatggcgcgaacgtcgatatattgcgcgatcagtacatcccattattctccggtgcgaagaatgatgatcactatgaaactatagcaagcctactttgcgcaaaacgctccagagcaagtacaacggctatgtccatggacgtggagctgggtgacagagacagcgatgaatggtccagatgcagtatgacggatgtcaacaacgagactgagtacgaaaatgtacgcgacgacaaccgaacattttgggatcggctcaatctcaatttaccaagacgtgtgaagtga

SEQ ID NO: 9902 - protein, 1132 aa, Muscodor strobelii
  misc_feature: SGI Peptide ID NO. 563117
  misc_feature (789)..(821): Pfam Id: PF00023 Pfam Desc: Ankyrin repeat
  misc_feature (726)..(758): Pfam Id: PF00023 Pfam Desc: Ankyrin repeat
  misc_feature (884)..(916): Pfam Id: PF00023 Pfam Desc: Ankyrin repeat
  misc_feature (948)..(980): Pfam Id: PF00023 Pfam Desc: Ankyrin repeat
  misc_feature (823)..(853): Pfam Id: PF00023 Pfam Desc: Ankyrin repeat
  misc_feature (951)..(980): Pfam Id: PF00023 Pfam Desc: Ankyrin repeat
  misc_feature (689)..(721): Pfam Id: PF00023 Pfam Desc: Ankyrin repeat
  misc_feature (1)..(994): NCBI GI: 255957133 Blast Desc: Pc21g23520 [Penicillium chrysogenum Wisconsin 54-1255] gi|211591030|emb|CAP97249.1| Pc21g23520 [Penicillium chrysogenum Wisconsin 54-1255]
  misc_feature (1)..(995): NCBI GI: 255939916 Blast Desc: Pc16g03680 [Penicillium chrysogenum Wisconsin 54-1255] gi|211585350|emb|CAP93038.1| Pc16g03680 [Penicillium chrysogenum Wisconsin 54-1255]
  misc_feature (1)..(1039): NCBI GI: 154313093 Blast Desc: BC1G_05548 [Botryotinia fuckeliana B05.10] gi|150849633|gb|EDN24826.1| BC1G_05548 [Botryotinia fuckeliana B05.10]
  misc_feature (196)..(973): NCBI GI: 115390338 Blast Desc: conserved [Aspergillus terreus NIH2624] gi|114195070|gb|EAU36770.1| conserved [Aspergillus terreus NIH2624]
  misc_feature (194)..(1079): NCBI GI: 238508580 Blast Desc: Pfs, NACHT and Ankyrin domain protein [Aspergillus flavus NRRL3357] gi|220688371|gb|EED44724.1| Pfs, NACHT and Ankyrin domain protein [Aspergillus flavus NRRL3357]
  misc_feature (186)..(999): NCBI GI: 225557065 Blast Desc: ankyrin repeat protein [Ajellomyces capsulatus G186AR]
  misc_feature (1)..(1056): NCBI GI: 145251379 Blast Desc: An15g06750 [Aspergillus niger] gi|134082735|emb|CAK42627.1| protein product [Aspergillus niger]
  misc_feature (189)..(1069): NCBI GI: 169782465 Blast Desc: [Aspergillus oryzae RIB40] gi|83774438|dbj|BAE64562.1| protein product [Aspergillus oryzae]
  misc_feature (1)..(960): NCBI GI: 212534788 Blast Desc: ankyrin repeat-containing protein, [Penicillium marneffei ATCC 18224] gi|210069949|gb|EEA24039.1| ankyrin repeat-containing protein, [Penicillium marneffei ATCC 18224]
  misc_feature (12)..(937): NCBI GI: 159123469 Blast Desc: Ankyrin repeat protein [Aspergillus fumigatus A1163]
  misc_feature: Useful for introducing or modulating the production of volatile compounds
MSFGFSVGDIVTILQLVKKVRRDFLGAPDQFRHFAQEFVISIYLFYTDKLNLGSLGSLQHALVDIEMLDDGEYGYGKTGALEVLNDTMKHCHEVLEDCQNALQQCSLEPRDNRIKGKMRRAWNRLRWEPSDISELRGRITSIITTLNFQIERLTYSYVTKLASGQNELARGQSKLLKGHKEFSDWQRHSQKQTLCDWLAPVDFAVRHADVISKRQDGTGKWLLELPEYQDWSNAKIKSEVFFCYGIPGSGKTMIASIVVNDLYGRFHDDKSVAVCHLFFSYQNIREQKLEDILGSILQQLVQRLVNIPQDLKLLHSRHEEQRTRPSFDELRRSLHSTIASYSQVFVVVDALDECEANIQQRFICELLYLWSHLQVNVLATSRFIPQPISELKGVLTVEVRAHDDDVLKFLEARMYLLPKFVSNDFALQEEIKASIVKRIDGMFLLAELHINSLRDELNLRSLRAALGRLAAGSDAYRRTYDDAMSRIESQAQSRKDLALRVLMWIVFAKTPLTAEQLQDALGVDLDDTAFDKDALPDFDTIISCCCGLVVFDKRSNAMRLVHYTVQEYLGENEDKWFPSAHSKIGRICVTYISYRNFGNGPCLSDFNLKGRLEMYPFYSYASQFWGEHALLDSSWGHYLKFLSMPAQFRAASQVLMVYHRKLIYEIEQPSDLKSFWPEKARERVDSVPTGLTPLHIAAFFGLAEIVDKFLKDYASSSAPTMPKDSYGQTPVIYAIENGHTAVVKLIIGQSADTDSTGTSWRRRAPTAARSSTQEFILQDILFDLDYTASMLTPLEYAIRQHQVDIVQLLLDEGAEVNSQNPHRTPLIYAVQYGNEAIVRILLKKGAEIEPKNCDIPPFVHAVVAGNESIVRLLFEEAQRINVEYVRTALVYAIKNSDERMVRLLLGKGADANLRTHELPPLLWAINEGQDILVSLLIEHDANVNSISRLGTPLCYAAERGYEGIVRILITNGAEINPSNWPETPLDCAIRGNKDAVVDLIFPDPTEQIAHPSHWFYKRFSSATKGYKHEAIVALLLEHGANVDILRDQYIPLFSGAKNDDHYETIASLLCAKRSRASTTAMSMDVELGDRDSDEWSRCSMTDVNNETEYENVRDDNRTFWDRLNLNLPRRVK

SEQ ID NO: 9903 - DNA, 3733 bp, Muscodor strobelii
  misc_feature: SGI EST ID NO. CUFF.23411.0
  misc_feature: Variant of the nucleotide sequence at SEQ ID NO 9901
cctagatcagcattatagactgccatagagtctctctccttcttcgaaatgcgtgcgcattcaaccatcatctcttagcatcatagattgtctatcgatcatcggtaacgaaacatgagtttcggcttcagtgttggtgacattgttactatccttcagctggtcaagaaagtacgcagggactttctgggtgctcccgatcaattccggcatttcgctcaagacctgggatctctgcaacatgctctcgtggatatcgagatgctggatgatggcgaatatgggtatggtaaaaccggagcgcttgaagtgcttaacgacaccatgaaacactgccacgaagtcttagaagattgccaaaatgcactccagcaatgctcactagagcctcgagataataggatcaaaggaaagatgagacgcgcgtggaatcggctaagatgggaacctagtgatatctctgagcttcgaggacgaatcacgtcgataatcaccacgctgaattttcagatcgaaagactgacttattcttacgtcaccaagcttgcaagtgggcagaatgagttagctcggggccagtctaaactactcaaggggcataaagaattctccgactggcaaaggcacagccaaaagcagacactctgtgactggctcgcgccagtggattttgcggttcgacatgcagatgtaatcagcaagcgtcaagacggtactggcaagtggcttctcgaattaccggaatatcaggactggtcgaacgcaaagatcaagagcgaagttttcttttgttatggcattcctggatcgggaaagacaatgattgcatcaatcgtggtgaatgatttgtacggacgtttccatgacgataaatctgtcgcagtctgccatctctttttcagctaccagaacatcagagaacagaagttggaagatatccttggcagtattctgcaacagcttgtccagcgcctcgtcaacattccccaggacctcaagctactacacagcagacatgaggagcagaggactagaccgtcttttgacgagcttcgccgatctctccattctactatagcaagttactcccaagttttcgtcgttgttgatgctcttgacgagtgcgaggcaaatatacaacagaggttcatatgtgaacttctgtatctttggtctcatcttcaagttaacgtgctcgcaacttctcgctttatcccacagcccatatcagagctcaaaggagtactgacagtagaagtccgcgcccatgacgacgatgttctcaaattcttggaggcaagaatgtacttgcttcccaaattcgtgtctaatgattttgctttacaagaggagattaaggcgagcattgtgaaacgcatcgatggcatgttcctactcgcagagctacatatcaattctttaagagatgagctcaacctaagatcactgcgtgctgcactagggagactcgcggcgggttcagatgcctatcgtcgtacttatgatgatgcaatgagtcgcattgagagccaagcacagagccgcaaagatcttgcgcttcgagtcttgatgtggatagtctttgctaagactccattaacagcagagcagctccaagatgccctcggcgttgatttggacgacacggctttcgacaaagacgcattgcctgatttcgacactataatttcttgttgctgtggacttgttgtctttgacaaacgaagcaatgcaatgcgacttgttcactatactgtgcaagagtatcttggtgaaaacgaagacaaatggttcccttctgcacattcgaagatcggcaggatatgtgttacatatatctcatacagaaattttggaaatgggccctgcttatccgacttcaacctcaagggccggttggaaatgtatccattctacagctacgcaagtcagttctggggagagcacgcgttgctcgactcgagttggggccattatctcaaatttctctctatgccggcccaatttcgcgcagctagccaagtattgatggtatatcatcgcaagttgatctatgaaattgaacaaccttccgatttaaaatcattttggcctgagaaagctagagaacgcgtcgatagtgtacccacgggtcttacgccccttcacatcgcagccttttttggacttgcagaaattgtcgacaagtttttaaaagattacgcgtcaagttcagctcctaccatgccaaaagatagttatggccagacgccggtaatatatgccattgaaaatggccatacagctgttgttaagctgatcatcggtcagagcgctgatactgattccacgggcacatcctggcggcgtagagctccaacggcagcaagaagtagtacgcaagagttcatcttgcaagacatactttttgatctcgactatactgcatcgatgctaacgccacttgagtacgccattcggcaacaccaagtcgacattgtgcagttacttctcgacgaaggcgccgaagtcaattctcagaatccacacagaacaccgctcatatatgctgtccagtatggaaacgaggcaatagtacggattcttctcaagaaaggggcagaaattgagcctaaaaattgcgatattccgccgtttgtgcatgcagtcgtggctggcaatgagtctatagtacggctactttttgaagaggcgcagagaatcaatgtcgaatatgtacgtacggcgctcgtgtatgctataaagaactcagatgagcggatggtgcgactacttttgggcaaaggggcggatgccaatctcagaacccatgaattaccaccacttttatgggctatcaatgagggacaagatattctggtcagcctgctcattgaacatgacgccaacgtcaactctatcagtagacttggcacaccactctgttacgctgctgagcgtggatatgagggcatagttcgaattctcatcaccaatggagccgaaatcaatcccagtaactggccagagacaccacttgattgtgccataaggggcaacaaagatgccgttgtagatctgattttccctgatccaactgagcagatagctcatccaagtcattggttctacaagcgattctcgtccgctacgaaaggctataagcacgaggcaatagtcgctctacttctcgagcatggcgcgaacgtcgatatattgcgcgatcagtacatcccattattctccggtgcgaagaatgatgatcactatgaaactatagcaagcctactttgcgcaaaacgctccagagcaagtacaacggctatgtccatggacgtggagctgggtgacagagacagcgatgaatggtccagatgcagtatgacggatgtcaacaacgagactgagtacgaaaatgtacgcgacgacaaccgaacattttgggatcggctcaatctcaatttaccaagacgtgtgaagtgataatcagtagaagatgatactttggcaaaccgtataggatgtgcatataggagagtttacggataaatcttgagttgcttagcgccatgatggcgcacgtggttctgatgggacaaggctcaaccccaaccatcttctgtgtgttacttcacagatctccttgctattttttctatattctacccagcacggattcagtaggtcagttagtgggcaataaaaagtcaaattaagcagctctactatctacgtcaagattaacgagttccat

SEQ ID NO: 9904 - DNA, 1761 bp, Muscodor strobelii
  misc_feature: SGI cDNA ID NO. 563118
  misc_feature: Reduced expression when VOC is produced
  misc_feature: Encodes the peptide sequence at SEQ ID NO 9905
atgcttccctccacatcatccaatcctcatcccgggtccgctgcctccgccgatcctagctttactcaccgtcctgctcctgggtacgctatcacatcgaatccatccaggcctatacatccttcggccgccaccgtcaatgccgaagccgggcccggggctctttctaacactgcagccgcaactacttacaaacgtgggccgtcttcatctgttgagggccagtcacccgagtccggcacatctcagttcgggtcccgaggcaatgtctcagcccttcccgaggaccagcgtaacaagaaacgccgcaccgggcccgggtcaaggggcgtagcaaacttgactcctgaacagctggctaaaaagcgtgcgaacgatcgagaggctcagagggctatccgagaaaggaccaagaatcaaattgaaactcttgaaaagaaaattgaggatttgacatcacaacgaccctatcaagaacttcaaagagtgatccgagagaaagaagctgtcgaacgagagaacgaagagattaaaggtcgtctagcatcggtcatctcacttttacagccctatttatctaatcagccagcgagagggcaatacgtttccccaggtccatcatttacccctgtgccatccgttcaggaacctcagcctactacagcctactctgcacaaaacgtatcgacaccgagaagtactgactccccaggacctggtaatatagagctgtcatttccacggcccttttcccaatccgagtctcaccaagtcaagccgtcaggacagctttcagccatgggcaatattggatttcttctagatggttcacagaatgtgaaaagacttcagacgggagtgaatggcgctcaagatacgccaaactttcaccacttgcctatgaaacacgcctggaatgacggtgcagtttccgtagatcgagatggttcaaatgcgagtgttatgtcacaatcaccaccacagccatcaggtcagctgcacgttaattacgatgctgggtcatcattgtcaaggcctgttccacaggtggttatgcccaaaaatccattgaataacttggctccaacgtgtgctctggatcacatacttcttgactttctccatgaacgccaccaacgtgtcgctgagggtgtttcacctgcggaagccgtagggccgagatatccttccgtctcgtctttactaaatccccagcatagcgtctacgcccatccactgtccaaggtcttcacggatgtcctaggcacgtttccagatatcagtcagctacctgagaaggtcgcagttctctacatcatgttcttggtcatgcgatggcaggttagcccaactaaagaaaactgggagttgatgccaccttgggcgcgacctcatcaatcgcaaatggaagtaccacacccagcgtggatggacaatctgccatttcctgcaatgcgtgacaaaatcgcacgagaatggaaccctaccgagttcgcattcgaagaattcttcattcctttcaccacaacgctctcactcaactggccctatgaagcaaccgatgctctgctcagaggtccagatggcgccgagattattatgaaccccgtctttgaacgacatctgcgcaataataataattggacactaggaccagcctttgataaggctttcccaagtctccgaggtctttataatctgaagatagacggcgacacacctccttcagatggcgctagcagtgtccgttcgaggacatga

SEQ ID NO: 9905 - protein, 586 aa, Muscodor strobelii
  misc_feature: SGI Peptide ID NO. 563118
  misc_feature (88)..(567): NCBI GI: 256730623 Blast Desc: NECHADRAFT_74330 [Nectria haematococca mpVI 77-13-4]
  misc_feature (95)..(580): NCBI GI: 46109092 Blast Desc: FG01428.1 [Gibberella zeae PH-1]
  misc_feature (98)..(561): NCBI GI: 240272999 Blast Desc: bZIP transcription factor [Ajellomyces capsulatus H143]
  misc_feature (100)..(561): NCBI GI: 145240213 Blast Desc: An08g06380 [Aspergillus niger] gi|134077267|emb|CAK45608.1| protein product [Aspergillus niger]
  misc_feature (98)..(561): NCBI GI: 225557980 Blast Desc: conserved [Ajellomyces capsulatus G186AR]
  misc_feature (100)..(568): NCBI GI: 119495279 Blast Desc: bZIP transcription factor, [Neosartorya fischeri NRRL 181] gi|119412590|gb|EAW22531.1| bZIP transcription factor, [Neosartorya fischeri NRRL 181]
  misc_feature (100)..(561): NCBI GI: 115491981 Blast Desc: ATEG_00532 [Aspergillus terreus NIH2624] gi|114197478|gb|EAU39178.1| ATEG_00532 [Aspergillus terreus NIH2624]
  misc_feature (100)..(568): NCBI GI: 159131456 Blast Desc: bZIP transcription factor, [Aspergillus fumigatus A1163]
  misc_feature (100)..(568): NCBI GI: 70995892 Blast Desc: bZIP transcription factor [Aspergillus fumigatus Af293] gi|42820738|emb|CAF32051.1| transcription factor [Aspergillus fumigatus] gi|66850336|gb|EAL90663.1| bZIP factor,
  misc_feature (100)..(568): NCBI GI: 67516779 Blast Desc: AN0671.2 [Aspergillus nidulans FGSC A4] gi|40746291|gb|EAA65447.1| AN0671.2 [Aspergillus nidulans FGSC A4] gi|259489060|tpe|CBF89018.1| TPA: bZIP transcription factor
  misc_feature: Useful for introducing or modulating the production of volatile compounds
MLPSTSSNPHPGSAASADPSFTHRPAPGYAITSNPSRPIHPSAATVNAEAGPGALSNTAAATTYKRGPSSSVEGQSPESGTSQFGSRGNVSALPEDQRNKKRRTGPGSRGVANLTPEQLAKKRANDREAQRAIRERTKNQIETLEKKIEDLTSQRPYQELQRVIREKEAVERENEEIKGRLASVISLLQPYLSNQPARGQYVSPGPSFTPVPSVQEPQPTTAYSAQNVSTPRSTDSPGPGNIELSFPRPFSQSESHQVKPSGQLSAMGNIGFLLDGSQNVKRLQTGVNGAQDTPNFHHLPMKHAWNDGAVSVDRDGSNASVMSQSPPQPSGQLHVNYDAGSSLSRPVPQVVMPKNPLNNLAPTCALDHILLDFLHERHQRVAEGVSPAEAVGPRYPSVSSLLNPQHSVYAHPLSKVFTDVLGTFPDISQLPEKVAVLYIMFLVMRWQVSPTKENWELMPPWARPHQSQMEVPHPAWMDNLPFPAMRDKIAREWNPTEFAFEEFFIPFTTTLSLNWPYEATDALLRGPDGAEIIMNPVFERHLRNNNNWTLGPAFDKAFPSLRGLYNLKIDGDTPPSDGASSVRSRT

SEQ ID NO: 9906 - DNA, 3144 bp, Muscodor strobelii
  misc_feature: SGI EST ID NO. CUFF.23442.0
  misc_feature: Variant of the nucleotide sequence at SEQ ID NO 9904
gacacatcaaatagccccgtctcaattttctcctaactcgagaaaaagacgagatggattcaacctatcgtcccacctcccgaagcaatgaatcattgaagctctacatcccgcgaaacttcgactcgcgcgtgtccacatttcccctctacaacgaccgggttaggccgtggcgagtaaggctacaggcctattcacctggtagcatccgtcgcgctgactctgttgcctcctccttcccccctaattgtacagactcgcgcaattcccacgaccgattgcccccattccgacaagatcgctcacccgcatctgatactgctgatgatccattggatgcccattgcacaatcctgctgaatcagattctccgattgcaagtcctgtcgtgacaaatgccattggcgtttgccccggccagccctgtcggcattcctacagccatcgaataagcgcgcccaattcttcggcagatcttggtcgagacccagtcagccaggttcgctatccgtcaaccgaacctgtctccagccgccccccaatcaacccaccggctaaccggcgccggccgcagcttccatcacgcacatgattttgtcgcccacttggctcatatgtgatctgtgatcccgttccttgcgattggggccgtgtacttcgacgtgaccagtacctcaaaccccgctgtcgcgtgggcagggcagggctgatccagggcgttggcgcctgttggagagacggaacgggacgtgacctggcgtgacgtgacgttgatttcgtgctcgctatctataatagtgaaccacttgtataccattatctctagattaattatgcttccctccacatcatccaatcctcatcccgggtccgctgcctccgccgatcctagctttactcaccgtcctgctcctgggtacgctatcacatcgaatccatccaggcctatacatccttcggccgccaccgtcaatgccgaagccgggcccggggctctttctaacactgcagccgcaactacttacaaacgtgggccgtcttcatctgttgagggccagtcacccgagtccggcacatctcagttcgggtcccgaggcaatgtctcagcccttcccgaggaccagcgtaacaagaaacgccgcaccgggcccgggtcaaggggcgtagcaaacttgactcctgaacagctggctaaaaagcgtgcgaacgatcgagaggctcagagggctatccgagaaaggaccaagaatcaaattgaaactcttgaaaagaaaattgaggatttgacatcacaacgaccctatcaagaacttcaaagagtgatccgagagaaagaagctgtcgaacgagagaacgaagagattaaaggtcgtctagcatcggtcatctcacttttacagccctatttatctaatcagccagcgagagggcaatacgtttccccaggtccatcatttacccctgtgccatccgttcaggaacctcagcctactacagcctactctgcacaaaacgtatcgacaccgagaagtactgactccccaggacctggtaatatagagctgtcatttccacggcccttttcccaatccgagtctcaccaagtcaagccgtcaggacagctttcagccatgggcaatattggatttcttctagatggttcacagaatgtgaaaagacttcagacgggagtgaatggcgctcaagatacgccaaactttcaccacttgcctatgaaacacgcctggaatgacggtgcagtttccgtagatcgagatggttcaaatgcgagtgttatgtcacaatcaccaccacagccatcaggtcagctgcacgttaattacgatgctgggtcatcattgtcaaggcctgttccacaggtggttatgcccaaaaatccattgaataacttggctccaacgtgtgctctggatcacatacttcttgactttctccatgaacgccaccaacgtgtcgctgagggtgtttcacctgcggaagccgtagggccgagatatccttccgtctcgtctttactaaatccccagcatagcgtctacgcccatccactgtccaaggtcttcacggatgtcctaggcacgtttccagatatcagtcagctacctgagaaggtcgcagttctctacatcatgttcttggtcatgcgatggcaggttagcccaactaaagaaaactgggagttgatgccaccttgggcgcgacctcatcaatcgcaaatggaagtaccacacccagcgtggatggacaatctgccatttcctgcaatgcgtgacaaaatcgcacgagaatggaaccctaccgagttcgcattcgaagaattcttcattcctttcaccacaacgctctcactcaactggccctatgaagcaaccgatgctctgctcagaggtccagatggcgccgagattattatgaaccccgtctttgaacgacatctgcgcaataataataattggacactaggaccagcctttgataaggctttcccaagtctccgaggtctttataatctgaagatagacggcgacacacctccttcagatggcgctagcagtgtccgttcgaggacatgagactagctctggtttagtttttggcctgtttattaaagtatgaggcgtttttggagcgctgctgttcgaaactttttttgtcacacgtgaccacggtttccacggaatcctcgatctgagggtatgaggcatacgatgtcgacaactggcggggaaatgtcataaaaaagttttcagttcaattatgcaagcgtgttgaatcaatgtatatacctcaggaatgtaaacagctggctctggtatgaagtggaggagtcgggcgttcaaagcctgatttaagctaatatcgcgaattgtattcgactaggtggtgtccaggcagggatggactgggtatataccgatatgctgtatgcatcgttatgctatgcgctataatggatgggtttggaatggaggaacggaaaaggatatctaggaagttattggagcgggtttgcgacgctatacttgctgagatgatgtagatgatgaatagatgttgttaaggcttattgaagagcgagatcgcaaggtgtagcttgctttaattgtttttgccgggaattag

SEQ ID NO: 9907 - DNA, 3402 bp, Muscodor strobelii
  misc_feature: SGI cDNA ID NO. 563119
  misc_feature: Encodes the peptide sequence at SEQ ID NO 9908
atgtcgctcttcgccaacaaagcgtcagcgcagcccgcgtcttcaggtagcagcctctttggcagcacggccgggcagcagcaaccatccgccacgcccagcttgttcggcgccagcaccgcgcagaacacgacacagaaccagagcactgcacccaaaagcttattcggagcagcgcagccgcagacccagactcagactggtggaggcttgttcggaagctccaccgcgcagaacacgcaggcgcctgccacgggtggcggtctctttggcgcgaccaatacacaaccccaacaacaacaacagacccagccggcgagcagtctgtttggaggctccactgccgcggctacacaacaacccaaacctggtggcctcggcctctttggcgcgactacaacccaagcccaaccctcaggtttgggacttgcaacttcgactgctaatcaaaatgccggcacctcaagcctgctaggtgccagccaacaacaacccgctgcggccgctaatggtggtgcgttgccccaggggaatacgacaggctacttcgacagtctcctagccaagagcaaaaagcaggctcaaggcgaatcccctctcgaggacctccctagcctccagctcggcctcggcgacctacgaacgcgaatccgaaagctgggccctaacaatgaccctcttcaacatggcaaggcccagtacatgcttgccgcgtccggtgttgacccgggggctgccgtgaaagatctgaagttcttcagcgcccacaatgccagccgcatcgaccggccgacctacgcccccgccaccaacgagatcgacgtcgaagcctaccttgcgaacctgcagtcgaagacgacgctgagcatgatcgccgacggactcgagaggtcagctagagacttcgacaactttttggaggacaacatgaccacagagtgggaggctcagagaaggcgcatttatgagcattttggcatcaagaccagagatgaaggttcgcctgatgtgaaccgagaaaccactggtggcttcggccgatccagacgtaaccccaaagcctcgcgatctgctgccgccagtgtcaagggaagcacctttggtcgatcaactctgcaaaagtcggtgcttggcacgcccagcaaaatcggacctcaccaggctgaattcaaggatgtcgaggatgctacaggaagcccggctgctgccgagacgcacgcctctgtcgatgacagattcgtcagggagaagcaagtcaaactcgcagaacgtattcgcaacctcaacttgtcacgattagaaaaaacgccctatcctattttacacgaactggcacaagttgaaagcacatccggcgatagacatgcgcaacagcttgtggatgcttaccacgccgccatgtctattgtcggcgaagactccgccgccgatactttcaccggcgatagtacggctcgagaacgccaattcaaggacaactacctagatttgaacgataagtccgtaggatcgatacagatcaggaaacgcattctcgacggagccaatcgatttctggagaagaaattcttcaccgaggtggaaagtgtgattgctaagcaccctcgcgaagccgctcttggtggacgaccagacgtcgcgagcaagatacgggcatacgtacgtttacgacatatccgcaaggacctggttccagacaatattgaactgcaagagcacaacggagaattcatttgggcaatcatattctttttgctacgatcaggccacgttgatgaggccgttcaatatgttaagagcaacgccacaactttcaggacgatagaccgtaatttcggtacctacctccacgaatacggcgctagtccagaccgtcgattgcgacgtcaaatgcaggatcgttgcaacaatgagtatacccagagagcacgtaacgctgccgaaaactcaatcgacccctatcgcatggcttgctacaaagtcgtgggacgatgcgacgtcggtaaccgcagcctcgaccatctaaacacagaagtcgacgattgggtctggctccagttcaacctagcccgcgagaatgacaaaactacggaagtcgccggcgaatcgtatggcctgcaggatctgcgtgctagcatcaaagaaattggtctgaagcacttcccgaagaatccttccgaggacgctaacagtaacttcggcatgttcttctatctccagattcttgctggcatgttcgagcaggccatcgcctacctatacaccttttcctacgtcgacgcgatccactttgccattgcacttgagttctacggtctcattcgcccgtctgatccatggacaacttcagacaatctgctgtcacatgatactcgccagaagccgcaactgagctttggtcgcatgttgggctactatacaagagatttccgagctgccgatgtggcttccgctgtagattaccttaccctcatctgcctcaatgccgatctaggtagcgaggctggtcgccagcaagcggagctgtgtcacgttgccttgcgagaactggttcttgaaactagagaattcagtaagctgattggtgacatcagacctgatggacggcgcatcatcggactaatcgaggaacgtggacctctgatcggtctgagggaagaagacgactttgtcaagacggtcacgcttcaagccgcccgatttgctgacgacaatggaagaacaacggatgccgttctattataccaccttgctggtgattatgacagcgttgtcacgatcgtcagccgtgcactcagcgaggcaatttcgcttgagatcggcgaagatcctatgcggcttatgcctgtcaagcctcgggccacaggcagagaggccgaggctcaacctggtagcagcctcagtcttgcttccattgatgaccctatccagttggctatgacgatgatgtcgatgtacgagaaggacgctatgttttcgaccaagattgcggaccagaacagaagagcttgtcatattctactagcgatgagcgacattaagggcctcgtgggttctggacagtggcctgaagctctagacaaaatccgatccctagagatcctacccctagaagccaacggcgacgcggccaaagtgcgaatctacgcgtctaagtttgccgggctatcgcaggccgtggccatcaatgtgccgaacctactgatgtggacgatcacgtgctgcatgagacagagggagcgactgttgaatggacagttcagcgggaatgagggcacgagacgcatgatgtgtgataatcttaagcagatcagtatggaccttacgacttacacgagtcagctgagatataggtttccgccgcatttgctggaggcgcttgctaaggcttctgctgattga

SEQ ID NO: 9908 - protein, 1133 aa, Muscodor strobelii
  misc_feature: SGI Peptide ID NO. 563119
  misc_feature (486)..(777): Pfam Id: PF04097 Pfam Desc: Nucleoporin interacting component
  misc_feature (107)..(1133): NCBI GI: 154273016 Blast Desc: conserved [Ajellomyces capsulatus NAm1] gi|150415872|gb|EDN11216.1| conserved [Ajellomyces capsulatus NAm1]
  misc_feature (102)..(1133): NCBI GI: 240281296 Blast Desc: nucleoporin-interacting protein NIC96 [Ajellomyces capsulatus H143]
  misc_feature (106)..(1133): NCBI GI: 242794411 Blast Desc: nuclear pore protein (Nic96), [Talaromyces stipitatus ATCC 10500] gi|218718955|gb|EED18375.1| nuclear pore protein (Nic96), [Talaromyces stipitatus ATCC 10500]
  misc_feature (17)..(1133): NCBI GI: 169599440 Blast Desc: SNOG_02541 [Phaeosphaeria nodorum SN15] gi|111069633|gb|EAT90753.1| SNOG_02541 [Phaeosphaeria nodorum SN15]
  misc_feature (64)..(1133): NCBI GI: 119179571 Blast Desc: CIMG_08519 [Coccidioides immitis RS]
  misc_feature (176)..(1133): NCBI GI: 239609084 Blast Desc: nuclear pore protein [Ajellomyces dermatitidis ER-3]
  misc_feature (176)..(1133): NCBI GI: 261188101 Blast Desc: nuclear pore protein [Ajellomyces dermatitidis SLH14081] gi|239593342|gb|EEQ75923.1| nuclear pore protein [Ajellomyces dermatitidis SLH14081]
  misc_feature (106)..(1133): NCBI GI: 169784125 Blast Desc: [Aspergillus oryzae RIB40] gi|83775269|dbj|BAE65391.1| protein product [Aspergillus oryzae]
  misc_feature (75)..(1133): NCBI GI: 212535944 Blast Desc: nuclear pore protein (Nic96), [Penicillium marneffei ATCC 18224] gi|210070527|gb|EEA24617.1| nuclear pore protein (Nic96), [Penicillium marneffei ATCC 18224]
  misc_feature (103)..(1133): NCBI GI: 255935951 Blast Desc: Pc13g05680 [Penicillium chrysogenum Wisconsin 54-1255] gi|211583622|emb|CAP91637.1| Pc13g05680 [Penicillium chrysogenum Wisconsin 54-1255]
MSLFANKASAQPASSGSSLFGSTAGQQQPSATPSLFGASTAQNTTQNQSTAPKSLFGAAQPQTQTQTGGGLFGSSTAQNTQAPATGGGLFGATNTQPQQQQQTQPASSLFGGSTAAATQQPKPGGLGLFGATTTQAQPSGLGLATSTANQNAGTSSLLGASQQQPAAAANGGALPQGNTTGYFDSLLAKSKKQAQGESPLEDLPSLQLGLGDLRTRIRKLGPNNDPLQHGKAQYMLAASGVDPGAAVKDLKFFSAHNASRIDRPTYAPATNEIDVEAYLANLQSKTTLSMIADGLERSARDFDNFLEDNMTTEWEAQRRRIYEHFGIKTRDEGSPDVNRETTGGFGRSRRNPKASRSAAASVKGSTFGRSTLQKSVLGTPSKIGPHQAEFKDVEDATGSPAAAETHASVDDRFVREKQVKLAERIRNLNLSRLEKTPYPILHELAQVESTSGDRHAQQLVDAYHAAMSIVGEDSAADTFTGDSTARERQFKDNYLDLNDKSVGSIQIRKRILDGANRFLEKKFFTEVESVIAKHPREAALGGRPDVASKIRAYVRLRHIRKDLVPDNIELQEHNGEFIWAIIFFLLRSGHVDEAVQYVKSNATTFRTIDRNFGTYLHEYGASPDRRLRRQMQDRCNNEYTQRARNAAENSIDPYRMACYKVVGRCDVGNRSLDHLNTEVDDWVWLQFNLARENDKTTEVAGESYGLQDLRASIKEIGLKHFPKNPSEDANSNFGMFFYLQILAGMFEQAIAYLYTFSYVDAIHFAIALEFYGLIRPSDPWTTSDNLLSHDTRQKPQLSFGRMLGYYTRDFRAADVASAVDYLTLICLNADLGSEAGRQQAELCHVALRELVLETREFSKLIGDIRPDGRRIIGLIEERGPLIGLREEDDFVKTVTLQAARFADDNGRTTDAVLLYHLAGDYDSVVTIVSRALSEAISLEIGEDPMRLMPVKPRATGREAEAQPGSSLSLASIDDPIQLAMTMMSMYEKDAMFSTKIADQNRRACHILLAMSDIKGLVGSGQWPEALDKIRSLEILPLEANGDAAKVRIYASKFAGLSQAVAINVPNLLMWTITCCMRQRERLLNGQFSGNEGTRRMMCDNLKQISMDLTTYTSQLRYRFPPHLLEALAKASAD

SEQ ID NO: 9909 - DNA, 3890 bp, Muscodor strobelii
  misc_feature: SGI EST ID NO. CUFF.23451.0
  misc_feature: Variant of the nucleotide sequence at SEQ ID NO 9907
cggccaccaccaggtagctctcgcgcgccgtgtgcaattgacgcccttgctagcaacccagcaagtccagactgccggagttctgtgcaagagtcctacatcgccgacatcatcgttcgacgtctttgcgcggccaacatgtcgctcttcgccaacaaagcgtcagcgcagcccgcgtcttcaggtagcagcctctttggcagcacggccgggcagcagcaaccatccgccacgcccagcttgttcggcgccagcaccgcgcagaacacgacacagaaccagagcactgcacccaaaagcttattcggagcagcgcagccgcagacccagactcagactggtggaggcttgttcggaagctccaccgcgcagaacacgcaggcgcctgccacgggtggcggtctctttggcgcgaccaatacacaaccccaacaacaacaacagacccagccggcgagcagtctgtttggaggctccactgccgcggctacacaacaacccaaacctggtggcctcggcctctttggcgcgactacaacccaagcccaaccctcaggtttgggacttgcaacttcgactgctaatcaaaatgccggcacctcaagcctgctaggtgccagccaacaacaacccgctgcggccgctaatggtggtgcgttgccccaggggaatacgacaggctacttcgacagtctcctagccaagagcaaaaagcaggctcaaggcgaatcccctctcgaggacctccctagcctccagctcggcctcggcgacctacgaacgcgaatccgaaagctgggccctaacaatgaccctcttcaacatggcaaggcccagtacatgcttgccgcgtccggtgttgacccgggggctgccgtgaaagatctgaagttcttcagcgcccacaatgccagccgcatcgaccggccgacctacgcccccgccaccaacgagatcgacgtcgaagcctaccttgcgaacctgcagtcgaagacgacgctgagcatgatcgccgacggactcgagaggtcagctagagacttcgacaactttttggaggacaacatgaccacagagtgggaggctcagagaaggcgcatttatgagcattttggcatcaagaccagagatgaaggttcgcctgatgtgaaccgagaaaccactggtggcttcggccgatccagacgtaaccccaaagcctcgcgatctgctgccgccagtgtcaagggaagcacctttggtcgatcaactctgcaaaagtcggtgcttggcacgcccagcaaaatcggacctcaccaggctgaattcaaggatgtcgaggatgctacaggaagcccggctgctgccgagacgcacgcctctgtcgatgacagattcgtcagggagaagcaagtcaaactcgcagaacgtattcgcaacctcaacttgtcacgattagaaaaaacgccctatcctattttacacgaactggcacaagttgaaagcacatccggcgatagacatgcgcaacagcttgtggatgcttaccacgccgccatgtctattgtcggcgaagactccgccgccgatactttcaccggcgatagtacggctcgagaacgccaattcaaggacaactacctagatttgaacgataagtccgtaggatcgatacagatcaggaaacgcattctcgacggagccaatcgatttctggagaagaaattcttcaccgaggtggaaagtgtgattgctaagcaccctcgcgaagccgctcttggtggacgaccagacgtcgcgagcaagatacgggcatacgtacgtttacgacatatccgcaaggacctggttccagacaatattgaactgcaagagcacaacggagaattcatttgggcaatcatattctttttgctacgatcaggccacgttgatgaggccgttcaatatgttaagagcaacgccacaactttcaggacgatagaccgtaatttcggtacctacctccacgaatacggcgctagtccagaccgtcgattgcgacgtcaaatgcaggatcgttgcaacaatgagtatacccagagagcacgtaacgctgccgaaaactcaatcgacccctatcgcatggcttgctacaaagtcgtgggacgatgcgacgtcggtaaccgcagcctcgaccatctaaacacagaagtcgacgattgggtctggctccagttcaacctagcccgcgagaatgacaaaactacggaagtcgccggcgaatcgtatggcctgcaggatctgcgtgctagcatcaaagaaattggtctgaagcacttcccgaagaatccttccgaggacgctaacagtaacttcggcatgttcttctatctccagattcttgctggcatgttcgagcaggccatcgcctacctatacaccttttcctacgtcgacgcgatccactttgccattgcacttgagttctacggtctcattcgcccgtctgatccatggacaacttcagacaatctgctgtcacatgatactcgccagaagccgcaactgagctttggtcgcatgttgggctactatacaagagatttccgagctgccgatgtggcttccgctgtagattaccttaccctcatctgcctcaatgccgatctaggtagcgaggctggtcgccagcaagcggagctgtgtcacgttgccttgcgagaactggttcttgaaactagagaattcagtaagctgattggtgacatcagacctgatggacggcgcatcatcggactaatcgaggaacgtggacctctgatcggtctgagggaagaagacgactttgtcaagacggtcacgcttcaagccgcccgatttgctgacgacaatggaagaacaacggatgccgttctattataccaccttgctggtgattatgacagcgttgtcacgatcgtcagccgtgcactcagcgaggcaatttcgcttgagatcggcgaagatcctatgcggcttatgcctgtcaagcctcgggccacaggcagagaggccgaggctcaacctggtagcagcctcagtcttgcttccattgatgaccctatccagttggctatgacgatgatgtcgatgtacgagaaggacgctatgttttcgaccaagattgcggaccagaacagaagagcttgtcatattctactagcgatgagcgacattaagggcctcgtgggttctggacagtggcctgaagctctagacaaaatccgatccctagagatcctacccctagaagccaacggcgacgcggccaaagtgcgaatctacgcgtctaagtttgccgggctatcgcaggccgtggccatcaatgtgccgaacctactgatgtggacgatcacgtgctgcatgagacagagggagcgactgttgaatggacagttcagcgggaatgagggcacgagacgcatgatgtgtgataatcttaagcagatcagtatggaccttacgacttacacgagtcagctgagatataggtttccgccgcatttgctggaggcgcttgctaaggcttctgctgattgaggatgatggggttgagagggtgggggtttgggggggattaggaggagggaggaggatatgtatatgttagggagaggaagatgatgggtagtattgtgtgttgagtagtagagtgagactcagaccacgcgtgtagcatgagattgatcaggtcttgtgtagcggagtaaaaagtatgggattgagaaatctggttgtactatgctgctatattccaccttgcaactagtctgtgccacagaggcagagaactggtacatgggcgattgttacggcttcccggaaatcaataagactgtacagacgctcaaaatctgaggatctgcttcatttcgcttaaagaatccatt

SEQ ID NO: 9910 - DNA, 1788 bp, Muscodor strobelii
  misc_feature: SGI cDNA ID NO. 563120
  misc_feature: Encodes the peptide sequence at SEQ ID NO 9911
atggatagtgctcgtaacgtaattcatattgaaaacaatgaccactacataggaattgacgttggtacgggctcagctcgtgcgtgtctcattgatgccgcaggcgatatcaaagcccttgcgtcagagcctatcaagttatggcagcctcaaactggctactatgaacaatcgacgacagatatctggcattgtatctgtcactgtgtccagaaagtcgttcatcaatcgaccgtcgacccctctctgattaagggaattggcttcgacgccacttgttccctaagtgtctttacccacgataccgacgagcccgtccctgtcactggacccgatttcgagaacgatggcaacgaccgaaatgtcattctgtggttggatcaccgccctgtcgatgagactgaaaagatcaatgctaccaatcacaacttgctacgttatgtgggaggcaaaatgagcatagagatggaaatcccgaaggtgctctggcttaagaacaacatgcctcctgagctcttcgaccgctgcaaattctacgatctggcagatgctttgacacacctagcgacgggcaacgaggtccgcagtttctgcagtactgtatgcaaacagggttacgtccctgtgggcgtagacggcagtgttaagggctggcaggaagatttctacgagaagattggtctaggagatctggtaaaagatgacttcaagcgcatgggaggagtcgacggggtgaatgggaaatacatgagtgccggagagcttgtaggtacgctctccgagcacgccgccaaccaacttggcttgccggcgggcatcgcagttggcagtggtgtcattgatgcgtatgccggctggattggtaccgtcggagccaaagtagatactcaatacggacatgcggacgagacgcatcccgcgaacgacctggctcaggcctcaacacgactggcggcagttgcgggcacctcgacttgccatcttgccatgtccgagaaccctgtcttcgtgaacggtgtctggggcccctatcgcgacgtgttgcttccgggcttctggcttgcggaaggtggccaatctgctactggcgagcttctgcgtcacgttctcgaaacacaccccgcccacagtcaagttatgccactagcggaagctacgcaaatgaacatctacgactatctcaacagccaccttcgcgaactcgccgagaagcaaaaggcgccaactgtgtcttaccttggacgccacttcttcttctacggtgatctgtggggaaaccgctctcccgtggcggaccccaacatgaaaggatcggtgattggactcagttccgactcgagcgtggatggcctcgcgctctattactacgcaacgatggagttcatcgccttgcaaacgcgtcagattgtggaagccatgaacaagtcgggacacaacatccagaccatcttcatgtctggtagtcagtgccagaacgacatgctcatggacctgatctcgacggtgtgcgacatgccggtgctgatccctagatatgtacacgccgctgtggtacacggtgctgcgatgcttggtgcaaaggcagctagcgcggatgcggagggaaagactgagaatctatggagtatcatggatcggatgagcaagcctgggcgtctcgtaaagcccgggctgaacaagaacgagaagaaacttctcgatgccaagtacgaggtgttccttgagcagtgccgcactcagcaggagtataggaacaaggtggatgaggcaacatctgcgtgggcctag

SEQ ID NO: 9911 - protein, 595 aa, Muscodor strobelii
  misc_feature: SGI Peptide ID NO. 563120
  misc_feature (311)..(564): Pfam Id: PF02782 Pfam Desc: FGGY family of carbohydrate kinases, C-terminal domain
  misc_feature (15)..(288): Pfam Id: PF00370 Pfam Desc: FGGY family of carbohydrate kinases, N-terminal domain
  misc_feature (16)..(89): Pfam Id: PF00370 Pfam Desc: FGGY family of carbohydrate kinases, N-terminal domain
  misc_feature (14)..(594): NCBI GI: 156063048 Blast Desc: SS1G_01640 [Sclerotinia sclerotiorum 1980] gi|154696976|gb|EDN96714.1| SS1G_01640 [Sclerotinia sclerotiorum 1980]
  misc_feature (14)..(593): NCBI GI: 46109096 Blast Desc: FG01430.1 [Gibberella zeae PH-1]
  misc_feature (14)..(590): NCBI GI: 164428131 Blast Desc: NCU01701 [Neurospora crassa OR74A] gi|16944473|emb|CAD11374.1| conserved [Neurospora crassa] gi|157072024|gb|EAA27671.2| NCU01701 [Neurospora crassa OR74A]
  misc_feature (5)..(594): NCBI GI: 258577787 Blast Desc: UREG_02591 [Uncinocarpus reesii 1704] gi|237903341|gb|EEP77742.1| UREG_02591 [Uncinocarpus reesii 1704]
  misc_feature (10)..(593): NCBI GI: 145604460 Blast Desc: ribitol kinase [Magnaporthe grisea 70-15] gi|145012452|gb|EDJ97108.1| ribitol kinase [Magnaporthe grisea 70-15]
  misc_feature (3)..(590): NCBI GI: 171689074 Blast Desc: protein product [Podospora anserina] gi|170944499|emb|CAP70610.1| protein product [Podospora anserina]
  misc_feature (5)..(594): NCBI GI: 119486694 Blast Desc: FGGY-family carbohydrate kinase, [Neosartorya fischeri NRRL 181] gi|119410490|gb|EAW20436.1| FGGY-family carbohydrate kinase, [Neosartorya fischeri NRRL 181]
  misc_feature (14)..(594): NCBI GI: 256730621 Blast Desc: [Nectria haematococca mpVI 77-13-4]
  misc_feature (14)..(594): NCBI GI: 255935963 Blast Desc: Pc13g05740 [Penicillium chrysogenum Wisconsin 54-1255] gi|211583628|emb|CAP91643.1| Pc13g05740 [Penicillium chrysogenum Wisconsin 54-1255]
  misc_feature (14)..(594): NCBI GI: 145248612 Blast Desc: An14g00160 [Aspergillus niger] gi|134081312|emb|CAK41815.1| protein product [Aspergillus niger]
  misc_feature (17)..(509): SWISSPROT Homolog: EC 2.7.1.16 Ribulokinase
MDSARNVIHIENNDHYIGIDVGTGSARACLIDAAGDIKALASEPIKLWQPQTGYYEQSTTDIWHCICHCVQKVVHQSTVDPSLIKGIGFDATCSLSVFTHDTDEPVPVTGPDFENDGNDRNVILWLDHRPVDETEKINATNHNLLRYVGGKMSIEMEIPKVLWLKNNMPPELFDRCKFYDLADALTHLATGNEVRSFCSTVCKQGYVPVGVDGSVKGWQEDFYEKIGLGDLVKDDFKRMGGVDGVNGKYMSAGELVGTLSEHAANQLGLPAGIAVGSGVIDAYAGWIGTVGAKVDTQYGHADETHPANDLAQASTRLAAVAGTSTCHLAMSENPVFVNGVWGPYRDVLLPGFWLAEGGQSATGELLRHVLETHPAHSQVMPLAEATQMNIYDYLNSHLRELAEKQKAPTVSYLGRHFFFYGDLWGNRSPVADPNMKGSVIGLSSDSSVDGLALYYYATMEFIALQTRQIVEAMNKSGHNIQTIFMSGSQCQNDMLMDLISTVCDMPVLIPRYVHAAVVHGAAMLGAKAASADAEGKTENLWSIMDRMSKPGRLVKPGLNKNEKKLLDAKYEVFLEQCRTQQEYRNKVDEATSAWA

SEQ ID NO: 9912 - DNA, 2294 bp, Muscodor strobelii
  misc_feature: SGI EST ID NO. CUFF.23445.0
  misc_feature: Variant of the nucleotide sequence at SEQ ID NO 9910
caaatacccttggctctttatctaacgcatgactgcttcgcttaaacggtctgaatcgtgccaattgagcccctatacgcccctgctgcatctcaacaactatacgcatcatcttgcttgcaaatctcgttgagcttcatcatctacagccgagcctcgaaccagagaaggcccctaaggacaagggacaagacctccctgcataataacggcttttggcctggcttacacctcgcatcttacgcacatcattggacgacttcactaagtccgtcaagcttgtgcttcttcacaccccttttgcttgcccgtattacgctgtggctgctgcgccagaagacattcacttcccagcatggatgctcgtaacgtaattcatattgaaaacaatgaccactacataggaattgacgttggtacgggctcagctcgtgcgtgtctcattgatgccgcaggcgatatcaaagcccttgcgtcagagcctatcaagttatggcagcctcaaactggctactatgaacaatcgacgacagatatctggcattgtatctgtcactgtgtccagaaagtcgttcatcaatcgaccgtcgacccctctctgattaagggaattggcttcgacgccacttgttccctaagtgtctttacccacgataccgacgagcccgtccctgtcactggacccgatttcgagaacgatggcaacgaccgaaatgtcattctgtggttggatcaccgccctgtcgatgagactgaaaagatcaatgctaccaatcacaacttgctacgttatgtgggaggcaaaatgagcatagagatggaaatcccgaaggtgctctggcttaagaacaacatgcctcctgagctcttcgaccgctgcaaattctacgatctggcagatgctttgacacacctagcgacgggcaacgaggtccgcagtttctgcagtactgtatgcaaacagggttacgtccctgtgggcgtagacggcagtgttaagggctggcaggaagatttctacgagaagattggtctaggagatctggtaaaagatgacttcaagcgcatgggaggagtcgacggggtgaatgggaaatacatgagtgccggagagcttgtaggtacgctctccgagcacgccgccaaccaacttggcttgccggcgggcatcgcagttggcagtggtgtcattgatgcgtatgccggctggattggtaccgtcggagccaaagtagatactcaatacggacatgcggacgagacgcatcccgcgaacgacctggctcaggcctcaacacgactggcggcagttgcgggcacctcgacttgccatcttgccatgtccgagaaccctgtcttcgtgaacggtgtctggggcccctatcgcgacgtgttgcttccgggcttctggcttgcggaaggtggccaatctgctactggcgagcttctgcgtcacgttctcgaaacacaccccgcccacagtcaagttatgccactagcggaagctacgcaaatgaacatctacgactatctcaacagccaccttcgcgaactcgccgagaagcaaaaggcgccaactgtgtcttaccttggacgccacttcttcttctacggtgatctgtggggaaaccgctctcccgtggcggaccccaacatgaaaggatcggtgattggactcagttccgactcgagcgtggatggcctcgcgctctattactacgcaacgatggagttcatcgccttgcaaacgcgtcagattgtggaagccatgaacaagtcgggacacaacatccagaccatcttcatgtctggtagtcagtgccagaacgacatgctcatggacctgatctcgacggtgtgcgacatgccggtgctgatccctagatatgtacacgccgctgtggtacacggtgctgcgatgcttggtgcaaaggcagctagcgcggatgcggagggaaagactgagaatctatggagtatcatggatcggatgagcaagcctgggcgtctcgtaaagcccgggctgaacaagaacgagaagaaacttctcgatgccaagtacgaggtgttccttgagcagtgccgcactcagcaggagtataggaacaaggtggatgaggcaacatctgcgtgggcctagttgcatctactagatatagctatgacggtattttcatgatatgagaaaaatggatttctggggaactatagggatatagatgtagattctgtgctcatcggtggctgggaatagataaatcaaaatttcataatggcctaaatactgcctacta

SEQ ID NO: 9913 - DNA, 1803 bp, Muscodor strobelii
  misc_feature: SGI cDNA ID NO. 563121
  misc_feature: Encodes the peptide sequence at SEQ ID NO 9914
atggatagtgctcgtaacgtaattcatattgaaaacaatgagatggcggaacaggaccactacataggaattgacgttggtacgggctcagctcgtgcgtgtctcattgatgccgcaggcgatatcaaagcccttgcgtcagagcctatcaagttatggcagcctcaaactggctactatgaacaatcgacgacagatatctggcattgtatctgtcactgtgtccagaaagtcgttcatcaatcgaccgtcgacccctctctgattaagggaattggcttcgacgccacttgttccctaagtgtctttacccacgataccgacgagcccgtccctgtcactggacccgatttcgagaacgatggcaacgaccgaaatgtcattctgtggttggatcaccgccctgtcgatgagactgaaaagatcaatgctaccaatcacaacttgctacgttatgtgggaggcaaaatgagcatagagatggaaatcccgaaggtgctctggcttaagaacaacatgcctcctgagctcttcgaccgctgcaaattctacgatctggcagatgctttgacacacctagcgacgggcaacgaggtccgcagtttctgcagtactgtatgcaaacagggttacgtccctgtgggcgtagacggcagtgttaagggctggcaggaagatttctacgagaagattggtctaggagatctggtaaaagatgacttcaagcgcatgggaggagtcgacggggtgaatgggaaatacatgagtgccggagagcttgtaggtacgctctccgagcacgccgccaaccaacttggcttgccggcgggcatcgcagttggcagtggtgtcattgatgcgtatgccggctggattggtaccgtcggagccaaagtagatactcaatacggacatgcggacgagacgcatcccgcgaacgacctggctcaggcctcaacacgactggcggcagttgcgggcacctcgacttgccatcttgccatgtccgagaaccctgtcttcgtgaacggtgtctggggcccctatcgcgacgtgttgcttccgggcttctggcttgcggaaggtggccaatctgctactggcgagcttctgcgtcacgttctcgaaacacaccccgcccacagtcaagttatgccactagcggaagctacgcaaatgaacatctacgactatctcaacagccaccttcgcgaactcgccgagaagcaaaaggcgccaactgtgtcttaccttggacgccacttcttcttctacggtgatctgtggggaaaccgctctcccgtggcggaccccaacatgaaaggatcggtgattggactcagttccgactcgagcgtggatggcctcgcgctctattactacgcaacgatggagttcatcgccttgcaaacgcgtcagattgtggaagccatgaacaagtcgggacacaacatccagaccatcttcatgtctggtagtcagtgccagaacgacatgctcatggacctgatctcgacggtgtgcgacatgccggtgctgatccctagatatgtacacgccgctgtggtacacggtgctgcgatgcttggtgcaaaggcagctagcgcggatgcggagggaaagactgagaatctatggagtatcatggatcggatgagcaagcctgggcgtctcgtaaagcccgggctgaacaagaacgagaagaaacttctcgatgccaagtacgaggtgttccttgagcagtgccgcactcagcaggagtataggaacaaggtggatgaggcaacatctgcgtgggcctag

SEQ ID NO: 9914 - protein, 600 aa, Muscodor strobelii
  misc_feature: SGI Peptide ID NO. 563121
  misc_feature (316)..(569): Pfam Id: PF02782 Pfam Desc: FGGY family of carbohydrate kinases, C-terminal domain
  misc_feature (20)..(293): Pfam Id: PF00370 Pfam Desc: FGGY family of carbohydrate kinases, N-terminal domain
  misc_feature (21)..(94): Pfam Id: PF00370 Pfam Desc: FGGY family of carbohydrate kinases, N-terminal domain
  misc_feature (19)..(599): NCBI GI: 156063048 Blast Desc: SS1G_01640 [Sclerotinia sclerotiorum 1980] gi|154696976|gb|EDN96714.1| SS1G_01640 [Sclerotinia sclerotiorum 1980]
  misc_feature (19)..(598): NCBI GI: 46109096 Blast Desc: FG01430.1 [Gibberella zeae PH-1]
  misc_feature (18)..(595): NCBI GI: 164428131 Blast Desc: NCU01701 [Neurospora crassa OR74A] gi|16944473|emb|CAD11374.1| conserved [Neurospora crassa] gi|157072024|gb|EAA27671.2| NCU01701 [Neurospora crassa OR74A]
  misc_feature (13)..(599): NCBI GI: 258577787 Blast Desc: UREG_02591 [Uncinocarpus reesii 1704] gi|237903341|gb|EEP77742.1| UREG_02591 [Uncinocarpus reesii 1704]
  misc_feature (15)..(598): NCBI GI: 145604460 Blast Desc: ribitol kinase [Magnaporthe grisea 70-15] gi|145012452|gb|EDJ97108.1| ribitol kinase [Magnaporthe grisea 70-15]
  misc_feature (16)..(595): NCBI GI: 171689074 Blast Desc: protein product [Podospora anserina] gi|170944499|emb|CAP70610.1| protein product [Podospora anserina]
  misc_feature (18)..(599): NCBI GI: 119486694 Blast Desc: FGGY-family carbohydrate kinase, [Neosartorya fischeri NRRL 181] gi|119410490|gb|EAW20436.1| FGGY-family carbohydrate kinase, [Neosartorya fischeri NRRL 181]
  misc_feature (19)..(599): NCBI GI: 255935963 Blast Desc: Pc13g05740 [Penicillium chrysogenum Wisconsin 54-1255] gi|211583628|emb|CAP91643.1| Pc13g05740 [Penicillium chrysogenum Wisconsin 54-1255]
  misc_feature (19)..(599): NCBI GI: 256730621 Blast Desc: [Nectria haematococca mpVI 77-13-4]
  misc_feature (18)..(599): NCBI GI: 121714273 Blast Desc: FGGY-family carbohydrate kinase, [Aspergillus clavatus NRRL 1] gi|119402901|gb|EAW13321.1| FGGY-family carbohydrate kinase, [Aspergillus clavatus NRRL 1]
  misc_feature (22)..(514): SWISSPROT Homolog: EC 2.7.1.16 Ribulokinase
MDSARNVIHIENNEMAEQDHYIGIDVGTGSARACLIDAAGDIKALASEPIKLWQPQTGYYEQSTTDIWHCICHCVQKVVHQSTVDPSLIKGIGFDATCSLSVFTHDTDEPVPVTGPDFENDGNDRNVILWLDHRPVDETEKINATNHNLLRYVGGKMSIEMEIPKVLWLKNNMPPELFDRCKFYDLADALTHLATGNEVRSFCSTVCKQGYVPVGVDGSVKGWQEDFYEKIGLGDLVKDDFKRMGGVDGVNGKYMSAGELVGTLSEHAANQLGLPAGIAVGSGVIDAYAGWIGTVGAKVDTQYGHADETHPANDLAQASTRLAAVAGTSTCHLAMSENPVFVNGVWGPYRDVLLPGFWLAEGGQSATGELLRHVLETHPAHSQVMPLAEATQMNIYDYLNSHLRELAEKQKAPTVSYLGRHFFFYGDLWGNRSPVADPNMKGSVIGLSSDSSVDGLALYYYATMEFIALQTRQIVEAMNKSGHNIQTIFMSGSQCQNDMLMDLISTVCDMPVLIPRYVHAAVVHGAAMLGAKAASADAEGKTENLWSIMDRMSKPGRLVKPGLNKNEKKLLDAKYEVFLEQCRTQQEYRNKVDEATSAWA

SEQ ID NO: 9915 - DNA, 2294 bp, Muscodor strobelii; identical to SEQ ID NO: 9912
  misc_feature: SGI EST ID NO. CUFF.23445.0
  misc_feature: Variant of the nucleotide sequence at SEQ ID NO 9913

SEQ ID NO: 9916 - DNA, 2259 bp, Muscodor strobelii
  misc_feature: SGI cDNA ID NO. 563122
  misc_feature: Encodes the peptide sequence at SEQ ID NO 9917
atggacgacgagccgaggaagaaaaaaggattctttggcggactcttccgcacctttagtaaatcggaaggaacgagaaagccagtacatgacggtccgaggcgcgcgagtgatagtgatgccatattgcagcatcgacgcaagccagacaaccgactaaggacgacaggtacgagacgtcgcccacgacgtcccgatccccgtgatagcaagggaaagggccgagaacagcctaacggcgatgtctacgagcagggaccactcacagcatggccgccttccggcatgtccaacaaggaagagctgacgcttggacacgctatggagctcatctgccgaggcgtgccagcgcataagggtcacaagagacctatcacgcacgcttctgatcattactatggactctacgcaacaacggccgggaatcaaagcgaggaaagcgatgcggttaaccaacacgacgcgatgactcagttaatgactttgagagtgcaaggattaggaccacccaattatccatgggagactcttgagcaaccgagttacgccttcggtatcggctctcgaccagggactgtcactttgaactcgtgggtgactcggtcgagtgtcatgcctccagcaattgcactccgtgatgcgggtgttgagccgcgcgaggtcgggcttgctcaaatttttaagcgactcaaggaattggaagccggcctcgaggacgatgatgatggacagatgtaccggaagctgtacagccattttctcagagatccagataggaagaccaaccctcacaaacgaatggagcaacagatcatggacttggtcatgtgtctttctgggccgaactggtacgactttacgaaccccaaaaatcaagtagtcaccaagtttatctacgacaccggaccagaaaaccacgcacagtaccagcgtttcttctaccaacttctgctaagccttgaactcgagctgcgcatcaactcgaaactacatacagactacgcgaaagagcgcctcatgggtcagatccccccaaagatccaatggaatctcgcgcttgctaggcgttggcgagacaacgtgcgtatcgaagactatggcgacacggcagagaacgttcggctgcgtttcaagcttagaaagcgccaaaacaggatgctcaagcgcttcgcgcagatgatgaagtggccgaatctcggagagacagaagcagagctcagagcaagagaggccgacggcagccttgttaatatcagttcgcatgctctagctttcttcagtgggctggttctacccggacctaccttccccttcctcatgatgaacagcctcatcgatatcgatccagataaggcgacggatcgtctcgcgctgctcactcatctgaatccgcattgtggatttcagtaccggaacagctatacctactggacctcaacaagcattgtcggcaaagtgctggcacctacctgtctcgaggccgctggctggattgggcccgcgcgaccttcagcagacctaactcattcccaaatcgcacgtgtgcgatcccgcaaaccccgagagcgcatgacgactgaggatgtactgaccatgagcgaacgttccgatcccctcggccccgctgctgaagtttaccccgtcaaggaatacgagctactgacgccgtacagcgatgacttcgttgatacagtgcgcatagagatgcttcaattgaagcccttacccgagagaccggatactgggccttcgtggttcgatgctagtcttcaatttgccattgatggagccagctggccattgaggctgagctacgatgtttgtttcatccatgcgtgcccgtgctccgatggtcctcatccactcttctttgactatgagttcacgactgtgaaagccgatcaagtagtaggaattacggactggagtaagccatcaagccgcggcggctccaaagaccacagtgccacatcaacacctgttggtggaagtagtgggaattatcggccaatggctacaaatgccatgattgatggcgccgacgacgatgatgtggaaagggtcctagttgttgatgcttttggtgtcaaggataacgaggtccttgcacgtgcgtggtgctctcactggggcttgaatgccgttgttgcagacatcagtcagacttgcatggcatgcgcaattcgtgaggcgtatgcggcgactttgaccgtcgtcattctcgtcgaagacctacctgaaggatcagatggatcatag

SEQ ID NO: 9917 - protein, 752 aa, Muscodor strobelii
  misc_feature: SGI Peptide ID NO. 563122
  misc_feature (1)..(742): NCBI GI: 171689156 Blast Desc: protein product [Podospora anserina] gi|170944540|emb|CAP70651.1| protein product [Podospora anserina]
  misc_feature (16)..(744): NCBI GI: 85109955 Blast Desc: NCU08517 [Neurospora crassa OR74A] gi|28924832|gb|EAA33931.1| conserved [Neurospora crassa OR74A] gi|38524223|emb|CAE75690.1| [Neurospora crassa]
  misc_feature (8)..(748): NCBI GI: 116204995 Blast Desc: CHGG_10381 [Chaetomium globosum CBS 148.51] gi|88176509|gb|EAQ83977.1| CHGG_10381 [Chaetomium globosum CBS 148.51]
  misc_feature (7)..(743): NCBI GI: 256730620 Blast Desc: NECHADRAFT_74327 [Nectria haematococca mpVI 77-13-4]
  misc_feature (33)..(731): NCBI GI: 46109098 Blast Desc: FG01431.1 [Gibberella zeae PH-1]
  misc_feature (69)..(745): NCBI GI: 145612521 Blast Desc: MGG_12369 [Magnaporthe grisea 70-15] gi|145019671|gb|EDK03899.1| MGG_12369 [Magnaporthe grisea 70-15]
  misc_feature (25)..(742): NCBI GI: 156050521 Blast Desc: SS1G_07848 [Sclerotinia sclerotiorum 1980] gi|154692248|gb|EDN91986.1| SS1G_07848 [Sclerotinia sclerotiorum 1980]
  misc_feature (25)..(704): NCBI GI: 154293982 Blast Desc: BC1G_14170 [Botryotinia fuckeliana B05.10] gi|150845142|gb|EDN20335.1| BC1G_14170 [Botryotinia fuckeliana B05.10]
  misc_feature (91)..(743): NCBI GI: 169597011 Blast Desc: SNOG_01283 [Phaeosphaeria nodorum SN15] gi|160707424|gb|EAT90932.2| SNOG_01283 [Phaeosphaeria nodorum SN15]
  misc_feature (531)..(743): NCBI GI: 261358592 Blast Desc: conserved [Verticillium albo-atrum VaMs.102]
MDDEPRKKKGFFGGLFRTFSKSEGTRKPVHDGPRRASDSDAILQHRRKPDNRLRTTGTRRRPRRPDPRDSKGKGREQPNGDVYEQGPLTAWPPSGMSNKEELTLGHAMELICRGVPAHKGHKRPITHASDHYYGLYATTAGNQSEESDAVNQHDAMTQLMTLRVQGLGPPNYPWETLEQPSYAFGIGSRPGTVTLNSWVTRSSVMPPAIALRDAGVEPREVGLAQIFKRLKELEAGLEDDDDGQMYRKLYSHFLRDPDRKTNPHKRMEQQIMDLVMCLSGPNWYDFTNPKNQVVTKFIYDTGPENHAQYQRFFYQLLLSLELELRINSKLHTDYAKERLMGQIPPKIQWNLALARRWRDNVRIEDYGDTAENVRLRFKLRKRQNRMLKRFAQMMKWPNLGETEAELRAREADGSLVNISSHALAFFSGLVLPGPTFPFLMMNSLIDIDPDKATDRLALLTHLNPHCGFQYRNSYTYWTSTSIVGKVLAPTCLEAAGWIGPARPSADLTHSQIARVRSRKPRERMTTEDVLTMSERSDPLGPAAEVYPVKEYELLTPYSDDFVDTVRIEMLQLKPLPERPDTGPSWFDASLQFAIDGASWPLRLSYDVCFIHACPCSDGPHPLFFDYEFTTVKADQVVGITDWSKPSSRGGSKDHSATSTPVGGSSGNYRPMATNAMIDGADDDDVERVLVVDAFGVKDNEVLARAWCSHWGLNAVVADISQTCMACAIREAYAATLTVVILVEDLPEGSDGS

SEQ ID NO: 9918 - DNA, 3899 bp, Muscodor strobelii
  misc_feature: SGI EST ID NO. CUFF.23448.0
  misc_feature: Variant of the nucleotide sequence at SEQ ID NO 9916
taaccatctcacactcctggaggccgccagaaaatcatcattcgccggtagattccggtacatcaagcaaggcaaattgtctgcactcaatccatactgtcaattccttctttcaactaatccaaggctctgttcgcattacctcatcggtctatgcaggtcgcgggtcgctcctcactagctgcgccggcgcatcccaactcctcaaaacagccgcgcatctccctctgattcactaacaacggcttgctcacttcgatcaagacccagcctttgcaatacatacagcaaccgggaaataaccagtgccttacattcatttgtgcatattcatttctacatctatatttaaacatagattgatccattcgttccttgtgtggtgttcatctgcaggaacacggtaccaagccacagcactgacgcgtgttggcctccctccccaccgagaatgaacaggaggcaaatcaacgtctatacatatccaccagaatttggcacctgatccgtccggcctgcttgggctaatgagtgcattgcaagcataatcatggacgacgagccgaggaagaaaaaaggattctttggcggactcttccgcacctttagtaaatcggaaggaacgagaaagccagtacatgacggtccgaggcgcgcgagtgatagtgatgccatattgcagcatcgacgcaagccagacaaccgactaaggacgacaggtacgagacgtcgcccacgacgtcccgatccccgtgatagcaagggaaagggccgagaacagcctaacggcgatgtctacgagcagggaccactcacagcatggccgccttccggcatgtccaacaaggaagagctgacgcttggacacgctatggagctcatctgccgaggcgtgccagcgcataagggtcacaagagacctatcacgcacgcttctgatcattactatggactctacgcaacaacggccgggaatcaaagcgaggaaagcgatgcggttaaccaacacgacgcgatgactcagttaatgactttgagagtgcaaggattaggaccacccaattatccatgggagactcttgagcaaccgagttacgccttcggtatcggctctcgaccagggactgtcactttgaactcgtgggtgactcggtcgagtgtcatgcctccagcaattgcactccgtgatgcgggtgttgagccgcgcgaggtcgggcttgctcaaatttttaagcgactcaaggaattggaagccggcctcgaggacgatgatgatggacagatgtaccggaagctgtacagccattttctcagagatccagataggaagaccaaccctcacaaacgaatggagcaacagatcatggacttggtcatgtgtctttctgggccgaactggtacgactttacgaaccccaaaaatcaagtagtcaccaagtttatctacgacaccggaccagaaaaccacgcacagtaccagcgtttcttctaccaacttctgctaagccttgaactcgagctgcgcatcaactcgaaactacatacagactacgcgaaagagcgcctcatgggtcagatccccccaaagatccaatggaatctcgcgcttgctaggcgttggcgagacaacgtgcgtatcgaagactatggcgacacggcagagaacgttcggctgcgtttcaagcttagaaagcgccaaaacaggatgctcaagcgcttcgcgcagatgatgaagtggccgaatctcggagagacagaagcagagctcagagcaagagaggccgacggcagccttgttaatatcagttcgcatgctctagctttcttcagtgggctggttctacccggacctaccttccccttcctcatgatgaacagcctcatcgatatcgatccagataaggcgacggatcgtctcgcgctgctcactcatctgaatccgcattgtggatttcagtaccggaacagctatacctactggacctcaacaagcattgtcggcaaagtgctggcacctacctgtctcgaggccgctggctggattgggcccgcgcgaccttcagcagacctaactcattcccaaatcgcacgtgtgcgatcccgcaaaccccgagagcgcatgacgactgaggatgtactgaccatgagcgaacgttccgatcccctcggccccgctgctgaagtttaccccgtcaaggaatacgagctactgacgccgtacagcgatgacttcgttgatacagtgcgcatagagatgcttcaattgaagcccttacccgagagaccggatactgggccttcgtggttcgatgctagtcttcaatttgccattgatggagccagctggccattgaggctgagctacgatgtttgtttcatccatgcgtgcccgtgctccgatggtcctcatccactcttctttgactatgagttcacgactgtgaaagccgatcaagtagtaggaattacggactggagtaagccatcaagccgcggcggctccaaagaccacagtgccacatcaacacctgttggtggaagtagtgggaattatcggccaatggctacaaatgccatgattgatggcgccgacgacgatgatgtggaaagggtcctagttgttgatgcttttggtgtcaaggataacgaggtccttgcacgtgcgtggtgctctcactggggcttgaatgccgttgttgcagacatcagtcagacttgcatggcatgcgcaattcgtgaggcgtatgcggcgactttgaccgtcgtcattctcgtcgaagacctacctgaaggatcagatggatcataggcagtgtgctactagtagcgattctcaggcttcgttaatcagatgctcataaagatgatcacgaacgagacaattgacgatgtccacgcagggcggctgtgtactgcgcgttgcatttcacatcacggcaggagttgtcatttcggggttttaattgcttgttcgtctggtctacacggtttataccctcctgctttctacttgagctgagccggcgtaaagtgtgtctcgatacatgaggttttcaatataacttgattatcaatatttacccgctcttccccgcgtcgacaagtcgaaatgtttgttgtttgcacatgatgatgtcgcccgcttttccatgtatcaccgggtgtcctccgagttctccagtcggattggaagcgatatgtcatgacgatcgccactgaaggcgaagaggtgtggatgatggactgtacaatgcccggaaatagcgactgcatatgtagggactgtgccagatcatcgtgagatgtgttcgtggcggtattatcacaccagttcgccagtgctgcgtgggtggaccggctgctacgcgcaacttggcatgcttaagtgcctcgagtgccgcaattcttgcgctccgctggtcggatggtccacttcggatgcggatccgttcattagaactgactaactggtagttgtagacagtagtaaaagatcctacaagagcgatcacgatactgttgaaaattttctttgcctcgtgaataaccagtgtttgctaggcattggacatatgcatggtggagaatccctggattttgggtgtgtttcgagcaaagtgagaatctccgtccgtagcctcgacactctccagagccaacagtactatgtggttatgctggtaatttcttgcgatggaaagattctagactcgcacccctcgccccgaggacgtctgcgagggtgctgacgcccctacaccccactccggcagcgtgttcactatcacattccccaccacatctgcacctacaaccccacctgtgacgacacagcaccttacccctccaagaagaccaactgacgatcgtgtgtgtggccatagcttcatcaagctccc

SEQ ID NO: 9919 - DNA, 2340 bp, Muscodor strobelii
  misc_feature: SGI cDNA ID NO. 563123
  misc_feature: Encodes the peptide sequence at SEQ ID NO 9920
atgcgcttcggcaagactcttcgcgagtcgacgtacgcgccatggaaagacaactacgtcgactacgccaagctgaagagcatgctgcgcgaggacgcccacgacgatgacgacgtgccctggaccgaggaggacgagcagaagttctgcgacgaggtcttcaacacgcagctcgagaaggtggcagacttccagaccaagacggccgccgccctcagggaccgcgtcgacggcgccttcgaccagctgcgcgacctcgccccgcccgacgacaactctaaggacagctccaagcccggcgatatcaccaacaccgtcacaaatacccgcctgcgcgacctgcgcgacgacctcgaccgcatcctcaacgacctcaaggagctcaaaaagttcaccaacctcaactacaccgccttcctcaagattgttaagaagcatgaccggaagcgcggtagtaactacaagctccggcccatgatgcgcgtctccctcgcccagcgcggcttcaactcggagcacgagtactccccgctgctcaacaagctgtccctcatgtactacgccatcaaccagaacctcgacgccgccgagcagcagcaacagcccctccccctcgacctcgacgccgccgaagagatcctcaacggcgagcgctacaccgcccacaagttctgggtccaccccgacaacctgctcgaggtcaagaccgccgtcctgcgccacctccccgccctcgtctacagccagcaggccgccaaggagctcgacggcaacagcgacccaaagatcacctccctctacttcgacaaccccaagttcgagctgtacaacgccaaagtcgaccgccaggccgatgcctcctccctgcgactgcgctggtatgggcagctgggtgccaagccggacatcgtcctcgagcagaaaaccatctacgagaacggcaccagcgcagagaagaagttctccatcaaggacaagtacatcaagcaatatctcgatggcgactacaagatggagaagtcagtccagaagatggagaggcagggccagcagagcgactccatcgattccttcaaggccaacgcagaggagatccagaactttgtcgtgagccacaagtttgggcccatcttgcgcgccaactacacccgcacagccttccagaagcccgccgatgaccgcgtaagaatatccatcgataccgatcttgcctttattcgcgaggatacgctggatcgtagccgtccctgccgagaccccaacgagtggcatcgcacagacattgacaacagcaatatgactttccccttcaagaacattaatcagagcgaagtgtccaaattcccttatgccatccttgaaatcaaactgaaggaagaggaaggccggaaacgccccacgtgggtcgatgatttgatggcttctcatttggtctatgcagcaccaaaattctccaaatttgtgcatggtgtggcctcattatttgaggactatgttaataatctccctttttggttgaatgacctggagatggacatccgcaaggaccctcagagagcccacgaggaggaggaacagagacgagctcgagaagccgaggaagtccatgctgtcggcactcttctagggtcaagtttcaaacatagctcttcctacagacccgcggctggctcgcccgtagctaaatcctatctctcagagcgcgccgctgcagatcggaaagcgtcggcttcgcacattgccactcgacttcgtggccaaggtacggaggcagaagatggggatgaagatggagaagcgtcatcgtctgggctcaggagttacggaacactttcgtcggtgttgcctggcttctcactttctcggtattcaagggcaaaacggcaacgcgcgcaattgcctgaaggcgtcacgaagcccgaagtctggatcaagaacgccgggccgctgcaaatcgagccgaaaatctggctcgcaaacgaacgaacgttcctcaaatggcagcatatctgcgtacttctcggtaccctggctattgctctttacacggcagctggcgaaaacttcctcgccgagtgtatgggcatcgcatatatcgcgattgccgtcatggctggcctatggggcaacctgatgttacaccgcaggcgaagcatgattgtcgagcgcagtggtaaggacttcgataacatgatcggtccgctcgctgtcagtattgcgcttatgattgcactcatacttaatttcattttcgcgtatcgaaatgcattcagtggatctgaatccgagaggccgatacctaatggcacacattcggctttcattcaagaactcatttga

SEQ ID NO: 9920 - protein, 779 aa, Muscodor strobelii
  misc_feature: SGI Peptide ID NO. 563123
  misc_feature (1)..(163): Pfam Id: PF03105 Pfam Desc: SPX domain
  misc_feature (218)..(495): Pfam Id: PF09359 Pfam Desc: VTC domain
  misc_feature (1)..(776): NCBI GI: 85083710 Blast Desc: NCU01745 [Neurospora crassa OR74A] gi|16416096|emb|CAD01137.1| conserved [Neurospora crassa] gi|28918255|gb|EAA27932.1| conserved [Neurospora crassa OR74A]
  misc_feature (1)..(758): NCBI GI: 46109100 Blast Desc: FG01432.1 [Gibberella zeae PH-1]
  misc_feature (1)..(757): NCBI GI: 171689132 Blast Desc: protein product [Podospora anserina] gi|170944528|emb|CAP70639.1| protein product [Podospora anserina]
  misc_feature (1)..(757): NCBI GI: 145612525 Blast Desc: MGG_12371 [Magnaporthe grisea 70-15] gi|145019673|gb|EDK03901.1| MGG_12371 [Magnaporthe grisea 70-15]
  misc_feature (1)..(778): NCBI GI: 261358602 Blast Desc: vacuolar transporter chaperone 2 [Verticillium albo-atrum VaMs.102]
  misc_feature (1)..(758): NCBI GI: 154293980 Blast Desc: BC1G_14169 [Botryotinia fuckeliana B05.10] gi|150845141|gb|EDN20334.1| BC1G_14169 [Botryotinia fuckeliana B05.10]
  misc_feature (1)..(775): NCBI GI: 156050521 Blast Desc: SS1G_07848 [Sclerotinia sclerotiorum 1980] gi|154692248|gb|EDN91986.1| SS1G_07848 [Sclerotinia sclerotiorum 1980]
  misc_feature (1)..(758): NCBI GI: 116204977 Blast Desc: CHGG_10372 [Chaetomium globosum CBS 148.51] gi|88176500|gb|EAQ83968.1| CHGG_10372 [Chaetomium globosum CBS 148.51]
  misc_feature (1)..(753): NCBI GI: 261192976 Blast Desc: SPX domain-containing protein [Ajellomyces dermatitidis SLH14081] gi|239589029|gb|EEQ71672.1| SPX domain-containing protein [Ajellomyces dermatitidis SLH14081]
  misc_feature (1)..(753): NCBI GI: 239613612 Blast Desc: SPX domain-containing protein [Ajellomyces dermatitidis ER-3]
MRFGKTLRESTYAPWKDNYVDYAKLKSMLREDAHDDDDVPWTEEDEQKFCDEVFNTQLEKVADFQTKTAAALRDRVDGAFDQLRDLAPPDDNSKDSSKPGDITNTVTNTRLRDLRDDLDRILNDLKELKKFTNLNYTAFLKIVKKHDRKRGSNYKLRPMMRVSLAQRGFNSEHEYSPLLNKLSLMYYAINQNLDAAEQQQQPLPLDLDAAEEILNGERYTAHKFWVHPDNLLEVKTAVLRHLPALVYSQQAAKELDGNSDPKITSLYFDNPKFELYNAKVDRQADASSLRLRWYGQLGAKPDIVLEQKTIYENGTSAEKKFSIKDKYIKQYLDGDYKMEKSVQKMERQGQQSDSIDSFKANAEEIQNFVVSHKFGPILRANYTRTAFQKPADDRVRISIDTDLAFIREDTLDRSRPCRDPNEWHRTDIDNSNMTFPFKNINQSEVSKFPYAILEIKLKEEEGRKRPTWVDDLMASHLVYAAPKFSKFVHGVASLFEDYVNNLPFWLNDLEMDIRKDPQRAHEEEEQRRAREAEEVHAVGTLLGSSFKHSSSYRPAAGSPVAKSYLSERAAADRKASASHIATRLRGQGTEAEDGDEDGEASSSGLRSYGTLSSVLPGFSLSRYSRAKRQRAQLPEGVTKPEVWIKNAGPLQIEPKIWLANERTFLKWQHICVLLGTLAIALYTAAGENFLAECMGIAYIAIAVMAGLWGNLMLHRRRSMIVERSGKDFDNMIGPLAVSIALMIALILNFIFAYRNAFSGSESERPIPNGTHSAFIQELI

SEQ ID NO: 9921 - DNA, 3153 bp, Muscodor strobelii
  misc_feature: SGI EST ID NO. CUFF.23457.0
  misc_feature: Variant of the nucleotide sequence at SEQ ID NO 9919
cggcagtggcaccatcctcgcttgaactccactaaaacatgtagctagctaccttgaggcgctagactacaaggaacttggaagctctgcccgtcccacagcccctctatccatccatgtgtagaagctgtgacgaaatggagcttccacccagacctccaaccacctcgtccaaattttgcagtcgatcgagccggactactgtcacggccacaggcctttatgatcacattgatagggtgaattgtttgtaacacttgtacaagaattatctcacgtcacgatgcgcttcggcaagactcttcgcgagtcgacgtacgcgccatggaaagacaactacgtcgactacgccaagctgaagagcatgctgcgcgaggacgcccacgacgatgacgacgtgccctggaccgaggaggacgagcagaagttctgcgacgaggtcttcaacacgcagctcgagaaggtggcagacttccagaccaagacggccgccgccctcagggaccgcgtcgacggcgccttcgaccagctgcgcgacctcgccccgcccgacgacaactctaaggacagctccaagcccggcgatatcaccaacaccgtcacaaatacccgcctgcgcgacctgcgcgacgacctcgaccgcatcctcaacgacctcaaggagctcaaaaagttcaccaacctcaactacaccgccttcctcaagattgttaagaagcatgaccggaagcgcggtagtaactacaagctccggcccatgatgcgcgtctccctcgcccagcgcggcttcaactcggagcacgagtactccccgctgctcaacaagctgtccctcatgtactacgccatcaaccagaacctcgacgccgccgagcagcagcaacagcccctccccctcgacctcgacgccgccgaagagatcctcaacggcgagcgctacaccgcccacaagttctgggtccaccccgacaacctgctcgaggtcaagaccgccgtcctgcgccacctccccgccctcgtctacagccagcaggccgccaaggagctcgacggcaacagcgacccaaagatcacctccctctacttcgacaaccccaagttcgagctgtacaacgccaaagtcgaccgccaggccgatgcctcctccctgcgactgcgctggtatgggcagctgggtgccaagccggacatcgtcctcgagcagaaaaccatctacgagaacggcaccagcgcagagaagaagttctccatcaaggacaagtacatcaagcaatatctcgatggcgactacaagatggagaagtcagtccagaagatggagaggcagggccagcagagcgactccatcgattccttcaaggccaacgcagaggagatccagaactttgtcgtgagccacaagtttgggcccatcttgcgcgccaactacacccgcacagccttccagaagcccgccgatgaccgcgtaagaatatccatcgataccgatcttgcctttattcgcgaggatacgctggatcgtagccgtccctgccgagaccccaacgagtggcatcgcacagacattgacaacagcaatatgactttccccttcaagaacattaatcagagcgaagtgtccaaattcccttatgccatccttgaaatcaaactgaaggaagaggaaggccggaaacgccccacgtgggtcgatgatttgatggcttctcatttggtctatgcagcaccaaaattctccaaatttgtgcatggtgtggcctcattatttgaggactatgttaataatctccctttttggttgaatgacctggagatggacatccgcaaggaccctcagagagcccacgaggaggaggaacagagacgagctcgagaagccgaggaagtccatgctgtcggcactcttctagggtcaagtttcaaacatagctcttcctacagacccgcggctggctcgcccgtagctaaatcctatctctcagagcgcgccgctgcagatcggaaagcgtcggcttcgcacattgccactcgacttcgtggccaaggtacggaggcagaagatggggatgaagatggagaagcgtcatcgtctgggctcaggagttacggaacactttcgtcggtgttgcctggcttctcactttctcggtattcaagggcaaaacggcaacgcgcgcaattgcctgaaggcgtcacgaagcccgaagtctggatcaagaacgccgggccgctgcaaatcgagccgaaaatctggctcgcaaacgaacgaacgttcctcaaatggcagcatatctgcgtacttctcggtaccctggctattgctctttacacggcagctggcgaaaacttcctcgccgagtgtatgggcatcgcatatatcgcgattgccgtcatggctggcctatggggcaacctgatgttacaccgcaggcgaagcatgattgtcgagcgcagtggtaaggacttcgataacatgatcggtccgctcgctgtcagtattgcgcttatgattgcactcatacttaatttcattttcgcgtatcgaaatgcattcagtggatctgaatccgagaggccgatacctaatggcacacattcggctttcattcaagaactcatttgagcatccttgtgtcattggcttgaatcgtcgtggcaccaggcctgaggtgatgactatacattactcatgcgccgtcattctcttcaatagtcttattgggctgccgttgaagatatactctatatactacataccattgctgagcgcgaggatcccgttcaagcacacacataagcatgacgtcttgactgataatgcatgaaccagcttggttgtcagattatatggcctcgctaaatcgttgaggacacaagtagctcgatggtccgaatataccatagatagcattagtactaaggaatcaggatgatgccgtaatcatggcgattgggtcgatggatgcgggttgatggctctgttaaacttagggcctagattgcttgtctgattagttcaggcatgtaaggtgttagaccaatcgagacatgcaggtagggcgcaaaaaagccttaaatcgagcaaacattgggatgaagcaagcaagaatgtagcatataaatcaaatcatggttgtatgatcttccgagaag

SEQ ID NO: 9922 - DNA, 6363 bp, Muscodor strobelii
  misc_feature: SGI cDNA ID NO. 563124
  misc_feature: Reduced expression when VOC is produced
  misc_feature: Encodes the peptide sequence at SEQ ID NO 9923
atgggcgtttcggcggacttcgacgatagacaaattcacatcgagtccgaggcggaagcctaccatccctatgaatatcaaaccgacaataatggctcctgggctggtgccctcccggtgaagcaagggttgtatgacccgagcctagagaaggatgcttgcggtgtcggtttcgcctgccacatcaagggcaaggcgagccacaagattgtcagcgatgctcgaaacttgctttgcaacatgacccatcgtggtgcggtgggttccgatgcgcgagatggtgacggtgctggtgttatgacttcaataccacacaggtttttcatcaagaattttgagaaggagcaggacatcaaactgcctccgctgggacaatatgcagtgggaaatttgttcttcaagccggatgaagagacgttgcacgagtcgaagcggcagttggaagatattgccgagtcgcttggcctaagggttttaggatggcgagaacctcctgtagactctactcttcttggccctgctgctgcctcgcgcgagcctactatccttcagcccttcgtagttctgacctctgcgtatggatctggtagtgctcctgaaatgacggacccagagaaattcgacgaaagacttttcgagagacaattgtatgtcctccgaaaacgcgccacacacaccattggtctacataactggttttacctgtgttcattgtcaaacaagaacattgtttacaagggccagcttgctccggttcaagtttaccagtattatcatgatctagtaaatgccgattatcaagcccacttcgccttggtccattcccgtttctcgaccaacaccttcccctcgtgggatcgtgctcaacccctacgatgggctgctcacaacggtgaaatcaacacgttgcgtggcaacaagaattggatgcgcgcacgagaaggtgttatgcagtcggatgttttcggcgatgaactcgagcatctgtaccctattgttgaagatggcggctccgactcggccgcgtttgataacgtacttgagcttcttactatcaatggcgtgctgtctttgcccgaagctgttatgctcatggtccccgaagcatggcaaggcaacacggccatggatcctaagaaagccgcattctacgaatgggctgcgtgccaaatggagccctgggatggacctgcgctgttcacattcgctgatggtcgtttctgcggtgcgaacttagaccgaaacgggttgagaccatgtcgatactatatcatggacgatgatcgtattatctgtgcttctgaagttggcactatacccgtagagccagagtcggttattcaaaagggtcgtctgcagcctggcaagatgttgctcgttgacacacaagccggacgtctcattgatgattcagaacttaaagctgctgtgtcgagtcggaacgacttcaagtcttggatcgacaatgagctcatttctcttcccaaggtccttgctaaggtttctgagcaggacgttgatcttgcacctaaacctgactcgacgcctcttcagaaagatccgttgctactagcatttggttacactcacgagcaagttagtctattgcttgcaccaatggcttctgacgagaaagaggctctaggctccatgggcaatgatgcgcctttggcctgtctctctgacgcacctagattgctctatgagtatttccgtcagctattcgctcaagttaccaacccacccatcgaccctatccgcgagtctatcgttatgtctttggaatgttacgttggaccccaaggcaacttgcttgagatggatccttcacagtgtggtcgactccttcttcccagccctattctgtcaatccccgaattcaatgccttgacaaacatgtctaagttgcacgctggctggactgtcaagacgattgatctgacatatcccaagtcagaaggcgttgagggctacttgaagcatcttgactacatctgccaagaggctacagatgcgatcgtggcgaaagacagaatcattgtgctctctgaccgcaagacatccgctgacagagtctccgtctctgctttgcttgcatcaggaatggtccaccaccatcttgtgagcaacaaatggcgatctatggctgcgattgtccttgagacagcagaagcccgcgaagtccaccacatgtgtgttctcctcggttatggtgcggatgccatcaacccctaccttgccatggaatgtatcttgaaactgaatcgtgagggtctgattcgaaagaagctcagcgacgaccagctcatcgccaactacaagcattcttgcgatggtggcattcttaaagtcatgagcaagatgggtatctctactctggctagttacaagggtgcgcaaattttcgaggcactaggtatagacgatgaagtcgtcgaacggtgtttcagaggtacagcctcgcgcatccgaggtattacttttgagctcattgccgaggaggccttccgtttccacgagcgtggcttcccctcccgttacaccgttgctgtccctggccttccagagtcaggcgagtaccactggcgagatggtggtgaagcccacatcaacgaccccacgtcgattgccaatattcaggatgctgtgcggaccaagaatgacaaatcatacgaagcgtactcacgatccgaatatgaacaaatcaaagcctgtaccctccgtggtatgctcgatttcaagttcgaggatagcacaccaattccaatcgatcaagtcgagccttggacggagattgtacggcgcttttgcactggtgctatgtcgtatggctctatctctatggagtctcattccactttggctgtggctatgaatcgccttggcgggaagtctaacactggcgaaggtggtgaggatcctgagagatcacaagttatggccaatggcgataccatgagatctgccattaagcaagttgcatcaggccggtttggtgtcacatctgcctacctcgctgattctgacgagcttcagattaagatggcacagggtgctaagcctggtgaaggtggtgagcttcctggtcacaaggtttcgaagtcaattgctcgaaccagacactctactcccggtgttggtcttatttcaccccctcctcaccacgatatctattcgattgaggacttgaaacagctcatttacgaccttaagtgttccagtccccggtctcgtgtatctgtgaagttggtctccgagactggtgttggtattgttgcttcgggtgtcgcgaaagccaaggccgatcacatcttgatttccggccacgatggcggcacaggtgccagtcgatggactggtatcaagtatgctggtctaccttgggagttgggtctagcagagacacatcagacactagtgctgaatgacctccgtgggcgtgttgttgttcaaaccgacggtcagctgcgaacaggtcgtgacgttgctttagcttgtctacttggtgctgaagaatggggttttgctactacacccctgatcgccatgggctgtatcatgatgagaaaatgtcacctgaacacatgtcctgtcggtatcgccacacaggacccggaactgcgtaagaagtttactggcacgcctgagcatgtcataaacttcttttactacgtcgctaacgaattgcgagctattatggcccagcttggtttccgtaccatcaatgaaatggttggtcacgttgaatgtcttaaagtccgggacgacctccgaacgaacaagacccagaacatcgatctatctcttatcctcacaccggctcataagcttcgacctggtgtggctaccttcaatgttcgcaagcaggatcatcgcctctacgttcgcttggacaacaagctcatttctgaagctgagctaacgctcgagaaaggcttaccctcacgtattgaatgtgacattgtcaataccgatcgagccatgggtacttctctgtcataccaagtctccaagcggtatggagaagccgggcttcccatggataccgttcatgtcaacataaagggatctgccgggcagtcatttggtgccttccttgcacctggcatcacccttgagctggaaggcgatgcaaacgactacgtaggcaaaggtctctccggcggtcggcttattatttatccccctcgatcggcagtcttcaaggcggaagagaacattcttattggaaacgtgtgcttgtacggcgctactcaaggtacctgcttcttccgtggtattgctgccgaacgcttcgctgtgcgcaattcgggtgcgaccgctgttgttgagggcattggtgaccacggttgtgagtacatgactggtggccgtgttatcattttgggcagcactggacgcaactttgctgctggcatgtctggtggtatcgcctatgtcctggatatccacggcgatttcgaatccaaactcaatggcgagatggttgaggctagcggcattacggacccaaccgagattgctttcgtccgaggattgattgaggaccaccaccactacacagggtcagaactggccgctcgtatactaatcgacttcaacagagctctgccacgatttgttaaagttcttcctgtcgactacaagcgcgttctcgaggaggaagcagctaaggccgctgaagccaagcgtgctgagtacaatctccccatcatctccggtgtcgccaagaccgaggagaaagagaaggctgccaagctccaggacatcgaggaaacagtcggtgacaacgcagctgacaagaaacgagcgcttgttcttgacaaaaccaagggtttcatgaaataccaacgtcgttccgaaaagtaccgcagcgccaagacaagaacgaaggattgggccgagctatctcagcgtctggatgaagacgagctcaagtaccaatccgctcgttgtatggactgcggtgttccgttctgtcaatctgacagtggatgcccaatctccaatatcattccgaagtggaacgaactggtctttcaaaaccaatggcaagatgccttgaaccgcctgctgatgaccaacaacttccctgagttcaccggtcgggtctgtccggcgccttgcgaaggggcttgtgttctcgggatcaacgaagaccccgttggcatcaagtcaattgagtgcgctatcatcgaccgtggcttcgagatgggatggatggtgcctcagccgcccaaggtccgaacaggcaagactgttgctataatcggctcgggaccttctggtcttgcatgtgccgatcagctgaacaaggctgggcacagcgttaccgtttatgagcgtgcggaccgccctggtggattgctcatgtatggtattcctaacatgaagctcgacaagcgcatcgtgaagcgcagaacggacttcatggcggccgaagacatccagttcaagaccggtgtcaccattggcgaagaaatcactttgagtgatctcaaagctcaaaatgacgctgttgtaatcgccaccggagctaccgtcgctcgagaccttcctatcaagggccgcaacctggaaggcattcatttcgccatggaattcttacataagaataccaaatctctgcttgactcggagctgactgacggagcttacctttcggccaaagacaagcacgtcgtggtcattggtggtggtgataccggtaatgactgcattggtacctcggtccgtcacggtgccaagtcggtcatcaacttcgagctcttgccacagccgccgcctcagcgtggtcgcgacaatccgtggccgcagtggccccgaatctaccgcgttgactacggtcacacggaggtggcacagcacatgggtaaagatccacgcgaatactgcatcatgtctgaggaattcgttgatgatggcagcggtcgtgtcaaaggtatcaacacggtgcgcgtggagtggactaagtcagcatcaggtggctgggacatgaagaagaacgaggagaccaagcaattcttccctgccgacctcgtcctcttgtcaatgggatttctcgggccggaggcacgcgtgctcggcgaggagatcgaaaaggatgcacgcaagaacgtgaagacgcctgcgggctcttacgcaaccaatgttccgggcatcttcgctgctggtgattgtcgccgtggccagtccctgattgtctggggtatcaacgagggccgacagtccgctcgtgaggtagatctttacctccaacagtcgaccagcttgcctgtgacgggtggtatcgtcaagcgtacagccaaggagattttcaccaccgccaccaccagtcagattgtcccggctgttgctgcgtga

SEQ ID NO: 9923 - protein, 2120 aa, Muscodor strobelii
  misc_feature: SGI Peptide ID NO. 563124
  misc_feature (54)..(436): Pfam Id: PF00310 Pfam Desc: Glutamine amidotransferases class-II
  misc_feature (519)..(809): Pfam Id: PF04898 Pfam Desc: Glutamate synthase central domain
  misc_feature (869)..(1239): Pfam Id: PF01645 Pfam Desc: Conserved region in glutamate synthase
  misc_feature (1317)..(1513): Pfam Id: PF01493 Pfam Desc: GXGXG motif
  misc_feature (1753)..(1845): Pfam Id: PF00070 Pfam Desc: Pyridine nucleotide-disulphide oxidoreductase
  misc_feature (1753)..(2065): Pfam Id: PF07992 Pfam Desc: Pyridine nucleotide-disulphide oxidoreductase
  misc_feature (1761)..(1788): Pfam Id: PF01593 Pfam Desc: Flavin containing amine oxidoreductase
  misc_feature (1753)..(1788): Pfam Id: PF01266 Pfam Desc: FAD dependent oxidoreductase
  misc_feature (1753)..(1788): Pfam Id: PF00890 Pfam Desc: FAD binding domain
  misc_feature (1752)..(1787): Pfam Id: PF03486 Pfam Desc: HI0933-like protein
  misc_feature (1753)..(1786): Pfam Id: PF00070 Pfam Desc: Pyridine nucleotide-disulphide oxidoreductase
  misc_feature (25)..(2117): NCBI GI: 259484579 Blast Desc: TPA: Glutamate synthase Fragment [Source:UniProtKB/TrEMBL;Acc:Q9Y8F4] [Aspergillus nidulans FGSC A4]
  misc_feature (25)..(2120): NCBI GI: 212538269 Blast Desc: glutamate synthase Glt1, [Penicillium marneffei ATCC 18224] gi|210069032|gb|EEA23123.1| glutamate synthase Glt1, [Penicillium marneffei ATCC 18224]
  misc_feature (25)..(2114): NCBI GI: 145238840 Blast Desc: An07g09920 [Aspergillus niger] gi|134076567|emb|CAK39758.1| protein product [Aspergillus niger]
  misc_feature (25)..(2115): NCBI GI: 121702321 Blast Desc: glutamate synthase Glt1, [Aspergillus clavatus NRRL 1] gi|119397568|gb|EAW07999.1| glutamate synthase Glt1, [Aspergillus clavatus NRRL 1]
  misc_feature (25)..(2117): NCBI GI: 67537928 Blast Desc: AN5134.2 [Aspergillus nidulans FGSC A4] gi|40743125|gb|EAA62315.1| AN5134.2 [Aspergillus nidulans FGSC A4]
  misc_feature (13)..(2110): NCBI GI: 189195964 Blast Desc: glutamate synthase precursor [Pyrenophora tritici-repentis Pt-1C-BFP] gi|187980199|gb|EDU46825.1| glutamate synthase precursor [Pyrenophora tritici-repentis Pt-1C-BFP]
  misc_feature (25)..(2114): NCBI GI: 238490033 Blast Desc: glutamate synthase Glt1, [Aspergillus flavus NRRL3357] gi|220698642|gb|EED54982.1| glutamate synthase Glt1, [Aspergillus flavus NRRL3357]
  misc_feature (11)..(2119): NCBI GI: 119196223 Blast Desc: CIMG_02486 [Coccidioides immitis RS]
  misc_feature (16)..(2102): NCBI GI: 255948622 Blast Desc: Pc22g11310 [Penicillium chrysogenum Wisconsin 54-1255] gi|211592095|emb|CAP98419.1| Pc22g11310 [Penicillium chrysogenum Wisconsin 54-1255]
  misc_feature (11)..(2117): NCBI GI: 115385859 Blast Desc: glutamate synthase precursor [Aspergillus terreus NIH2624] gi|114187923|gb|EAU29623.1| glutamate synthase precursor [Aspergillus terreus NIH2624]
  misc_feature (23)..(2101): SWISSPROT Homolog: EC 1.4.1.13 Glutamate synthase (NADPH)
  misc_feature: Useful for introducing or modulating the production of volatile compounds
MGVSADFDDRQIHIESEAEAYHPYEYQTDNNGSWAGALPVKQGLYDPSLEKDACGVGFACHIKGKASHKIVSDARNLLCNMTHRGAVGSDARDGDGAGVMTSIPHRFFIKNFEKEQDIKLPPLGQYAVGNLFFKPDEETLHESKRQLEDIAESLGLRVLGWREPPVDSTLLGPAAASREPTILQPFVVLTSAYGSGSAPEMTDPEKFDERLFERQLYVLRKRATHTIGLHNWFYLCSLSNKNIVYKGQLAPVQVYQYYHDLVNADYQAHFALVHSRFSTNTFPSWDRAQPLRWAAHNGEINTLRGNKNWMRAREGVMQSDVFGDELEHLYPIVEDGGSDSAAFDNVLELLTINGVLSLPEAVMLMVPEAWQGNTAMDPKKAAFYEWAACQMEPWDGPALFTFADGRFCGANLDRNGLRPCRYYIMDDDRIICASEVGTIPVEPESVIQKGRLQPGKMLLVDTQAGRLIDDSELKAAVSSRNDFKSWIDNELISLPKVLAKVSEQDVDLAPKPDSTPLQKDPLLLAFGYTHEQVSLLLAPMASDEKEALGSMGNDAPLACLSDAPRLLYEYFRQLFAQVTNPPIDPIRESIVMSLECYVGPQGNLLEMDPSQCGRLLLPSPILSIPEFNALTNMSKLHAGWTVKTIDLTYPKSEGVEGYLKHLDYICQEATDAIVAKDRIIVLSDRKTSADRVSVSALLASGMVHHHLVSNKWRSMAAIVLETAEAREVHHMCVLLGYGADAINPYLAMECILKLNREGLIRKKLSDDQLIANYKHSCDGGILKVMSKMGISTLASYKGAQIFEALGIDDEVVERCFRGTASRIRGITFELIAEEAFRFHERGFPSRYTVAVPGLPESGEYHWRDGGEAHINDPTSIANIQDAVRTKNDKSYEAYSRSEYEQIKACTLRGMLDFKFEDSTPIPIDQVEPWTEIVRRFCTGAMSYGSISMESHSTLAVAMNRLGGKSNTGEGGEDPERSQVMANGDTMRSAIKQVASGRFGVTSAYLADSDELQIKMAQGAKPGEGGELPGHKVSKSIARTRHSTPGVGLISPPPHHDIYSIEDLKQLIYDLKCSSPRSRVSVKLVSETGVGIVASGVAKAKADHILISGHDGGTGASRWTGIKYAGLPWELGLAETHQTLVLNDLRGRVVVQTDGQLRTGRDVALACLLGAEEWGFATTPLIAMGCIMMRKCHLNTCPVGIATQDPELRKKFTGTPEHVINFFYYVANELRAIMAQLGFRTINEMVGHVECLKVRDDLRTNKTQNIDLSLILTPAHKLRPGVATFNVRKQDHRLYVRLDNKLISEAELTLEKGLPSRIECDIVNTDRAMGTSLSYQVSKRYGEAGLPMDTVHVNIKGSAGQSFGAFLAPGITLELEGDANDYVGKGLSGGRLIIYPPRSAVFKAEENILIGNVCLYGATQGTCFFRGIAAERFAVRNSGATAVVEGIGDHGCEYMTGGRVIILGSTGRNFAAGMSGGIAYVLDIHGDFESKLNGEMVEASGITDPTEIAFVRGLIEDHHHYTGSELAARILIDFNRALPRFVKVLPVDYKRVLEEEAAKAAEAKRAEYNLPIISGVAKTEEKEKAAKLQDIEETVGDNAADKKRALVLDKTKGFMKYQRRSEKYRSAKTRTKDWAELSQRLDEDELKYQSARCMDCGVPFCQSDSGCPISNIIPKWNELVFQNQWQDALNRLLMTNNFPEFTGRVCPAPCEGACVLGINEDPVGIKSIECAIIDRGFEMGWMVPQPPKVRTGKTVAIIGSGPSGLACADQLNKAGHSVTVYERADRPGGLLMYGIPNMKLDKRIVKRRTDFMAAEDIQFKTGVTIGEEITLSDLKAQNDAVVIATGATVARDLPIKGRNLEGIHFAMEFLHKNTKSLLDSELTDGAYLSAKDKHVVVIGGGDTGNDCIGTSVRHGAKSVINFELLPQPPPQRGRDNPWPQWPRIYRVDYGHTEVAQHMGKDPREYCIMSEEFVDDGSGRVKGINTVRVEWTKSASGGWDMKKNEETKQFFPADLVLLSMGFLGPEARVLGEEIEKDARKNVKTPAGSYATNVPGIFAAGDCRRGQSLIVWGINEGRQSAREVDLYLQQSTSLPVTGGIVKRTAKEIFTTATTSQIVPAVAA

SEQ ID NO: 9924 - DNA, 7298 bp, Muscodor strobelii
  misc_feature: SGI EST ID NO. CUFF.23804.2
  misc_feature: Variant of the nucleotide sequence at SEQ ID NO 9922
accaggaaccccatccccccaccaaacagctttgtccttgtagagactggaagcgcgtagaggggccgatctgctacaccatagtgccaataatctgtatacctactggtaggtggttttccttctctcctccttcggagcgacacacaaggcctggtcgctcatgtcagtccttggctcttctccctcactgccttggagatccatcctatccataaaagctagtctgttgccacacctctctcactttgctctctctccctcttccctttcctttgccaaatttacctgcgacagaatcagtcttcacaaagcgaagatatccaccgcgtcgcacagattcttgctttctttgcagatttcgctaggtcattgacaccttcacttcttcaatctcacgaacacaatcgagcttcctgatcccattccatcttgtcgctgcactagcagagcgccagcgaccgcgatcatcgaccactggtccgctacgaaccctccaaataccccgtagtttgcttgcctgacatgggcgtttcggcggacttcgacgatagacaaattcacatcgagtccgaggcggaagcctaccatccctatgaatatcaaaccgacaataatggctcctgggctggtgccctcccggtgaagcaagggttgtatgacccgagcctagagaaggatgcttgcggtgtcggtttcgcctgccacatcaagggcaaggcgagccacaagattgtcagcgatgctcgaaacttgctttgcaacatgacccatcgtggtgcggtgggttccgatgcgcgagatggtgacggtgctggtgttatgacttcaataccacacaggtttttcatcaagaattttgagaaggagcaggacatcaaactgcctccgctgggacaatatgcagtgggaaatttgttcttcaagccggatgaagagacgttgcacgagtcgaagcggcagttggaagatattgccgagtcgcttggcctaagggttttaggatggcgagaacctcctgtagactctactcttcttggccctgctgctgcctcgcgcgagcctactatccttcagcccttcgtagttctgacctctgcgtatggatctggtagtgctcctgaaatgacggacccagagaaattcgacgaaagacttttcgagagacaattgtatgtcctccgaaaacgcgccacacacaccattggtctacataactggttttacctgtgttcattgtcaaacaagaacattgtttacaagggccagcttgctccggttcaagtttaccagtattatcatgatctagtaaatgccgattatcaagcccacttcgccttggtccattcccgtttctcgaccaacaccttcccctcgtgggatcgtgctcaacccctacgatgggctgctcacaacggtgaaatcaacacgttgcgtggcaacaagaattggatgcgcgcacgagaaggtgttatgcagtcggatgttttcggcgatgaactcgagcatctgtaccctattgttgaagatggcggctccgactcggccgcgtttgataacgtacttgagcttcttactatcaatggcgtgctgtctttgcccgaagctgttatgctcatggtccccgaagcatggcaaggcaacacggccatggatcctaagaaagccgcattctacgaatgggctgcgtgccaaatggagccctgggatggacctgcgctgttcacattcgctgatggtcgtttctgcggtgcgaacttagaccgaaacgggttgagaccatgtcgatactatatcatggacgatgatcgtattatctgtgcttctgaagttggcactatacccgtagagccagagtcggttattcaaaagggtcgtctgcagcctggcaagatgttgctcgttgacacacaagccggacgtctcattgatgattcagaacttaaagctgctgtgtcgagtcggaacgacttcaagtcttggatcgacaatgagctcatttctcttcccaaggtccttgctaaggtttctgagcaggacgttgatcttgcacctaaacctgactcgacgcctcttcagaaagatccgttgctactagcatttggttacactcacgagcaagttagtctattgcttgcaccaatggcttctgacgagaaagaggctctaggctccatgggcaatgatgcgcctttggcctgtctctctgacgcacctagattgctctatgagtatttccgtcagctattcgctcaagttaccaacccacccatcgaccctatccgcgagtctatcgttatgtctttggaatgttacgttggaccccaaggcaacttgcttgagatggatccttcacagtgtggtcgactccttcttcccagccctattctgtcaatccccgaattcaatgccttgacaaacatgtctaagttgcacgctggctggactgtcaagacgattgatctgacatatcccaagtcagaaggcgttgagggctacttgaagcatcttgactacatctgccaagaggctacagatgcgatcgtggcgaaagacagaatcattgtgctctctgaccgcaagacatccgctgacagagtctccgtctctgctttgcttgcatcaggaatggtccaccaccatcttgtgagcaacaaatggcgatctatggctgcgattgtccttgagacagcagaagcccgcgaagtccaccacatgtgtgttctcctcggttatggtgcggatgccatcaacccctaccttgccatggaatgtatcttgaaactgaatcgtgagggtctgattcgaaagaagctcagcgacgaccagctcatcgccaactacaagcattcttgcgatggtggcattcttaaagtcatgagcaagatgggtatctctactctggctagttacaagggtgcgcaaattttcgaggcactaggtatagacgatgaagtcgtcgaacggtgtttcagaggtacagcctcgcgcatccgaggtattacttttgagctcattgccgaggaggccttccgtttccacgagcgtggcttcccctcccgttacaccgttgctgtccctggccttccagagtcaggcgagtaccactggcgagatggtggtgaagcccacatcaacgaccccacgtcgattgccaatattcaggatgctgtgcggaccaagaatgacaaatcatacgaagcgtactcacgatccgaatatgaacaaatcaaagcctgtaccctccgtggtatgctcgatttcaagttcgaggatagcacaccaattccaatcgatcaagtcgagccttggacggagattgtacggcgcttttgcactggtgctatgtcgtatggctctatctctatggagtctcattccactttggctgtggctatgaatcgccttggcgggaagtctaacactggcgaaggtggtgaggatcctgagagatcacaagttatggccaatggcgataccatgagatctgccattaagcaagttgcatcaggccggtttggtgtcacatctgcctacctcgctgattctgacgagcttcagattaagatggcacagggtgctaagcctggtgaaggtggtgagcttcctggtcacaaggtttcgaagtcaattgctcgaaccagacactctactcccggtgttggtcttatttcaccccctcctcaccacgatatctattcgattgaggacttgaaacagctcatttacgaccttaagtgttccagtccccggtctcgtgtatctgtgaagttggtctccgagactggtgttggtattgttgcttcgggtgtcgcgaaagccaaggccgatcacatcttgatttccggccacgatggcggcacaggtgccagtcgatggactggtatcaagtatgctggtctaccttgggagttgggtctagcagagacacatcagacactagtgctgaatgacctccgtgggcgtgttgttgttcaaaccgacggtcagctgcgaacaggtcgtgacgttgctttagcttgtctacttggtgctgaagaatggggttttgctactacacccctgatcgccatgggctgtatcatgatgagaaaatgtcacctgaacacatgtcctgtcggtatcgccacacaggacccggaactgcgtaagaagtttactggcacgcctgagcatgtcataaacttcttttactacgtcgctaacgaattgcgagctattatggcccagcttggtttccgtaccatcaatgaaatggttggtcacgttgaatgtcttaaagtccgggacgacctccgaacgaacaagacccagaacatcgatctatctcttatcctcacaccggctcataagcttcgacctggtgtggctaccttcaatgttcgcaagcaggatcatcgcctctacgttcgcttggacaacaagctcatttctgaagctgagctaacgctcgagaaaggcttaccctcacgtattgaatgtgacattgtcaataccgatcgagccatgggtacttctctgtcataccaagtctccaagcggtatggagaagccgggcttcccatggataccgttcatgtcaacataaagggatctgccgggcagtcatttggtgccttccttgcacctggcatcacccttgagctggaaggcgatgcaaacgactacgtaggcaaaggtctctccggcggtcggcttattatttatccccctcgatcggcagtcttcaaggcggaagagaacattcttattggaaacgtgtgcttgtacggcgctactcaaggtacctgcttcttccgtggtattgctgccgaacgcttcgctgtgcgcaattcgggtgcgaccgctgttgttgagggcattggtgaccacggttgtgagtacatgactggtggccgtgttatcattttgggcagcactggacgcaactttgctgctggcatgtctggtggtatcgcctatgtcctggatatccacggcgatttcgaatccaaactcaatggcgagatggttgaggctagcggcattacggacccaaccgagattgctttcgtccgaggattgattgaggaccaccaccactacacagggtcagaactggccgctcgtatactaatcgacttcaacagagctctgccacgatttgttaaagttcttcctgtcgactacaagcgcgttctcgaggaggaagcagctaaggccgctgaagccaagcgtgctgagtacaatctccccatcatctccggtgtcgccaagaccgaggagaaagagaaggctgccaagctccaggacatcgaggaaacagtcggtgacaacgcagctgacaagaaacgagcgcttgttcttgacaaaaccaagggtttcatgaaataccaacgtcgttccgaaaagtaccgcagcgccaagacaagaacgaaggattgggccgagctatctcagcgtctggatgaagacgagctcaagtaccaatccgctcgttgtatggactgcggtgttccgttctgtcaatctgacagtggatgcccaatctccaatatcattccgaagtggaacgaactggtctttcaaaaccaatggcaagatgccttgaaccgcctgctgatgaccaacaacttccctgagttcaccggtcgggtctgtccggcgccttgcgaaggggcttgtgttctcgggatcaacgaagaccccgttggcatcaagtcaattgagtgcgctatcatcgaccgtggcttcgagatgggatggatggtgcctcagccgcccaaggtccgaacaggcaagactgttgctataatcggctcgggaccttctggtcttgcatgtgccgatcagctgaacaaggctgggcacagcgttaccgtttatgagcgtgcggaccgccctggtggattgctcatgtatggtattcctaacatgaagctcgacaagcgcatcgtgaagcgcagaacggacttcatggcggccgaagacatccagttcaagaccggtgtcaccattggcgaagaaatcactttgagtgatctcaaagctcaaaatgacgctgttgtaatcgccaccggagctaccgtcgctcgagaccttcctatcaagggccgcaacctggaaggcattcatttcgccatggaattcttacataagaataccaaatctctgcttgactcggagctgactgacggagcttacctttcggccaaagacaagcacgtcgtggtcattggtggtggtgataccggtaatgactgcattggtacctcggtccgtcacggtgccaagtcggtcatcaacttcgagctcttgccacagccgccgcctcagcgtggtcgcgacaatccgtggccgcagtggccccgaatctaccgcgttgactacggtcacacggaggtggcacagcacatgggtaaagatccacgcgaatactgcatcatgtctgaggaattcgttgatgatggcagcggtcgtgtcaaaggtatcaacacggtgcgcgtggagtggactaagtcagcatcaggtggctgggacatgaagaagaacgaggagaccaagcaattcttccctgccgacctcgtcctcttgtcaatgggatttctcgggccggaggcacgcgtgctcggcgaggagatcgaaaaggatgcacgcaagaacgtgaagacgcctgcgggctcttacgcaaccaatgttccgggcatcttcgctgctggtgattgtcgccgtggccagtccctgattgtctggggtatcaacgagggccgacagtccgctcgtgaggtagatctttacctccaacagtcgaccagcttgcctgtgacgggtggtatcgtcaagcgtacagccaaggagattttcaccaccgccaccaccagtcagattgtcccggctgttgctgcgtgaagttgtcaagaatgggatgctgtccgtgattacgaagacgatgctgcagatagagggtagtccaaaactagccaagtttttgcatatttccatgattatcatgttttttcttggcgcaggttggttgggaacgggacatgtgcatgcatcaccaatgatttacgataccaccagataaaaaatgcagagggaaaagcaatgaatgttacattatctgtctatagtttttatgtgaactcttgtacctctaaatatggattcttgatcgatgccaccagtgttttgttacactcaatgatacacttcttgatcatctgttgcaccgtatttgcctctatgttctaattatgtggaaagctctctgcccctatgcgatctcagcaatactaaaatgaggagaatcattttca

SEQ ID NO: 9925 - DNA, 1119 bp, Muscodor strobelii
  misc_feature: SGI cDNA ID NO. 563125
  misc_feature: Reduced expression when VOC is produced
  misc_feature: Encodes the peptide sequence at SEQ ID NO 9926
atgttttcattacttccagaccttacaccacgtgactctcattcactatggtatacctcatcacgcaacccattcgcgtcaggcattccgaacgacgcacagctcaataacccacatgagcaccaccctaatagtgcaaacagtcaccaccagcatggacccaaccatcgccggggtgctcaacttattgaacgttcaacgctggcccgtctacgcgctgatgagcagaatatggagcgacgtcgccaaaatgtggccaatttcggcagcgcctggttaaagcccccaggacttcccaaaacgctacatcaactgcgcgaagagcgccgcgaagctgaagagcaccaggaagctctcaggcgcgagcaactcgctcaagaactggctgaagccgaggctgcaggggctgcagctgcggctggcggagatcccgctgacattgacgccgtactggatgacgctttgcagggcagcgcggctgacgacgacggtatggacgacgtgcagctggatggggctcgagacctcgatgacgatatacccgaggcggatgattttgggctcagtgtggatgacgaagacgaggatgatgatgatgacgatatggaccctgaagaacgcgagatacaggcggcgattgcgcagcgacaacaacttatggcgcagcgtatgcggcacgacaacgacgccttccgcgaggacctggcccgcggacgtgatagcactgggttctatggcgtggaagaagagattgacgaagaggaccagtctcagatgctcgaggaggaagatctcgttggcaacggtggcgacatgggcatgggcgcgaatcttgacgacgatgttcccgaggctgagagctttggtgggtatgaacacacggatacggaggccgagctgagcagcagcggggatgaatacgacaacgagcactcgcgtgcggagacgagtttcgcggtgcagcagcagtctgcgagattccggaatagtcttgcgcgcaccgatggcactcgcaatagcatggcgatcagtgacatcctgtcgcgagacggaagtagcgtactagggagtagtcctcaagtgccacggcaaagattcagtcgtcaaggacgaggttaa

SEQ ID NO: 9926 - protein, 372 aa, Muscodor strobelii
  misc_feature: SGI Peptide ID NO. 563125
  misc_feature (1)..(365): NCBI GI: 46109104 Blast Desc: FG01434.1 [Gibberella zeae PH-1]
  misc_feature (1)..(365): NCBI GI: 256730842 Blast Desc: NECHADRAFT_29911 [Nectria haematococca mpVI 77-13-4]
  misc_feature (1)..(350): NCBI GI: 145612529 Blast Desc: MGG_07188 [Magnaporthe grisea 70-15] gi|145019675|gb|EDK03903.1| MGG_07188 [Magnaporthe grisea 70-15]
  misc_feature (1)..(363): NCBI GI: 154293972 Blast Desc: BC1G_14165 [Botryotinia fuckeliana B05.10] gi|150845137|gb|EDN20330.1| BC1G_14165 [Botryotinia fuckeliana B05.10]
  misc_feature (1)..(363): NCBI GI: 156050525 Blast Desc: SS1G_07850 [Sclerotinia sclerotiorum 1980] gi|154692250|gb|EDN91988.1| SS1G_07850 [Sclerotinia sclerotiorum 1980]
  misc_feature (8)..(305): NCBI GI: 16416097 Blast Desc: conserved [Neurospora crassa]
  misc_feature (8)..(305): NCBI GI: 85083698 Blast Desc: NCU01742 [Neurospora crassa OR74A] gi|28918252|gb|EAA27929.1| NCU01742 [Neurospora crassa OR74A]
  misc_feature (1)..(126): NCBI GI: 116204983 Blast Desc: CHGG_10375 [Chaetomium globosum CBS 148.51] gi|88176503|gb|EAQ83971.1| CHGG_10375 [Chaetomium globosum CBS 148.51]
  misc_feature (5)..(188): NCBI GI: 242807640 Blast Desc: conserved [Talaromyces stipitatus ATCC 10500] gi|218715622|gb|EED15044.1| conserved [Talaromyces stipitatus ATCC 10500]
  misc_feature (1)..(106): NCBI GI: 238842835 Blast Desc: conserved [Microsporum canis CBS 113480]
  misc_feature: Useful for introducing or modulating the production of volatile compounds
MFSLLPDLTPRDSHSLWYTSSRNPFASGIPNDAQLNNPHEHHPNSANSHHQHGPNHRRGAQLIERSTLARLRADEQNMERRRQNVANFGSAWLKPPGLPKTLHQLREERREAEEHQEALRREQLAQELAEAEAAGAAAAAGGDPADIDAVLDDALQGSAADDDGMDDVQLDGARDLDDDIPEADDFGLSVDDEDEDDDDDDMDPEEREIQAAIAQRQQLMAQRMRHDNDAFREDLARGRDSTGFYGVEEEIDEEDQSQMLEEEDLVGNGGDMGMGANLDDDVPEAESFGGYEHTDTEAELSSSGDEYDNEHSRAETSFAVQQQSARFRNSLARTDGTRNSMAISDILSRDGSSVLGSSPQVPRQRFSRQGRG

SEQ ID NO: 9927 - DNA, 5005 bp, Muscodor strobelii
  misc_feature: SGI EST ID NO. CUFF.23506.0
  misc_feature: Variant of the nucleotide sequence at SEQ ID NO 9925
ttccagtcttaaccatagatggcagaacgacgatgaaattgtgattacttgcgttggcggcgtggggtgtcgtcacaagcatgccacagcattgatggtctatttgctgagtatatccacagcgcaagaacttacacgcagatatgtcgattgtccagtttctcccatttcgccgaaatctcgggtgaagatatttgccaatgggtgagatcacactggtagcgctcagtatttagtaaatggcttttgatgttgaccgctcatcatcttctatcatattacttcctgtataatatcccttagaatgctcgaaagggtctaggcctcattcgtagcatgttttgtagtgtaacttcggtggcttccgatgcatgacaatgttgcctgacaagaacaaaaggcagagtgagttgcagcgcaccagggcgttatgcagctgcggattagcctcgtgaccttcttcgtgtatgatgagacaattttgtaagaggaaattcgctcatcagtgagaggcatacattgcgtagccagatgtctagtgggagaccatagaatactttgcgattgccgcttaacccgaaaccaaagtgcgcaaaatagtcaaattcgggcatgaatgagaactgttataaacaccattatactatttctatggggtgatatttcgttgagaaaggtctctcgcatcaatgtcggatgtcaagcacgtgcagattccctgctccggcgaacatgaggtaccttactgggtccaggctcgctggcaatgcgctacgttaccagccacgagccacgagcgacagggagtattccatctcacagaacgtacaatgcagctaaatgagggctcatgcgtcacgttgcagtagattctatatactagcgcctgagttgttttttatgaacccgttcctcacagaaaagtccatgttgcgattgcgccacagctgagatcgaaaacacaccaaaagctactccgtagtgttcgcggggcgggttgagactgacatgagagacgagtccatcagcatcgtctcagaatcgcagatgtggacctggccaaggcgacaggcaaaagtccgtaacaagaccattcaagcaaaactgcggcgatactgctttaatttcttggaagcgtattgcgcttccgaaaattcccgtactatgcgcctagagatgcactctgaatcgttcggagcagatcctctaatacgggatcttattgttgcgtggccgaaaacgggctactggtgtcgctcacaagcctggcggaaataattggcgtgtcaaggaacggtatgtttcgaccgttttcgggcttgtgtccggggtattttcattacatgatgagaacaaggcgagcggcgctgatcggccggggcggacgacaacaattcagcacagacagaacgaccgtgggatgaacataaacacgaaacaggacagctggtcataactcgggcgagaaattgggggtcgagttgagaagaaaaggccagtggccgagagtttgctctcgacacttgagatgttgctagtcacttcattctaggcctaggtccgtagcccacttataatatgttcaccggaggcggttgccggcgaatcatcagaattcatcttaaatatgtctatctttttgccattggcatgttattaatccatgtaattattccaatccggaaaatccgtgcgctccagaccagaaacaggcaatgaatccatacggcagccgcaacatggcgcatagtcgagaaatatcacatgcctcataattgaacacctaggaaatgcatccctgcagccttacaactaagcatcatcaactacggattagctagttctattaatcaactagagttaggaatttgatggctttacgggcaggattctcgcaatgtcaacacagcgatcggttaatgaaagccaaaatgcatagaacatgattcgtcaattgggattcatcgatcaaattggtcgctatggccagagaagcaatcttcaatgacagtttcatttcagaaaaacggaaagagcttctctaaatagaagggctcttatgaggtagctcttgcacgaagctaaccttagtcagcacatgccccgccaacctcataatgcagcagaaaacaaacatgagaatcacaacttcattcatgctcgatattgcgcgttgaccagcccccgctactaataaagcccacatgtagaggaattaattgtacgagcacatacggtcatgcagagaagcgattgcagacacgtccctgtatcagacgcctaatctcagccaagcaaacttacaatacaatgttttcattacttccagaccttacaccacgtgactctcattcactatggtatacctcatcacgcaacccattcgcgtcaggcattccgaacgacgcacagctcaataacccacatgagcaccaccctaatagtgcaaacagtcaccaccagcatggacccaaccatcgccggggtgctcaacttattgaacgttcaacgctggcccgtctacgcgctgatgagcagaatatggagcgacgtcgccaaaatgtggccaatttcggcagcgcctggttaaagcccccaggacttcccaaaacgctacatcaactgcgcgaagagcgccgcgaagctgaagagcaccaggaagctctcaggcgcgagcaactcgctcaagaactggctgaagccgaggctgcaggggctgcagctgcggctggcggagatcccgctgacattgacgccgtactggatgacgctttgcagggcagcgcggctgacgacgacggtatggacgacgtgcagctggatggggctcgagacctcgatgacgatatacccgaggcggatgattttgggctcagtgtggatgacgaagacgaggatgatgatgatgacgatatggaccctgaagaacgcgagatacaggcggcgattgcgcagcgacaacaacttatggcgcagcgtatgcggcacgacaacgacgccttccgcgaggacctggcccgcggacgtgatagcactgggttctatggcgtggaagaagagattgacgaagaggaccagtctcagatgctcgaggaggaagatctcgttggcaacggtggcgacatgggcatgggcgcgaatcttgacgacgatgttcccgaggctgagagctttggtgggtatgaacacacggatacggaggccgagctgagcagcagcggggatgaatacgacaacgagcactcgcgtgcggagacgagtttcgcggtgcagcagcagtctgcgagattccggaatagtcttgcgcgcaccgatggcactcgcaatagcatggcgatcagtgacatcctgtcgcgagacggaagtagcgtactagggagtagtcctcaagtgccacggcaaagattcagtcgtcaaggacgaggttaagcttatgtacttgccaggtatctgttttggccttgctaaatgtgtcacttaggttctcggaaccttgcatgcatacatcgctggtgtttatatgttgagatacccctttttgttcttttaatcctaaagcaaaagacacaaatcctgttgtcacacctcaacacacacgtttctacttcgacctctaccattgcatgattgctaatagcacttcctgcagcgtaacaatagggcataaataatgatacagctattatgaggttcttcgtaaaatgatgacaagatatactttgcattcccacgtgcttgcttcgtgtagtgacgatggaatctgagaatcggccttgcggcatgatatctgccagttttaacggcagccgggatgtttggttccctcgagttatatgcatgatgcgcccgaacgccgttgcccgtgtttgaacagatcgtctttccactcctttatagtggcccctttatccatattgacatgccttaactatgatgaaattacaacatcgaaaaaaggataggctgttactcagaacagccagacgtaggtaaagatgaggatgacggcggcgaagaacaggagccagagcttccaaccgatgcccgaccgttgtgccatcaacttcatgcggttcatcgtgccgcgcaggcggttgccggtgttgtcgaacgcgtcgttcatcttctctgctaacgcgctcgagtcgcggatttcgtcgccgatagctatcgtcatctaaattcgtatttctcgtcaggccaaattcttcctcagccaaagtatcctgattccgaactcacgcctttcagcatctggactttccccattattccctggacctgcgcatcgttctgactctccagctcgctgagcactgcatcgctatattgacccttcgagttcggcgtcgccggtctgtaggatctgctctcgacgcctagatgctggcgactgttgtttccgctgttgtatccatagccgcccagtgccggactggggctgccgctagcttgccgccttgtcccatcgccgccgtagccctcgaagagcgcgcttcgtgagtctcgttggtggagcgtcgagttcccgaatctgaccacgtgatgtcatcatgttagtgagctgtaggcgaaagtccactgtaggagtggatatggcatttgcaaatggccgatatatctcgtagtgtttgcgactcggagaatatgaaagagctgcatgaccttaaacgtgcaacaggatgcacaggaaatgaggatctcacgtaccttgacgccatgttcacataggtagatttggacaaaggttggtcggttgaaaatgcccaacagatctaagatgccacttcttgttctcaggttggacgtggcatacgtagcaaattgaagcttcgtcggtctggtgacgggtgggggcaggtgaatcaaaacaccttgtaccttgcgtcatcgccttaatgatagtttcacaacgagtttggtctgatctatcatgcagtttcaattctaacttcttaccctttgtctttttaatatattctaacaatgtctgtatatgtaagcc

SEQ ID NO: 9928 - DNA, 750 bp, Muscodor strobelii
  misc_feature: SGI cDNA ID NO. 563127
  misc_feature: Encodes the peptide sequence at SEQ ID NO 9929
atgaacttcaaaagattaacattctgtctttcaatagctgctcaagctattgcagcaccaactgcggctaagaccccggcttttatcttggctggtgatagcacgacagcagtacaatccaccggcggtggtggatggggaaacggcttcatctcgttcttgatcagtccagcatggggagtcaacaaaggtcataatggtgccaccacagtgagctttgtcgatggtggcgactgggctactgtgaagaaatacgtttccgataacgttgccaaatacgacccctatgtgaccattcagttcgggcacaacgatcagaaagcagacaagaatatctcgttggcacaataccagacaaacttgcaaaacctcgctaaggatatcttgaaccttggcgggacaccgctactggtgactccgttgacaagacgttccttcacatcagaacacgtcgcatcagattcattacacgaccagagacttgcaaccatcgcggcagcaaatgctgtaggcgtgacttatctagatctgaaccaagcaagtctcacatacgtagacgcaatcggcgaggacgcggcacataagtacaatttagttgccgacgacaacacgcacctgaatgactatggcagtattgtatttggtcgtatgctagcggacttgttgattgcgaagaagagtgacctggagcagtggattagaccgaatcagacactcagtaacgctattgcgaatggacaaccagcttga

SEQ ID NO: 9929 - protein, 249 aa, Muscodor strobelii
  misc_feature: SGI Peptide ID NO. 563127
  misc_feature (28)..(218): Pfam Id: PF00657 Pfam Desc: GDSL-like Lipase/Acylhydrolase
  misc_feature (1)..(249): NCBI GI: 238500415 Blast Desc: conserved [Aspergillus flavus NRRL3357] gi|220693195|gb|EED49541.1| conserved [Aspergillus flavus NRRL3357]
  misc_feature (17)..(246): NCBI GI: 154295940 Blast Desc: BC1G_13123 [Botryotinia fuckeliana B05.10] gi|150843775|gb|EDN18968.1| BC1G_13123 [Botryotinia fuckeliana B05.10]
  misc_feature (1)..(249): NCBI GI: 169779743 Blast Desc: [Aspergillus oryzae RIB40] gi|83773075|dbj|BAE63203.1| protein product [Aspergillus oryzae]
  misc_feature (2)..(246): NCBI GI: 156039824 Blast Desc: SS1G_12048 [Sclerotinia sclerotiorum 1980] gi|154696105|gb|EDN95843.1| SS1G_12048 [Sclerotinia sclerotiorum 1980]
  misc_feature (21)..(247): NCBI GI: 169775735 Blast Desc: [Aspergillus oryzae RIB40] gi|83771069|dbj|BAE61201.1| protein product [Aspergillus oryzae]
  misc_feature (1)..(246): NCBI GI: 119482343 Blast Desc: GDSL-like lipase/acylhydrolase, [Neosartorya fischeri NRRL 181] gi|119409354|gb|EAW19303.1| GDSL-like lipase/acylhydrolase, [Neosartorya fischeri NRRL 181]
  misc_feature (1)..(246): NCBI GI: 159130112 Blast Desc: esterase, [Aspergillus fumigatus A1163]
  misc_feature (21)..(247): NCBI GI: 238502375 Blast Desc: esterase, [Aspergillus flavus NRRL3357] gi|220691231|gb|EED47579.1| esterase, [Aspergillus flavus NRRL3357]
  misc_feature (12)..(246): NCBI GI: 116208394 Blast Desc: CHGG_03490 [Chaetomium globosum CBS 148.51] gi|88184087|gb|EAQ91555.1| CHGG_03490 [Chaetomium globosum CBS 148.51]
  misc_feature (1)..(246): NCBI GI: 71002756 Blast Desc: esterase [Aspergillus fumigatus Af293] gi|66853697|gb|EAL94021.1| esterase, [Aspergillus fumigatus Af293]
MNFKRLTFCLSIAAQAIAAPTAAKTPAFILAGDSTTAVQSTGGGGWGNGFISFLISPAWGVNKGHNGATTVSFVDGGDWATVKKYVSDNVAKYDPYVTIQFGHNDQKADKNISLAQYQTNLQNLAKDILNLGGTPLLVTPLTRRSFTSEHVASDSLHDQRLATIAAANAVGVTYLDLNQASLTYVDAIGEDAAHKYNLVADDNTHLNDYGSIVFGRMLADLLIAKKSDLEQWIRPNQTLSNAIANGQPA

SEQ ID NO: 9930 - DNA, 873 bp, Muscodor strobelii
  misc_feature: SGI EST ID NO. CUFF.23462.0
  misc_feature: Variant of the nucleotide sequence at SEQ ID NO 9928
agacaatcctgtcgtgattcatgggtgggagcatcgtgtactgctcaagctattgcagcaccaactgcggctaagaccccggcttttatcttggctggtgatagcacgacagcagtacaatccaccggcggtggtggatggggaaacggcttcatctcgttcttgatcagtccagcatggggagtcaacaaaggtcataatggtgccaccacagtgagctttgtcgatggtggcgactgggctactgtgaagaaatacgtttccgataacgttgccaaatacgacccctatgtgaccattcagttcgggcacaacgatcagaaagcagacaagaatatctcgttggcacaataccagacaaacttgcaaaacctcgctaaggatatcttgaaccttggcgggacaccgctactggtgactccgttgacaagacgttccttcacatcagaacacgtcgcatcagattcattacacgaccagagacttgcaaccatcgcggcagcaaatgctgtaggcgtgacttatctagatctgaaccaagcaagtctcacatacgtagacgcaatcggcgaggacgcggcacataagtacaatttagttgccgacgacaacacgcacctgaatgactatggcagtattgtatttggtcgtatgctagcggacttgttgattgcgaagaagagtgacctggagcagtggattagaccgaatcagacactcagtaacgctattgcgaatggacaaccagcttgatggttgttggtggactcgtgagaagtgactgtcagcatcacagtcgcagacttctatgtctataacaaacaagataccaagcttgtttccctacaattaaaatgaataagtatatccgtc

SEQ ID NO: 9931 - DNA, 1206 bp, Muscodor strobelii
  misc_feature: SGI cDNA ID NO. 563128
  misc_feature: Elevated expression when VOC is produced
  misc_feature: Encodes the peptide sequence at SEQ ID NO 9932
atgactaaaattgtagatatttccgcgatccttgaggtagcggagtcattgcgacaagatggtctatctggagtgattttccatggtcctgacaacaaaagttcccctggtgctatcaatcatacttacggcgtgggattctctaattgcgatgcttgggcagttcgatttccctggctcggagagcctaacctcgatgctagctctgtcacggatcttgtgagacacgaaatggacattctcagagatctcgaagttgccggattttgctggtctccacgtttgatcgggggggacatcagcttccacaacccgatgaagcatccttatttggttgtcacctggatacatgggaggcccttggaatggacgccgtcgaacccacctcaggaaaatcagagggacaaggtccttcgccagttagtagacatccaactagagctgattaactctactatccgaccaaacacgggaagctcagccatcaaatgtctaacagatgccattgatggccagatattccgagtgctagaaggaatgctacccgagctcaagctcaaaggctgcttcgcacatcggtctctggtctgccgttctatcgatgatcatgtccagcctccagcactagctatctcgcataacaatatggcctcacataagatcattatcgatgacaacctaaacataagaggcattgtcgattggaaattcgccagattccgacccttagaattggccatacaactccccaaatttctgaccatagatgaagacagtatattctctccaaacaccgcaaatactccatcggaatctataaacttatcgatcgagccttcctcgcagcttctagctgatcgacagctcattacgacatacttgaagtctcttaacgataattgggaactacctaagcgcataataccgcgagcatttcttgcctatcgtattagaactatcatctcaaatcctaatgttgactggcaggatctgctggtcaaatcatgcttcagcaaggggttgagtcgcgatatggatcggcattcatggttcttgagtagtttacggggatctttaggcgaacttgcagatgtctcagttagtgaacttgctgctgaaggtctcgagcggtttctagcggcatccgcaggcaaggatggagtagatcgagagcagatattgagaatgttctacgatgaggactga

SEQ ID NO: 9932 - protein, 401 aa, Muscodor strobelii
  misc_feature: SGI Peptide ID NO. 563128
  misc_feature (5)..(238): NCBI GI: 225562332 Blast Desc: conserved [Ajellomyces capsulatus G186AR]
  misc_feature (37)..(253): NCBI GI: 115400407 Blast Desc: conserved [Aspergillus terreus NIH2624] gi|114191458|gb|EAU33158.1| conserved [Aspergillus terreus NIH2624]
  misc_feature (107)..(250): NCBI GI: 115395650 Blast Desc: [Aspergillus terreus NIH2624] gi|114193095|gb|EAU34795.1| [Aspergillus terreus NIH2624]
  misc_feature (5)..(257): NCBI GI: 258568712 Blast Desc: [Uncinocarpus reesii 1704] gi|237906546|gb|EEP80947.1| [Uncinocarpus reesii 1704]
  misc_feature: Useful for introducing or modulating the production of volatile compounds
MTKIVDISAILEVAESLRQDGLSGVIFHGPDNKSSPGAINHTYGVGFSNCDAWAVRFPWLGEPNLDASSVTDLVRHEMDILRDLEVAGFCWSPRLIGGDISFHNPMKHPYLVVTWIHGRPLEWTPSNPPQENQRDKVLRQLVDIQLELINSTIRPNTGSSAIKCLTDAIDGQIFRVLEGMLPELKLKGCFAHRSLVCRSIDDHVQPPALAISHNNMASHKIIIDDNLNIRGIVDWKFARFRPLELAIQLPKFLTIDEDSIFSPNTANTPSESINLSIEPSSQLLADRQLITTYLKSLNDNWELPKRIIPRAFLAYRIRTIISNPNVDWQDLLVKSCFSKGLSRDMDRHSWFLSSLRGSLGELADVSVSELAAEGLERFLAASAGKDGVDREQILRMFYDED

SEQ ID NO: 9933 - DNA, 1542 bp, Muscodor strobelii
  misc_feature: SGI EST ID NO. CUFF.23475.0
  misc_feature: Variant of the nucleotide sequence at SEQ ID NO 9931
ttcgacctgactttatttgctagcatacaatgcgtcaagtagtttttctttgcgcagaggtggttgagatgcgtctaacctcgagtgaagatcccaacaaagttaacaactgtgggaaacttactatatcaacacatgcgataccatgactaaaattgtagatatttccgcgatccttgaggtagcggagtcattgcgacaagatggtctatctggagtgattttccatggtcctgacaacaaaagttcccctggtgctatcaatcatacttacggcgtgggattctctaattgcgatgcttgggcagttcgatttccctggctcggagagcctaacctcgatgctagctctgtcacggatcttgtgagacacgaaatggacattctcagagatctcgaagttgccggattttgctggtctccacgtttgatcgggggggacatcagcttccacaacccgatgaagcatccttatttggttgtcacctggatacatgggaggcccttggaatggacgccgtcgaacccacctcaggaaaatcagagggacaaggtccttcgccagttagtagacatccaactagagctgattaactctactatccgaccaaacacgggaagctcagccatcaaatgtctaacagatgccattgatggccagatattccgagtgctagaaggaatgctacccgagctcaagctcaaaggctgcttcgcacatcggtctctggtctgccgttctatcgatgatcatgtccagcctccagcactagctatctcgcataacaatatggcctcacataagatcattatcgatgacaacctaaacataagaggcattgtcgattggaaattcgccagattccgacccttagaattggccatacaactccccaaatttctgaccatagatgaagacagtatattctctccaaacaccgcaaatactccatcggaatctataaacttatcgatcgagccttcctcgcagcttctagctgatcgacagctcattacgacatacttgaagtctcttaacgataattgggaactacctaagcgcataataccgcgagcatttcttgcctatcgtattagaactatcatctcaaatcctaatgttgactggcaggatctgctggtcaaatcatgcttcagcaaggggttgagtcgcgatatggatcggcattcatggttcttgagtagtttacggggatctttaggcgaacttgcagatgtctcagttagtgaacttgctgctgaaggtctcgagcggtttctagcggcatccgcaggcaaggatggagtagatcgagagcagatattgagaatgttctacgatgaggactgatcgaagaagagttcggctatctcgcagaatattggtcgtacgagtgatgatgatgacgaaaatgataaagattgatgatcataggttctcctaactgaaatccaagtatcagaattctgcctgtgaaaccagttaattacaaagacgcccttagtcatctcctttcaatgaatgcaacgaatactttgcgc

SEQ ID NO: 9934 - DNA, 1953 bp, Muscodor strobelii
  misc_feature: SGI cDNA ID NO. 563129
  misc_feature: Encodes the peptide sequence at SEQ ID NO 9935
atgtggtctctactacagatttcatgggcttggcatcgtttgttacttgcaaagaagaatctaattcgtactctcccatctatcattttggcggccctttgcttcgtcgctttttcactcgccagtggcttctcgtcaagcatctcgacggcaattggagacgaagttctaattgacggaacgaattgcggttatcttgattcggatatcctgaatggggagcaagacacccagattaagcctccttggatcgccggcctagttgagaacggcgccaattatgcgcagcaagtttattcacctaacagcactggcacattcggcgacacagtgtttgttcgatccaagctcaatacggcttctgtcatcgaagcagactacactggctacatagatattgctgaagaccttggcgttaatcttcctcctgaggaaggggtccttcttcgacaggtttggcaatgtgcgccgttagttacaaaagggcatgaattttcgacagatttacgtggagtttccggatacacttcttactactacggtcacatgttcgtatcgcctttgagcgatccagagaactacactttcattgtcaaggatgttgaagctcaatatgttctcgcatcttctcatctgtctctcccttcctacggtctagtggtatttgagtctttcacttatggtggcgtcagcgctcgtggcgacttgtttcctgaaataggactacgaaggaatgattcggacttatatctcatgttccttgtaggaaatggagtggtagcatcaaagccagtcgaggatccatggtatcgtttcaacgtcgagtcaaatattacacttgtgaattcagaaaaaaaccagagcttccatacctatcagccaagtcaggctgcctctcctcttggctgtgctgtccaagcacaagtatgccaagggactgtcgcgagccatcgatcttgcgggcctctagcgagtttcaatgatgcatgggctggcgcgtcactcaagtttggtgttgacatgagagattacgaaacatatgactcattcgataaaatcgtcgaagctcactcaatgcaagagcgtgccagccgttttctgtggctttggctgatcgccgcacaatatccctctaagcttgctgaggtgattttgaatttgggttcgaaatcactaacttctcaactagggctagtcaatggattacaagggccactcccaaatgatcaatggaagcaagacgtattcaactggtggaacatatcactcgcattactgcaagcttcgctagtcgacacggcttacgggccaagaaacacggctgttcttggaatacagaaaaatacaacgaatccaggacagaaaagtctatgccagaatcagaaagtacgcacaactcaatacgtatctctcagtctgtttggattgtacttcgtttatatcacaggagtcctcattgtagccatttcactcatcttaggcccagcactcacctacgctcagaagcggtggagatacaaagaatacgagaatctcgaatggactagcaatcaaacgttgcatcttcaacggcttgcttacgacgaaagcggacaaggagactggatagggtgcactgactcgattccggtcactgctgttgaccaactgcttcgtccgctcgatctcacagacccggaacatccgaggtttggaagctacaagcctcaagatgccagcgaagagatccataaaccgccattcgctactctgagcttaagtgaagagcatacccacgccacaggtctacaatctcagagtgggcagacggaaagctctggtagcgaaagtgggaatactgagtctagccatgaacctgaacaggattccatcgatacggcctttgaagacttcggcgaagcatcaacgggccccctggctgcactgccccataatacacccgaagacagctaa

SEQ ID NO: 9935 - protein, 650 aa, Muscodor strobelii
  misc_feature: SGI Peptide ID NO. 563129
  misc_feature (4)..(634): NCBI GI: 169615058 Blast Desc: SNOG_10683 [Phaeosphaeria nodorum SN15] gi|111060957|gb|EAT82077.1| SNOG_10683 [Phaeosphaeria nodorum SN15]
  misc_feature (2)..(564): NCBI GI: 189194015 Blast Desc: conserved [Pyrenophora tritici-repentis Pt-1C-BFP] gi|187978910|gb|EDU45536.1| conserved [Pyrenophora tritici-repentis Pt-1C-BFP]
  misc_feature (1)..(545): NCBI GI: 70986226 Blast Desc: conserved [Aspergillus fumigatus Af293] gi|66846236|gb|EAL86569.1| conserved [Aspergillus fumigatus Af293]
  misc_feature (1)..(545): NCBI GI: 159128250 Blast Desc: conserved [Aspergillus fumigatus A1163]
  misc_feature (1)..(579): NCBI GI: 115399382 Blast Desc: [Aspergillus terreus NIH2624] gi|114192163|gb|EAU33863.1| [Aspergillus terreus NIH2624]
  misc_feature (1)..(545): NCBI GI: 119474227 Blast Desc: NFIA_004500 [Neosartorya fischeri NRRL 181] gi|119407142|gb|EAW17092.1| conserved [Neosartorya fischeri NRRL 181]
  misc_feature (38)..(551): NCBI GI: 169772941 Blast Desc: [Aspergillus oryzae RIB40] gi|83768800|dbj|BAE58937.1| protein product [Aspergillus oryzae]
  misc_feature (3)..(544): NCBI GI: 256723662 Blast Desc: NECHADRAFT_86728 [Nectria haematococca mpVI 77-13-4]
  misc_feature (2)..(531): NCBI GI: 121699395 Blast Desc: ACLA_082720 [Aspergillus clavatus NRRL 1] gi|119396149|gb|EAW06581.1| ACLA_082720 [Aspergillus clavatus NRRL 1]
  misc_feature (2)..(545): NCBI GI: 46116086 Blast Desc: FG03885.1 [Gibberella zeae PH-1]
MWSLLQISWAWHRLLLAKKNLIRTLPSIILAALCFVAFSLASGFSSSISTAIGDEVLIDGTNCGYLDSDILNGEQDTQIKPPWIAGLVENGANYAQQVYSPNSTGTFGDTVFVRSKLNTASVIEADYTGYIDIAEDLGVNLPPEEGVLLRQVWQCAPLVTKGHEFSTDLRGVSGYTSYYYGHMFVSPLSDPENYTFIVKDVEAQYVLASSHLSLPSYGLVVFESFTYGGVSARGDLFPEIGLRRNDSDLYLMFLVGNGVVASKPVEDPWYRFNVESNITLVNSEKNQSFHTYQPSQAASPLGCAVQAQVCQGTVASHRSCGPLASFNDAWAGASLKFGVDMRDYETYDSFDKIVEAHSMQERASRFLWLWLIAAQYPSKLAEVILNLGSKSLTSQLGLVNGLQGPLPNDQWKQDVFNWWNISLALLQASLVDTAYGPRNTAVLGIQKNTTNPGQKSLCQNQKVRTTQYVSLSLFGLYFVYITGVLIVAISLILGPALTYAQKRWRYKEYENLEWTSNQTLHLQRLAYDESGQGDWIGCTDSIPVTAVDQLLRPLDLTDPEHPRFGSYKPQDASEEIHKPPFATLSLSEEHTHATGLQSQSGQTESSGSESGNTESSHEPEQDSIDTAFEDFGEASTGPLAALPHNTPEDS

SEQ ID NO: 9936 - DNA, 453 bp, Muscodor strobelii
  misc_feature: SGI cDNA ID NO. 563130
  misc_feature: Encodes the peptide sequence at SEQ ID NO 9937
atgtccaccccaatcccgcccatctaccgaacactcttcacactaatcgagccctgtctcgcaaccatcggcgctctgcaatccctcctcttacctcacctcctcctatcctcaaccctcccatcaatcccctacactcccactctcaccccattcttcacccaaatgacaggctcctggctcatgctagcctaccacgacttctacatcctacggcacgagtcctctctcaaggtttggcgacagaccctcgtcgcctcctcaatcagcgatatattccacaccatcgccttatatcagagcatgggacccgcctggtttttcgacccccttcgctggaacgtcgtgaatgctgtcgccataatcacgaccgtgggtccattcatcgcgaaattactcttcctcgccggcgttggattaccgaaggaagacgcgaacaagaagacggattga

SEQ ID NO: 9937 - protein, 150 aa, Muscodor strobelii
  misc_feature: SGI Peptide ID NO. 563130
  misc_feature (3)..(149): NCBI GI: 256722236 Blast Desc: NECHADRAFT_52470 [Nectria haematococca mpVI 77-13-4]
  misc_feature (3)..(150): NCBI GI: 46113579 Blast Desc: FG02936.1 [Gibberella zeae PH-1]
  misc_feature (5)..(148): NCBI GI: 156037522 Blast Desc: SS1G_12475 [Sclerotinia sclerotiorum 1980] gi|154697883|gb|EDN97621.1| SS1G_12475 [Sclerotinia sclerotiorum 1980]
  misc_feature (8)..(150): NCBI GI: 256726501 Blast Desc: NECHADRAFT_79505 [Nectria haematococca mpVI 77-13-4]
  misc_feature (12)..(150): NCBI GI: 242812877 Blast Desc: TSTA_100560 [Talaromyces stipitatus ATCC 10500] gi|218714389|gb|EED13812.1| TSTA_100560 [Talaromyces stipitatus ATCC 10500]
  misc_feature (12)..(150): NCBI GI: 242812873 Blast Desc: TSTA_100560 [Talaromyces stipitatus ATCC 10500] gi|218714388|gb|EED13811.1| TSTA_100560 [Talaromyces stipitatus ATCC 10500]
  misc_feature (12)..(150): NCBI GI: 212544584 Blast Desc: PMAA_003000 [Penicillium marneffei ATCC 18224] gi|210065415|gb|EEA19509.1| PMAA_003000 [Penicillium marneffei ATCC 18224]
  misc_feature (5)..(150): NCBI GI: 261354010 Blast Desc: conserved [Verticillium albo-atrum VaMs.102]
  misc_feature (14)..(148): NCBI GI: 67537252 Blast Desc: AN4796.2 [Aspergillus nidulans FGSC A4] gi|40741176|gb|EAA60366.1| AN4796.2 [Aspergillus nidulans FGSC A4] gi|259482358|tpe|CBF76765.1| TPA: conserved [Aspergillus FGSC
  misc_feature (6)..(103): NCBI GI: 256722604 Blast Desc: NECHADRAFT_9671 [Nectria haematococca mpVI 77-13-4]
MSTPIPPIYRTLFTLIEPCLATIGALQSLLLPHLLLSSTLPSIPYTPTLTPFFTQMTGSWLMLAYHDFYILRHESSLKVWRQTLVASSISDIFHTIALYQSMGPAWFFDPLRWNVVNAVAIITTVGPFIAKLLFLAGVGLPKEDANKKTD

SEQ ID NO: 9938 - DNA, 3063 bp, Muscodor strobelii
  misc_feature: SGI cDNA ID NO. 563131
  misc_feature: Encodes the peptide sequence at SEQ ID NO 9939
atggccctcgatccgcactccctccttgctcagctcaatgcgaccccttccgaccgcaatgccgccctccggtcgctgaagaatgatgttatcggtgacatccagaagaagaaagcctgggtccggcacggtgttgttcctcatatcgtccgggttctgcatgccacggccagagacacgtccgcaaatcctcggcggcagtctttcctcgcccagaatcccttctccgaggacgagactgctcagttacaagctctgcagttgctggcaagctttgcaacagctggtccggccttcttgtttcctctctatgcctctggcgttctgcaggccgtcctgagcccctcctgtcttcagagcgaccgctcaaacatcgttctcgctgcccttcgcgtggtcaaaggcattgctgtggccgcgccctccgcctccgccacctcgcccatcaatgctagatcgctggctgacctcatattcgctaatactcacttgccaagcttgttgaagatactggcccccacggaatcctccagcgacagcgaatcccagatcctcatcgttgcttttctcatcaggagtctttgccgagaagagaaacatcaaaatgccctggccgaagatggcatactggacgccctggctacgaagcttgcaggcttcgcagtagcggagggccatgttcttccaggagccgaagtgcgtgccaagatggagggtttggacgactacataccgcagcctgcaagttcaagtgcgagcctcgatgaggtgcttggcgccattgctgccatcgtcaccgaatcgccctttcgggcctccaagctattatattccccatcaatcctcgccatcttccccaacttcgccaatgcgcgatcgaacaagcccaattcgccacctgaatttatcatattgcctggtctgagtccaacgagacctaaagagtcggatatggacttcctcctcccattcacacctccttttacccgagggcacggtcatcatcacaccactgtgtccgctggaactccagtatccaaagatggctctggggctaacggtcggccatcatcgaagttgcagtccagccatgtttcgtggacccctccggaagaagccacccctcgcactactgagacagcctcggtcgaggtcgaaagtccgctggtgccatggttgattcatctagtccgtacgcgaaaaggcaccgagtcactcatggcggcttccgttcttacgtccctatttaagacgggatgtgcatacaataaggttagagagcagacagtaggtcttcttgtagttccaatccttctgtggttgctcgaagacgccgagactcaagccaaagacggttcaacagaaacctcgaatcgtgacataatggccaaaatcaacgttctcgaagaagcgccggcggtactttcacgcctcataacggacagcgagcacctgcaaaaggctgcatttgattgcaatgccgtcaagaccatctgcaggttatttaagagcagttttaacatgtcgtttgctactgtcgagtcgcatccctggtcaccccatgggagctcgactgaaaatatggacggcctggcgccggagtgtcgactgggagatgatggtcagcatcctcaactgattcaccagatgaggttgagagaaagctccctcagagcacttggtgctttggcaatattcaaggaagaatatcgcaaggcaattgttcaacaagacgcgattccttgcatagttgattgcttgggccaacctgactccaacccatccgagcatgcaaaagactacaccgtgtccaatcgcagaaaggcccgattcgagaacaacacgtcgtctattctcgtggcggcttgttactgtgttagaatgctatctcgttccgtcagcactctacgaactgccatgatcgatcacggagcttcaaagcctttactcaagctactagttgatgatgatgtagaagttcagattgctgctacacaatgtcttatcaatttgctacctgaatttagtcctacgagagagcccttggtagaagctggcattgcgtcagtcttgattgggcacgctcattccgaaaaccctggcttgcgtctcgaggctctatgggctctcaagcacctggtagattctgcaagtgtcgatctcaagaaaagttgcatcgagggtctcgaccctgagtggttgttcacggtcatcagcgatgacacagaaggtgatacaccattctcgtcccgatcgcgaactcaactaacgttggcaatgcctgaagacatggatgaagatgtcgatatgggggttttggatgagcaggcatactggcccacgagctcctcttataaaaccactacctcaaattcgcgggccgaatcagatatcagaattctgaaattagcagactcgcgtctagccgatctcaaagaaagcgaattgagcccggtccgaaaggccaggggtgacaatctctctatacaagaacaaggtcttcagctcattcgaaatctgatcggtggttctgactctattggtggccctccaactgcctcgcgcgacactgccgaaatgatcgagtatatcttcaaagctgtcggccaacagagactttttgatatgcttgcagccaaattacggccaaaagtgcttcatccgttcaaccgacgaggcaccagtggtagtgaaaagaccaggattctacctcctcagaatcgcattattgagtctgtgctctggattctggttcacattgcggccagcgaaccgcactatcgacagctcattattgcacaaacggaaatgctcaaacagatagcgaaactgtttagtagtacagcgggacaagtccgacttgcattgtgtcagttgatgaataacttgacctggcaggatgaccatcttgacgcggttggttcttcgcagcgcgcgatggaactgaaaagcatgggtttcgacaggaagctcgaaggtctccgaacagatgatgaggagctcgacgttagagagcgagctaagtcggctgtctggcagatgcaggccggttatcattcgtag

SEQ ID NO: 9939 - protein, 1020 aa, Muscodor strobelii
  misc_feature: SGI Peptide ID NO. 563131
  misc_feature (675)..(715): Pfam Id: PF00514 Pfam Desc: Armadillo/beta-catenin-like repeat
  misc_feature (8)..(1018): NCBI GI: 256730841 Blast Desc: NECHADRAFT_89814 [Nectria haematococca mpVI 77-13-4]
  misc_feature (15)..(1016): NCBI GI: 156059468 Blast Desc: SS1G_03746 [Sclerotinia sclerotiorum 1980] gi|154701533|gb|EDO01272.1| SS1G_03746 [Sclerotinia sclerotiorum 1980]
  misc_feature (17)..(1017): NCBI GI: 145604416 Blast Desc: MGG_08557 [Magnaporthe grisea 70-15] gi|145012413|gb|EDJ97069.1| MGG_08557 [Magnaporthe grisea 70-15]
  misc_feature (6)..(1018): NCBI GI: 46109114 Blast Desc: FG01439.1 [Gibberella zeae PH-1]
  misc_feature (17)..(1015): NCBI GI: 261358584 Blast Desc: armadillo repeat protein [Verticillium albo-atrum VaMs.102]
  misc_feature (5)..(1010): NCBI GI: 164428151 Blast Desc: NCU01737 [Neurospora crassa OR74A] gi|16416101|emb|CAB92635.2| conserved [Neurospora crassa] gi|157072032|gb|EAA27924.2| NCU01737 [Neurospora crassa OR74A]
  misc_feature (17)..(1016): NCBI GI: 154316394 Blast Desc: BC1G_04128 [Botryotinia fuckeliana B05.10] gi|150845928|gb|EDN21121.1| BC1G_04128 [Botryotinia fuckeliana B05.10]
  misc_feature (11)..(1015): NCBI GI: 116204991 Blast Desc: CHGG_10379 [Chaetomium globosum CBS 148.51] gi|88176507|gb|EAQ83975.1| CHGG_10379 [Chaetomium globosum CBS 148.51]
  misc_feature (3)..(1015): NCBI GI: 171689130 Blast Desc: protein product [Podospora anserina] gi|170944527|emb|CAP70638.1| protein product [Podospora anserina]
  misc_feature (17)..(1020): NCBI GI: 67537974 Blast Desc: AN5157.2 [Aspergillus nidulans FGSC A4] gi|40743148|gb|EAA62338.1| AN5157.2 [Aspergillus nidulans FGSC A4] gi|259484609|tpe|CBF80979.1| TPA: armadillo repeat protein
MALDPHSLLAQLNATPSDRNAALRSLKNDVIGDIQKKKAWVRHGVVPHIVRVLHATARDTSANPRRQSFLAQNPFSEDETAQLQALQLLASFATAGPAFLFPLYASGVLQAVLSPSCLQSDRSNIVLAALRVVKGIAVAAPSASATSPINARSLADLIFANTHLPSLLKILAPTESSSDSESQILIVAFLIRSLCREEKHQNALAEDGILDALATKLAGFAVAEGHVLPGAEVRAKMEGLDDYIPQPASSSASLDEVLGAIAAIVTESPFRASKLLYSPSILAIFPNFANARSNKPNSPPEFIILPGLSPTRPKESDMDFLLPFTPPFTRGHGHHHTTVSAGTPVSKDGSGANGRPSSKLQSSHVSWTPPEEATPRTTETASVEVESPLVPWLIHLVRTRKGTESLMAASVLTSLFKTGCAYNKVREQTVGLLVVPILLWLLEDAETQAKDGSTETSNRDIMAKINVLEEAPAVLSRLITDSEHLQKAAFDCNAVKTICRLFKSSFNMSFATVESHPWSPHGSSTENMDGLAPECRLGDDGQHPQLIHQMRLRESSLRALGALAIFKEEYRKAIVQQDAIPCIVDCLGQPDSNPSEHAKDYTVSNRRKARFENNTSSILVAACYCVRMLSRSVSTLRTAMIDHGASKPLLKLLVDDDVEVQIAATQCLINLLPEFSPTREPLVEAGIASVLIGHAHSENPGLRLEALWALKHLVDSASVDLKKSCIEGLDPEWLFTVISDDTEGDTPFSSRSRTQLTLAMPEDMDEDVDMGVLDEQAYWPTSSSYKTTTSNSRAESDIRILKLADSRLADLKESELSPVRKARGDNLSIQEQGLQLIRNLIGGSDSIGGPPTASRDTAEMIEYIFKAVGQQRLFDMLAAKLRPKVLHPFNRRGTSGSEKTRILPPQNRIIESVLWILVHIAASEPHYRQLIIAQTEMLKQIAKLFSSTAGQVRLALCQLMNNLTWQDDHLDAVGSSQRAMELKSMGFDRKLEGLRTDDEELDVRERAKSAVWQMQAGYHS

SEQ ID NO: 9940 - DNA, 4384 bp, Muscodor strobelii
  misc_feature: SGI EST ID NO. CUFF.23502.0
  misc_feature: Variant of the nucleotide sequence at SEQ ID NO 9938
caatagcttaccccagacccagcgcggtttcgatggggcccattcccgtcattgccctgtcaataaaccatcgacgagacaccaagtttagttgcagccttatctaatccatcacctccggccaagacccggcggctgcgcattgacaacctgaactcggtcaacattcgctttgttcggctctcccgcaccaccaacaattaagcactttataccggaagttccacgacagcactcaacgcgtagctgatatctggtgcaactttggattctctactgggcttcacgccgccatcgcgcgccgccatggccctcgatccgcactccctccttgctcagctcaatgcgaccccttccgaccgcaatgccgccctccggtcgctgaagaatgatgttatcggtgacatccagaagaagaaagcctgggtccggcacggtgttgttcctcatatcgtccgggttctgcatgccacggccagagacacgtccgcaaatcctcggcggcagtctttcctcgcccagaatcccttctccgaggacgagactgctcagttacaagctctgcagttgctggcaagctttgcaacagctggtccggccttcttgtttcctctctatgcctctggcgttctgcaggccgtcctgagcccctcctgtcttcagagcgaccgctcaaacatcgttctcgctgcccttcgcgtggtcaaaggcattgctgtggccgcgccctccgcctccgccacctcgcccatcaatgctagatcgctggctgacctcatattcgctaatactcacttgccaagcttgttgaagatactggcccccacggaatcctccagcgacagcgaatcccagatcctcatcgttgcttttctcatcaggagtctttgccgagaagagaaacatcaaaatgccctggccgaagatggcatactggacgccctggctacgaagcttgcaggcttcgcagtagcggagggccatgttcttccaggagccgaagtgcgtgccaagatggagggtttggacgactacataccgcagcctgcaagttcaagtgcgagcctcgatgaggtgcttggcgccattgctgccatcgtcaccgaatcgccctttcgggcctccaagctattatattccccatcaatcctcgccatcttccccaacttcgccaatgcgcgatcgaacaagcccaattcgccacctgaatttatcatattgcctggtctgagtccaacgagacctaaagagtcggatatggacttcctcctcccattcacacctccttttacccgagggcacggtcatcatcacaccactgtgtccgctggaactccagtatccaaagatggctctggggctaacggtcggccatcatcgaagttgcagtccagccatgtttcgtggacccctccggaagaagccacccctcgcactactgagacagcctcggtcgaggtcgaaagtccgctggtgccatggttgattcatctagtccgtacgcgaaaaggcaccgagtcactcatggcggcttccgttcttacgtccctatttaagacgggatgtgcatacaataaggttagagagcagacagtaggtcttcttgtagttccaatccttctgtggttgctcgaagacgccgagactcaagccaaagacggttcaacagaaacctcgaatcgtgacataatggccaaaatcaacgttctcgaagaagcgccggcggtactttcacgcctcataacggacagcgagcacctgcaaaaggctgcatttgattgcaatgccgtcaagaccatctgcaggttatttaagagcagttttaacatgtcgtttgctactgtcgagtcgcatccctggtcaccccatgggagctcgactgaaaatatggacggcctggcgccggagtgtcgactgggagatgatggtcagcatcctcaactgattcaccagatgaggttgagagaaagctccctcagagcacttggtgctttggcaatattcaaggaagaatatcgcaaggcaattgttcaacaagacgcgattccttgcatagttgattgcttgggccaacctgactccaacccatccgagcatgcaaaagactacaccgtgtccaatcgcagaaaggcccgattcgagaacaacacgtcgtctattctcgtggcggcttgttactgtgttagaatgctatctcgttccgtcagcactctacgaactgccatgatcgatcacggagcttcaaagcctttactcaagctactagttgatgatgatgtagaagttcagattgctgctacacaatgtcttatcaatttgctacctgaatttagtcctacgagagagcccttggtagaagctggcattgcgtcagtcttgattgggcacgctcattccgaaaaccctggcttgcgtctcgaggctctatgggctctcaagcacctggtagattctgcaagtgtcgatctcaagaaaagttgcatcgagggtctcgaccctgagtggttgttcacggtcatcagcgatgacacagaaggtgatacaccattctcgtcccgatcgcgaactcaactaacgttggcaatgcctgaagacatggatgaagatgtcgatatgggggttttggatgagcaggcatactggcccacgagctcctcttataaaaccactacctcaaattcgcgggccgaatcagatatcagaattctgaaattagcagactcgcgtctagccgatctcaaagaaagcgaattgagcccggtccgaaaggccaggggtgacaatctctctatacaagaacaaggtcttcagctcattcgaaatctgatcggtggttctgactctattggtggccctccaactgcctcgcgcgacactgccgaaatgatcgagtatatcttcaaagctgtcggccaacagagactttttgatatgcttgcagccaaattacggccaaaagtgcttcatccgttcaaccgacgaggcaccagtggtagtgaaaagaccaggattctacctcctcagaatcgcattattgagtctgtgctctggattctggttcacattgcggccagcgaaccgcactatcgacagctcattattgcacaaacggaaatgctcaaacagatagcgaaactgtttagtagtacagcgggacaagtccgacttgcattgtgtcagttgatgaataacttgacctggcaggatgaccatcttgacgcggttggttcttcgcagcgcgcgatggaactgaaaagcatgggtttcgacaggaagctcgaaggtctccgaacagatgatgaggagctcgacgttagagagcgagctaagtcggctgtctggcagatgcaggccggttatcattcgtaggacaagcgattagatcgctattgccaggatagatggagcgcggttgagcgacgatattttcaaagaacctgaaacgaccaggagattgtattgtacaacaagcattgctcttcaggtatctcgtacggaaggtccctttgcgggtatgaatgcaaacgaagcgcaagaacactactgcatggatggcgctagattcggattattgtacaagtacttgttatagatcaacacgatgcacgagagagtaattattcgtgtcttgttaggcggccgtccttcatagaatacgacgagagagtactagactaaaaaaattgaatcaatggcattctcaatccgtcttcttgttcgcgtcttccttcggtaatccaacgccggcgaggaagagtaatttcgcgatgaatggacccacggtcgtgattatggcgacagcattcacgacgttccagcgaagggggtcgaaaaaccaggcgggtcccatgctctgatataaggcgatggtgtggaatatatcgctgattgaggaggcgacgagggtctgtcgccaaaccttgagagaggactcgtgccgtaggatgtagaagtcgtggtaggctagcatgagccaggagcctgtcatttgggtgaagaatggggtgagagtgggagtgtaggggattgatgggagggttgaggataggaggaggtgaggtaagaggagggattgcagagcgccgatggttgcgagacagggctcgattagtgtgaagagtgttcggtagatgggcgggattggggtggacattttgagggcgtatgttggctggtgagcggaaaatcgatttgttctacgggtttgagagaggcttgtttgttgaggatgcgtgagggaagagtgaggatattgtttggtgactgaccgatttagagtgtgtttgcgaggtgtgctgttaggctgtggtgatcctggacgccacagtttgtgtttaggtatttgtcaacccttgaaaagaaaaatggcatacggacttccgcg

SEQ ID NO: 9941 - DNA, 1242 bp, Muscodor strobelii
  misc_feature: SGI cDNA ID NO. 563132
  misc_feature: Reduced expression when VOC is produced
  misc_feature: Encodes the peptide sequence at SEQ ID NO 9942
atgttgacttcgtcccccgttgcgccacggcctacgagcgcttcgacgtccccgcgcgacttccgctacgtgccagcgtcggcgtcgactgcaccaccaccgtcggctttgtcgcctacgcagtcccgctctccactgcactcgccccggatcactgcctctctgcgccgccgcccctccagagcatcactctctcacccgtcctcgccgcctccgggccccttcaagtcgccgtcgcagtccagacccaagcaatatgtgggagtggacgccgcgacacagtactcaccgatggagccctttgaccccatggttcctttgcgagccgccgatgcgcccgctccgcgcaagcccaccgctgcccctgcttccacgaacgaccccgcgaatgccttgacccagcctaacacccagcccaagactgttcaaccccctccagagcctacactgtcgcccgccatcgtgggcaattcgtcgctcaacccgctgtcgccctcgaagcggcgcggatccgaaactcacgatagacagtcccagcgcccctctgccctcattggggccacccagtcgagctctccaaagagaacaaggccaaacgcgggcccgcccaaagagttgcccctgcgatatgacctatgccaggtcgaagacatggttgttctcatcgccaacatgctcggcgaactcatagagacaaacgactcgctggcaatgaagagcggcaatctgacgagatttcactcacggacagcaccaggcatatctgttctagactacttgcaacgactagcaaaacatgcgacactaacaccgcctctccttcttgccatggtatactatatcgatcgactgtgtgcgctctacacggactttaccataaacacattgaccgtgcaccgattcttgatcactgccgctacagttgccggcaagggcctctctgattctttctggaacaactcgttctacgctcgtgtagggggcgtcaaggtggcggaattgaaactactggaagtagagttcctctacagggtggattggagaatcgtgcctgaacacgagatgttggaagcatactacaagggtctggttgaccgttgtgacggatataccctgccggaggagacgactataacgacgtctcgcgatgacgatgagaccgatacaattgacgaagatgacagtgacgagcctacgcaagaagatatcaaaggcgcagagacggcgaaggcaggattatag

SEQ ID NO: 9942 - protein, 413 aa, Muscodor strobelii
  misc_feature: SGI Peptide ID NO. 563132
  misc_feature (216)..(349): Pfam Id: PF08613 Pfam Desc: Cyclin
  misc_feature (1)..(412): NCBI GI: 116204989 Blast Desc: CHGG_10378 [Chaetomium globosum CBS 148.51] gi|88176506|gb|EAQ83974.1| CHGG_10378 [Chaetomium globosum CBS 148.51]
  misc_feature (84)..(375): NCBI GI: 171689128 Blast Desc: protein product [Podospora anserina] gi|170944526|emb|CAP70637.1| protein product [Podospora anserina]
  misc_feature (84)..(372): NCBI GI: 145604418 Blast Desc: MGG_08558 [Magnaporthe grisea 70-15] gi|145012414|gb|EDJ97070.1| MGG_08558 [Magnaporthe grisea 70-15]
  misc_feature (147)..(384): NCBI GI: 261358585 Blast Desc: nuc-1 negative regulatory protein preg [Verticillium albo-atrum VaMs.102]
  misc_feature (9)..(372): NCBI GI: 164428153 Blast Desc: NCU01738 [Neurospora crassa OR74A] gi|157072033|gb|EAA27925.2| conserved [Neurospora crassa OR74A]
  misc_feature (9)..(372): NCBI GI: 730381 Blast Desc: PREG_NEUCR RecName: Full=Nuc-1 negative regulatory protein preg gi|967977|gb|AAA74959.1| regulatory protein [Neurospora crassa] gi|8218233|emb|CAB92634.1| negative factor
  misc_feature (1)..(372): NCBI GI: 46109112 Blast Desc: FG01438.1 [Gibberella zeae PH-1]
  misc_feature (82)..(372): NCBI GI: 256730614 Blast Desc: NECHADRAFT_65284 [Nectria haematococca mpVI 77-13-4]
  misc_feature (126)..(381): NCBI GI: 212538087 Blast Desc: cyclin-dependent protein kinase regulator Pho80 [Penicillium marneffei ATCC 18224] gi|210068941|gb|EEA23032.1| cyclin-dependent protein kinase regulator Pho80 [Penicillium ATCC
  misc_feature (135)..(377): NCBI GI: 154316396 Blast Desc: BC1G_04129 [Botryotinia fuckeliana B05.10] gi|150845929|gb|EDN21122.1| BC1G_04129 [Botryotinia fuckeliana B05.10]
  misc_feature: Useful for introducing or modulating the production of volatile compounds
MLTSSPVAPRPTSASTSPRDFRYVPASASTAPPPSALSPTQSRSPLHSPRITASLRRRPSRASLSHPSSPPPGPFKSPSQSRPKQYVGVDAATQYSPMEPFDPMVPLRAADAPAPRKPTAAPASTNDPANALTQPNTQPKTVQPPPEPTLSPAIVGNSSLNPLSPSKRRGSETHDRQSQRPSALIGATQSSSPKRTRPNAGPPKELPLRYDLCQVEDMVVLIANMLGELIETNDSLAMKSGNLTRFHSRTAPGISVLDYLQRLAKHATLTPPLLLAMVYYIDRLCALYTDFTINTLTVHRFLITAATVAGKGLSDSFWNNSFYARVGGVKVAELKLLEVEFLYRVDWRIVPEHEMLEAYYKGLVDRCDGYTLPEETTITTSRDDDETDTIDEDDSDEPTQEDIKGAETAKAGL

SEQ ID NO: 9943 - DNA, 2372 bp, Muscodor strobelii
  misc_feature: SGI EST ID NO. CUFF.23498.0
  misc_feature: Variant of the nucleotide sequence at SEQ ID NO 9941
tttgaagttggctattagctaagaaaaaaaccccgacgcatgtggcccgacaaaatcttcacccgttccttctctgcctgactagaccatcgtagactagctagactgactggcgagtatcttgactaggctcagctgccttgttattcggattgtaatatcatgtaacagcccacctgcgaaagcgaccgacaacggccgacaggcatcattccgttggatgcactttgcatccccagatcttgggctgtggctttctcttctatacatgttctcttcataggactacatcatcttcaccaagccgagagactaacgcgttgatgtaccacctagctctactgtcgccggcccactcatccacaggcctagctcaccgacctagcgaaccctccacattgttcaggccgcatcgtcgcccacttacaccaccttcgcccacctgccgataaccgaaatcgcacagggccatgtggtgcaggccaaacttcttctaccgttgcgcctcgtctgagatcgattaaattgaaagaacgagtgtgagagcgagaggcggagaggttgtagtggttgcgagtctaacactgcgctggtctgaaaacgccacggccacaggttgtcacccctcagtgtttgacgcatcaggtagggcagaatagggcggaatatcaaggctcacctgaattcgtcgctgtcgtcgaccgcgcgtgcagccggcgcaattggcacgattggcacgattgagacatgtgttgaaagatcatgttgacttcgtcccccgttgcgccacggcctacgagcgcttcgacgtccccgcgcgacttccgctacgtgccagcgtcggcgtcgactgcaccaccaccgtcggctttgtcgcctacgcagtcccgctctccactgcactcgccccggatcactgcctctctgcgccgccgcccctccagagcatcactctctcacccgtcctcgccgcctccgggccccttcaagtcgccgtcgcagtccagacccaagcaatatgtgggagtggacgccgcgacacagtactcaccgatggagccctttgaccccatggttcctttgcgagccgccgatgcgcccgctccgcgcaagcccaccgctgcccctgcttccacgaacgaccccgcgaatgccttgacccagcctaacacccagcccaagactgttcaaccccctccagagcctacactgtcgcccgccatcgtgggcaattcgtcgctcaacccgctgtcgccctcgaagcggcgcggatccgaaactcacgatagacagtcccagcgcccctctgccctcattggggccacccagtcgagctctccaaagagaacaaggccaaacgcgggcccgcccaaagagttgcccctgcgatatgacctatgccaggtcgaagacatggttgttctcatcgccaacatgctcggcgaactcatagagacaaacgactcgctggcaatgaagagcggcaatctgacgagatttcactcacggacagcaccaggcatatctgttctagactacttgcaacgactagcaaaacatgcgacactaacaccgcctctccttcttgccatggtatactatatcgatcgactgtgtgcgctctacacggactttaccataaacacattgaccgtgcaccgattcttgatcactgccgctacagttgccggcaagggcctctctgattctttctggaacaactcgttctacgctcgtgtagggggcgtcaaggtggcggaattgaaactactggaagtagagttcctctacagggtggattggagaatcgtgcctgaacacgagatgttggaagcatactacaagggtctggttgaccgttgtgacggatataccctgccggaggagacgactataacgacgtctcgcgatgacgatgagaccgatacaattgacgaagatgacagtgacgagcctacgcaagaagatatcaaaggcgcagagacggcgaaggcaggattatagaccggtttgaaagacatgatttgcaacacggttggagtctggatggttttgatggatgataccacatgcatcaagttatgatttggaagaattgaacgactgaagaagtctctgctttgattgcgcacttctgtatatagatgtttttagtgcgtattgtctctagtctacaatatgtcggtggtgatgcgcgtcgggttgttcgacgagagcagccaggatgcctcagacaaggtagatcgacacctgcattgtggtgtgtcaattatattgttgttgcaacattgcctcatgaaatagacgataaccattagtgaggcttagatgcacctaaagtctttaacatagatatctggtgacaatcgaca

SEQ ID NO: 9944 - DNA, 585 bp, Muscodor strobelii
  misc_feature: SGI cDNA ID NO. 563133
  misc_feature: Encodes the peptide sequence at SEQ ID NO 9945
atgaagccaacagccatcctctcgagcgtggcagcctttgcgctcgccagctttgtcagcgcaagcgagcgaacagcctcgatttacatccaggccatatcagcatcaccacccgcgccattaccacttgccgaaatacaatacgacgctctgataccctcctcatccgagatcctctcatatgaagctccggagctgccagacgatgcgaagctagtgcgcgtgggtgtatacgacccctccgccaaggaatggacatcttccacctctgtcgcatctgtcgagaactttagcaaaggatactcaccgactttgatgctctctgttgacagggcgggcgtgccggttagcgtagctctacgcggtgtcgccatcgatgcaggacaaacgagagactttggtcctcaggcgatgatactgatggccgaggctgggaaacagccagatcttaataagccggttgttctgtctcctgatggaaagcaggtcgagcctcaacaaaagactatgttacagaaatactggtgggttgtggccatcgttgtcgtaatgagcgtcgtaggcggaggagatgagaagaaatga

SEQ ID NO: 9945 - protein, 194 aa, Muscodor strobelii
  misc_feature: SGI Peptide ID NO. 563133
  misc_feature (1)..(192): NCBI GI: 256730615 Blast Desc: NECHADRAFT_73336 [Nectria haematococca mpVI 77-13-4]
  misc_feature (1)..(189): NCBI GI: 46109110 Blast Desc: FG01437.1 [Gibberella zeae PH-1]
  misc_feature (25)..(193): NCBI GI: 85083686 Blast Desc: NCU01739 [Neurospora crassa OR74A] gi|16416100|emb|CAB92633.2| [Neurospora crassa] gi|28918249|gb|EAA27926.1| conserved [Neurospora crassa OR74A]
  misc_feature (24)..(193): NCBI GI: 145604420 Blast Desc: MGG_08559 [Magnaporthe grisea 70-15] gi|145012415|gb|EDJ97071.1| MGG_08559 [Magnaporthe grisea 70-15]
  misc_feature (4)..(186): NCBI GI: 116204987 Blast Desc: CHGG_10377 [Chaetomium globosum CBS 148.51] gi|88176505|gb|EAQ83973.1| CHGG_10377 [Chaetomium globosum CBS 148.51]
  misc_feature (22)..(189): NCBI GI: 261358611 Blast Desc: conserved [Verticillium albo-atrum VaMs.102]
  misc_feature (1)..(187): NCBI GI: 171689126 Blast Desc: protein product [Podospora anserina] gi|170944525|emb|CAP70636.1| protein product [Podospora anserina]
  misc_feature (1)..(192): NCBI GI: 154316396 Blast Desc: BC1G_04129 [Botryotinia fuckeliana B05.10] gi|150845929|gb|EDN21122.1| BC1G_04129 [Botryotinia fuckeliana B05.10]
  misc_feature (1)..(192): NCBI GI: 156059464 Blast Desc: SS1G_03744 [Sclerotinia sclerotiorum 1980] gi|154701531|gb|EDO01270.1| SS1G_03744 [Sclerotinia sclerotiorum 1980]
  misc_feature (14)..(194): NCBI GI: 255935961 Blast Desc: Pc13g05730 [Penicillium chrysogenum Wisconsin 54-1255] gi|211583627|emb|CAP91642.1| Pc13g05730 [Penicillium chrysogenum Wisconsin 54-1255]
MKPTAILSSVAAFALASFVSASERTASIYIQAISASPPAPLPLAEIQYDALIPSSSEILSYEAPELPDDAKLVRVGVYDPSAKEWTSSTSVASVENFSKGYSPTLMLSVDRAGVPVSVALRGVAIDAGQTRDFGPQAMILMAEAGKQPDLNKPVVLSPDGKQVEPQQKTMLQKYWWVVAIVVVMSVVGGGDEKK

SEQ ID NO: 9946 - DNA, 821 bp, Muscodor strobelii
  misc_feature: SGI EST ID NO. CUFF.23504.0
  misc_feature: Variant of the nucleotide sequence at SEQ ID NO 9944
ctcggggaccgggggggtgcggaacggggtcatctcaggacagccaatacagatgctctccgtagaatcggatcccatctccaacactgacttctgccaatcttcgacatcccaaccaaccacttgacagcgcattccctcgtacaaagcgaaacgaaaatcatcagacgtccatgcaccaacacagatgaagccaacagccatcctctcgagcgtggcagcctttgcgctcgccagctttgtcagcgcaagcgagcgaacagcctcgatttacatccaggccatatcagcatcaccacccgcgccattaccacttgccgaaatacaatacgacgctctgataccctcctcatccgagatcctctcatatgaagctccggagctgccagacgatgcgaagctagtgcgcgtgggtgtatacgacccctccgccaaggaatggacatcttccacctctgtcgcatctgtcgagaactttagcaaaggatactcaccgactttgatgctctctgttgacagggcgggcgtgccggttagcgtagctctacgcggtgtcgccatcgatgcaggacaaacgagagactttggtcctcaggcgatgatactgatggccgaggctgggaaacagccagatcttaataagccggttgttctgtctcctgatggaaagcaggtcgagcctcaacaaaagactatgttacagaaatactggtgggttgtggccatcgttgtcgtaatgagcgtcgtaggcggaggagatgagaagaaatgatagatcaatagacctaatagaaaagtttgaccctgcacctcgtgctcgc

SEQ ID NO: 9947 - DNA, 360 bp, Muscodor strobelii
  misc_feature: SGI cDNA ID NO. 563134
  misc_feature: Encodes the peptide sequence at SEQ ID NO 9948
atgtcttctgagaacggaaccaccctcccccaggaccccaccaaggtcgatgagcctgtcgacgttaagggcaagggtaaggctgtcactgagcccgtcgatgagtctatggacgaagacaatgacgatgatgaggatgacgaggaggctggtgttgaggaggaggacgatgacaacatggaggagatcgacctcaacaacatcgttgagggtggtcgccgcactcgtggtcgcgtcattgactgggccaaggctgccgaggagaacccggccactgaggacgacgacgatgacgatgaggacgacttcgagcctgagcccgaggctgccaacgacggcgacaaaatggatgaggattaa

SEQ ID NO: 9948 - protein, 119 aa, Muscodor strobelii
  misc_feature: SGI Peptide ID NO. 563134
  misc_feature (54)..(91): Pfam Id: PF09649 Pfam Desc: Histone chaperone domain CHZ
  misc_feature (3)..(105): NCBI GI: 256730616 Blast Desc: NECHADRAFT_65288 [Nectria haematococca mpVI 77-13-4]
  misc_feature (23)..(106): NCBI GI: 261358610 Blast Desc: [Verticillium albo-atrum VaMs.102]
  misc_feature (3)..(91): NCBI GI: 46109108 Blast Desc: FG01436.1 [Gibberella zeae PH-1]
  misc_feature (3)..(89): NCBI GI: 171689124 Blast Desc: protein product [Podospora anserina] gi|170944524|emb|CAP70635.1| protein product [Podospora anserina]
  misc_feature (1)..(91): NCBI GI: 187470858 Blast Desc: protein product [Podospora anserina] gi|170944524|emb|CAP70635.1| protein product [Podospora anserina]
  misc_feature (21)..(91): NCBI GI: 116204987 Blast Desc: CHGG_10377 [Chaetomium globosum CBS 148.51] gi|88176505|gb|EAQ83973.1| CHGG_10377 [Chaetomium globosum CBS 148.51]
  misc_feature (1)..(86): NCBI GI: 238842837 Blast Desc: conserved [Microsporum canis CBS 113480]
  misc_feature (23)..(86): NCBI GI: 67537916 Blast Desc: AN5128.2 [Aspergillus nidulans FGSC A4] gi|74595373|sp|Q5B2V2.1|CHZ1_EMENI RecName: Full=Histone H2A.Z-specific chaperone chz1 gi|40743119|gb|EAA62309.1| AN5128.2
  misc_feature (42)..(91): NCBI GI: 156838763 Blast Desc: Kpol_423p13 [Vanderwaltozyma polyspora DSM 70294] gi|187470789|sp|A7TR90.1|CHZ1_VANPO RecName: Full=Histone H2A.Z-specific chaperone CHZ1 gi|156113673|gb|EDO15223.1| DSM
  misc_feature (55)..(90): NCBI GI: 254583125 Blast Desc: ZYRO0E08470p [Zygosaccharomyces rouxii] gi|238942868|emb|CAR31039.1| ZYRO0E08470p [Zygosaccharomyces rouxii]
MSSENGTTLPQDPTKVDEPVDVKGKGKAVTEPVDESMDEDNDDDEDDEEAGVEEEDDDNMEEIDLNNIVEGGRRTRGRVIDWAKAAEENPATEDDDDDDEDDFEPEPEAANDGDKMDED

SEQ ID NO: 9949 - DNA, 899 bp, Muscodor strobelii
  misc_feature: SGI EST ID NO. CUFF.23559.0
  misc_feature: Variant of the nucleotide sequence at SEQ ID NO 9947
caacaccggcgcttcttcacgctcttcacactcacctgccctcctcccaaaccataacaaacttgcgactgagttcccttgtacgcgtgttactcaaagcaacactacattcctttccataccaaactctcattccaattcacgtatccaacacaagcaaagtcaagatgtcttctgagaacggaaccaccctcccccaggaccccaccaaggtcgatgagcctgtcgacgttaagggcaagggtaaggctgtcactgagcccgtcgatgagtctatggacgaagacaatgacgatgatgaggatgacgaggaggctggtgttgaggaggaggacgatgacaacatggaggagatcgacctcaacaacatcgttgagggtggtcgccgcactcgtggtcgcgtcattgactgggccaaggctgccgaggagaacccggccactgaggacgacgacgatgacgatgaggacgacttcgagcctgagcccgaggctgccaacgacggcgacaaaatggatgaggattaagcacgccaaacgtactgattaagactggattggattggacaatggccccgattcatcactcatcatcttgtacccccacatcacggcgttctctccccactgagtttctagcaaagcaaaaaggatacgcgttcaggaaagtagatgtacacgcgacactccagtggttttgtctgttcacgcgacatggcactggttttcgttcgccttgtttctcacctactataccctcatggaatcatgacatgcatttgatgctgcatttggtcatggacattaggagtcaaggaaaaatacaggtgttgtgaatagaattcgcactcttcattcttctagtcccttgcgctatgtgatctccctcttacattcacg

SEQ ID NO: 9950 - DNA, 969 bp, Muscodor strobelii
  misc_feature: SGI cDNA ID NO. 563135
  misc_feature: Encodes the peptide sequence at SEQ ID NO 9951
atgagcccagccattcgactactgtccgctctcgtaggtctcgtatgcggccgccagagctcggcatcggcaacgggaccaaaagcatatccgctctgcatcggagaatcaacactctacgtcacaaactggaatatcgcaaccagcttagatggcacatatcaaacgcaggatttcactctaacaaatgacttcaatccatacatagcaacatgtcacatatcgcgtcaaatcgacaactcggaaactgcctggcaaccctgcgatacgagcaacgaaatccccaatgtatcattcctcatcagatatcactcgtctcaaatcgaactatcacacaccttcacgtgcgacagacaagacggcacctcatctccaatcacacccgcaagcaccacagccctcctactaggtcccagtcccctaaccccagacctcacaccgatcttcgtaaccataaacttcgctcaccaaccgcctcgccacgactgcgctactgaagtagtgccagggtggaaagcctcgcatacatcgtacaatgcgtcgctttacccgccaccgatcctcccctcgcctattggtgtcgagtttcatgttcattgggtgtttcgattcatgcttttgcatcccgcgctggatttttctgtgaattgtaaggcagaaggttcgacggttgatccggagagtagtgtggatgatgtttttcttgattatgatggtgtttatggttgtgaatttgagggtgggaatggtattatagggaatggggatggtgtgccagagacgaggtttaggtatgatatggtgaggcgaagacttactgttgagcagacgtgggtctgtgaggggggtggtgaaggaggtggtgagagggtcgtatacaatgctacgggcactgcggtgttgccaaaggggtgtgcagatgttccggctagtagctgtgctgatgttattacgatcatgggaggttga

SEQ ID NO: 9951 - protein, 322 aa, Muscodor strobelii
  misc_feature: SGI Peptide ID NO. 563135
MSPAIRLLSALVGLVCGRQSSASATGPKAYPLCIGESTLYVTNWNIATSLDGTYQTQDFTLTNDFNPYIATCHISRQIDNSETAWQPCDTSNEIPNVSFLIRYHSSQIELSHTFTCDRQDGTSSPITPASTTALLLGPSPLTPDLTPIFVTINFAHQPPRHDCATEVVPGWKASHTSYNASLYPPPILPSPIGVEFHVHWVFRFMLLHPALDFSVNCKAEGSTVDPESSVDDVFLDYDGVYGCEFEGGNGIIGNGDGVPETRFRYDMVRRRLTVEQTWVCEGGGEGGGERVVYNATGTAVLPKGCADVPASSCADVITIMGG

SEQ ID NO: 9952 - DNA, 266 bp, Muscodor strobelii
  misc_feature: SGI EST ID NO. CUFF.23593.0
  misc_feature: Variant of the nucleotide sequence at SEQ ID NO 9950
gcgaagacttactgttgagcagacgtgggtctgtgaggggggtggtgaaggaggtggtgagagggtcgtatacaatgctacgggcactgcggtgttgccaaaggggtgtgcagatgttccggctagtagctgtgctgatgttattacgatcatgggaggttgaaggtgtaactgatgctgggctttggaatagtgtggctgggcgtgatgctggttcaacgatggggtaacttagtgagttctcatatctccgtttgaattttaca

SEQ ID NO: 9953 - DNA, 768 bp, Muscodor strobelii
  misc_feature: SGI cDNA ID NO. 563136
  misc_feature: Encodes the peptide sequence at SEQ ID NO 9954
atgcgacgagccgaagcgggcacagctccttttgcttcggcattcgatgtcctcgggaaattgacgggaccggcggcaataatagaatacctcgaaaatggtgatctcgaagatatatatcaaagaattgtccgtgcacatgtcgatgttcccaataggttcttgtggtcgctttatgtctgtatgataagagcgtgtatcggaatggactatccaatgaataaaccatatggtgctgccgcaactctagaaacaataccgaaagacagtgaaccaccgtcggatatgtaccacaacgatctctatttccgaaacgtcatgtgcacaggcgcagacgcagatccagagcatcgcatagggaagatgttcaaggtgatcgacttcggcatgattcaacgtgagatgcagaggcctggtcgcgcacatgcgagaaatctatatgacgtttcgaggatgatcgcccaattgattgccagagggctcattccagctgttcagctgccgtacaacaatgcgatgacggaagcaggttcaataattaatgctaatcgtgaatacccctggcttgatagagatttgagcgatctcattgtacgatgcctgtacagcgattggacgagacgaccatctctggcggaggctctacggatcgcaaccaatgcattgaacaagagtccggcggattatcctatgccggcaagagaaagtgacgacgcaatcagaatgttcatacaggcctatattgacaatgctcctcttacaaagtaa

SEQ ID NO: 9954 - protein, 255 aa, Muscodor strobelii
  misc_feature: SGI Peptide ID NO. 563136
MRRAEAGTAPFASAFDVLGKLTGPAAIIEYLENGDLEDIYQRIVRAHVDVPNRFLWSLYVCMIRACIGMDYPMNKPYGAAATLETIPKDSEPPSDMYHNDLYFRNVMCTGADADPEHRIGKMFKVIDFGMIQREMQRPGRAHARNLYDVSRMIAQLIARGLIPAVQLPYNNAMTEAGSIINANREYPWLDRDLSDLIVRCLYSDWTRRPSLAEALRIATNALNKSPADYPMPARESDDAIRMFIQAYIDNAPLTK

SEQ ID NO: 9955 - DNA, 1059 bp, Muscodor strobelii
  misc_feature: SGI cDNA ID NO. 563137
  misc_feature: Encodes the peptide sequence at SEQ ID NO 9956
atgatgaacccgttatatctaacgcccgagcagcaagcaaaccaaatccagggatattttcaaggctcaagtcactggaagtatgaaaagctgttaggagccggcgcatatggcgtggcgctgctcctctcgcagaggggtggaagtggaacaccgttgcgcatcgcaatgaaggtcgcacaggctggaatgcatgatagtttgacgaaagagataatgtggttacgaagatttcatggcgcgaaacatattgttaaaattctcgctcatgccgaccacctaaataatccaatgcgacgagccgaagcgggcacagctccttttgcttcggcattcgatgtcctcgggaaattgacgggaccggcggcaataatagaatacctcgaaaatggtgatctcgaagatatatatcaaagaattgtccgtgcacatgtcgatgttcccaataggttcttgtggtcgctttatgtctgtatgataagagcgtgtatcggaatggactatccaatgaataaaccatatggtgctgccgcaactctagaaacaataccgaaagacagtgaaccaccgtcggatatgtaccacaacgatctctatttccgaaacgtcatgtgcacaggcgcagacgcagatccagagcatcgcatagggaagatgttcaaggtgatcgacttcggcatgattcaacgtgagatgcagaggcctggtcgcgcacatgcgagaaatctatatgacgtttcgaggatgatcgcccaattgattgccagagggctcattccagctgttcagctgccgtacaacaatgcgatgacggaagcaggttcaataattaatgctaatcgtgaatacccctggcttgatagagatttgagcgatctcattgtacgatgcctgtacagcgattggacgagacgaccatctctggcggaggctctacggatcgcaaccaatgcattgaacaagagtccggcggattatcctatgccggcaagagaaagtgacgacgcaatcagaatgttcatacaggcctatattgacaatgctcctcttacaaagtaa

SEQ ID NO: 9956 - protein, 352 aa, Muscodor strobelii
  misc_feature: SGI Peptide ID NO. 563137
  misc_feature (27)..(310): NCBI GI: 85109420 Blast Desc: NCU05722 [Neurospora crassa OR74A] gi|28924551|gb|EAA33672.1| [Neurospora crassa OR74A]
  misc_feature (25)..(251): NCBI GI: 116201421 Blast Desc: [Chaetomium globosum CBS 148.51] gi|88177113|gb|EAQ84581.1| [Chaetomium globosum CBS 148.51]
  misc_feature (26)..(239): NCBI GI: 256730581 Blast Desc: NECHADRAFT_74247 [Nectria haematococca mpVI 77-13-4]
  misc_feature (29)..(181): NCBI GI: 116201425 Blast Desc: [Chaetomium globosum CBS 148.51] gi|88177115|gb|EAQ84583.1| [Chaetomium globosum CBS 148.51]
MMNPLYLTPEQQANQIQGYFQGSSHWKYEKLLGAGAYGVALLLSQRGGSGTPLRIAMKVAQAGMHDSLTKEIMWLRRFHGAKHIVKILAHADHLNNPMRRAEAGTAPFASAFDVLGKLTGPAAIIEYLENGDLEDIYQRIVRAHVDVPNRFLWSLYVCMIRACIGMDYPMNKPYGAAATLETIPKDSEPPSDMYHNDLYFRNVMCTGADADPEHRIGKMFKVIDFGMIQREMQRPGRAHARNLYDVSRMIAQLIARGLIPAVQLPYNNAMTEAGSIINANREYPWLDRDLSDLIVRCLYSDWTRRPSLAEALRIATNALNKSPADYPMPARESDDAIRMFIQAYIDNAPLTK

SEQ ID NO: 9957 - DNA, 1029 bp, Muscodor strobelii
  misc_feature: SGI cDNA ID NO. 563138
  misc_feature: Encodes the peptide sequence at SEQ ID NO 9958
atggctcttccccaaaccatcaagcaagccgttttcaaagagctgggcaagcccttggttattgagaccgttccgctccaaatgcccagcgatggcgaaattctcgtcaaagtcgaagcatgtggtgtttgccactcagacatcttcggccaatacaacgtatttggaggcggcttccccgtggttcctggtcacgagatcattgggagtgtggcagccttgggttctggtgtcactggatggagtgtcggtgatcgaattggcggtgcttggcatgggggacacgacggtacttgtgttcgttgcaagagcggatatcctcaattctgtgagcctttcgttgtgaatggcgtcactaaaaacggcggatatagcgagtactgtctgctccgctcgaacgctgctgtcaaagttccctcaggtgttgatgcagtgaaacaagcgcctatgctttgtgcaggttcaacagtctttggtgctctgaagtctgcaggtctgaagcctggtgaaactgtcgccatccaggggcttggtgggcttggccatatggccgtgcaattcgcgcgaaaaatgggcttccgagtcattgccatttcgagagggcgcgacaaggaagtctcgattcgccagctgggcgcgcatgagtacatcgactcaaatgagggagatgctggcgatgcgctcaggaaactaggccctgcaaaagctgtccttacaactgcaatggatacatctgctatggtaccgctcatcaaggggattgatattatgggcaagctccttattctatcaatgcctgaatcaggaacaatgcagatcgattctaatcagcttttgactggcggtggaatatcagtccagtcctggccagtcggtaactgcgtcgattgcgagaagacgcttgagtttgctcagatccagggtcttgactgcgcagttgagactttcccgcttgatcgagcacaagaggctttcgacgcaatgctaagtggcaaggtccgttaccgagctgtcatcactatgggttag

SEQ ID NO: 9958 - protein, 342 aa, Muscodor strobelii
  misc_feature: SGI Peptide ID NO. 563138
  misc_feature (31)..(138): Pfam Id: PF08240 Pfam Desc: Alcohol dehydrogenase GroES-like domain
  misc_feature (168)..(306): Pfam Id: PF00107 Pfam Desc: Zinc-binding dehydrogenase
  misc_feature (1)..(341): NCBI GI: 212535582 Blast Desc: alcohol dehydrogenase, [Penicillium marneffei ATCC 18224] gi|210070346|gb|EEA24436.1| alcohol dehydrogenase, [Penicillium marneffei ATCC 18224]
  misc_feature (1)..(341): NCBI GI: 116181812 Blast Desc: CHGG_01534 [Chaetomium globosum CBS 148.51] gi|88185831|gb|EAQ93299.1| CHGG_01534 [Chaetomium globosum CBS 148.51]
  misc_feature (1)..(341): NCBI GI: 39945148 Blast Desc: zinc-binding dehydrogenase [Magnaporthe grisea 70-15] gi|145011364|gb|EDJ96020.1| zinc-binding dehydrogenase [Magnaporthe grisea 70-15]
  misc_feature (1)..(325): NCBI GI: 240108343 Blast Desc: alcohol dehydrogenase, [Coccidioides posadasii C735 delta SOWgp]
  misc_feature (1)..(331): NCBI GI: 238844168 Blast Desc: alcohol dehydrogenase [Microsporum canis CBS 113480]
  misc_feature (1)..(342): NCBI GI: 115389714 Blast Desc: conserved [Aspergillus terreus NIH2624] gi|114194758|gb|EAU36458.1| conserved [Aspergillus terreus NIH2624]
  misc_feature (1)..(341): NCBI GI: 119187051 Blast Desc: CIMG_03573 [Coccidioides immitis RS]
  misc_feature (6)..(325): NCBI GI: 238845983 Blast Desc: alcohol dehydrogenase [Microsporum canis CBS 113480]
  misc_feature (1)..(341): NCBI GI: 242783599 Blast Desc: alcohol dehydrogenase, [Talaromyces stipitatus ATCC 10500] gi|218720366|gb|EED19785.1| alcohol dehydrogenase, [Talaromyces stipitatus ATCC 10500]
  misc_feature (2)..(341): NCBI GI: 71020793 Blast Desc: UM04480.1 [Ustilago maydis 521] gi|46100360|gb|EAK85593.1| UM04480.1 [Ustilago maydis 521]
  misc_feature (7)..(341): SWISSPROT Homolog: EC 1.1.1.1 Alcohol dehydrogenase
MALPQTIKQAVFKELGKPLVIETVPLQMPSDGEILVKVEACGVCHSDIFGQYNVFGGGFPVVPGHEIIGSVAALGSGVTGWSVGDRIGGAWHGGHDGTCVRCKSGYPQFCEPFVVNGVTKNGGYSEYCLLRSNAAVKVPSGVDAVKQAPMLCAGSTVFGALKSAGLKPGETVAIQGLGGLGHMAVQFARKMGFRVIAISRGRDKEVSIRQLGAHEYIDSNEGDAGDALRKLGPAKAVLTTAMDTSAMVPLIKGIDIMGKLLILSMPESGTMQIDSNQLLTGGGISVQSWPVGNCVDCEKTLEFAQIQGLDCAVETFPLDRAQEAFDAMLSGKVRYRAVITMG

SEQ ID NO: 9959 - DNA, 948 bp, Muscodor strobelii
  misc_feature: SGI cDNA ID NO. 563139
  misc_feature: Encodes the peptide sequence at SEQ ID NO 9960
atgcccgacatccttgatcctattcgccaggccgcccaggaagctgataaggctaacctggacaggaccgaagaagccgtcgaggttgcttcacaatgggctcaagaaaagcttgataatttcctccttgaagttgagagaaatggaaacgatcataaaatgcttaagattagctacatcatcagccgtcggacttcggttgacgtgtttacgggtcagaatagcgagcttggacaatttgctgcagatgtaattagcaaacttgcgggcggcgaaataaagcaaggcctggtaactctggcgtccacgatgctcaataagcttatgggtgctgcttcaggtgctgcccagactgaaagaatatacgaggttacgttcgacgaacttggcggtcttaatcgcctcgacggtttcttcttttgctatcgattcgcctcaagcgggctcgccaattttagcaaagcagtcatcggaagttgtatcgtccgttcagccgcctcgatggtcgatgataacgcctatcgagtgattttgaccaattccgcaacccttcaggatgagcagcgcaccgcaattggtactcaaatgattgaagtcgccaagagtcaaacaaaaagcctcaacgaagatggggtcttagtcaccaccgcaactcaactcctcgaatcccgagccaagctagcccaagttattggccaaggtgtagcaacgtctgcccaatttacacagcgcaactctcacacgcaagttttcaacgctagtagctcaaacaagaacgcggagactgcggcgaagaatatcaacgccaagacgagtactctttttgttgataatagcaaaaccaaggcagacggcggagagaaaccgaaaacgataggagaaaagaagctgacggaacctgttgagacacaagctgttatggtcgagccaaagaaacctgctagctaa

SEQ ID NO: 9960 - protein, 315 aa, Muscodor strobelii
  misc_feature: SGI Peptide ID NO. 563139
MPDILDPIRQAAQEADKANLDRTEEAVEVASQWAQEKLDNFLLEVERNGNDHKMLKISYIISRRTSVDVFTGQNSELGQFAADVISKLAGGEIKQGLVTLASTMLNKLMGAASGAAQTERIYEVTFDELGGLNRLDGFFFCYRFASSGLANFSKAVIGSCIVRSAASMVDDNAYRVILTNSATLQDEQRTAIGTQMIEVAKSQTKSLNEDGVLVTTATQLLESRAKLAQVIGQGVATSAQFTQRNSHTQVFNASSSNKNAETAAKNINAKTSTLFVDNSKTKADGGEKPKTIGEKKLTEPVETQAVMVEPKKPAS

SEQ ID NO: 9961 - DNA, 556 bp, Muscodor strobelii
  misc_feature: SGI EST ID NO. CUFF.23533.0
  misc_feature: Variant of the nucleotide sequence at SEQ ID NO 9959
taattatacatgcttcacgtttgttgccacatactacctataaataccatgacaccgccgttgaatttatggcatcaagtttttgtcacatttcatagccacctggtgcttcttgacgcctttcctgtatagtatttcgccttttggatcttagaagatgcccgacatccttgatcctattcgccaggccgcccaggaagctgataaggctaacctggacaggaccgaagaagccgtcgaggttgcttcacaatgggctcaagaaaagcttgataatttcctccttgaagttgagagaaatggaaacgatcataaaatgcttaagattagctacatcatcagccgtcggacttcggttgacgtgtttacgggtcagaatagcgagcttggacaatttgctgcagatgtaattagcaaacttgcgggcggcgaaataaagcaaggcctggtaactctggcgtccacgatgctcaataagcttatgggtgctgcttcaggtgctgcccagactgaaagaatatacgaggttacgttcgacgaacttggcggtcttaat

SEQ ID NO: 9962 - DNA, 1389 bp, Muscodor strobelii
  misc_feature: SGI cDNA ID NO. 563140
  misc_feature: Encodes the peptide sequence at SEQ ID NO 9963
atgggatggttcggaattccacagttgatggaaggagtaggaagaaaggtggaatctgtcatgcgcgaagaagtccagcgacagacaggacttccagaacacgtaattgactcgcagttcaaggacaacattacagcagaagttgctaggatcgcgattgacgaaacaacccaaaggcttcgcgatatctcgaataatgtggctccgggtctgctaaaaacagctgaagacaaggcaaaggaagcaaaacaggctgtaaaggacctcaagagcgccgtgctgcagatggaaacaaccgggagtgatatacagaagcggatcgcagctgaagtctccgagatcgtctcaactcttaccgcaatagatgataataccttcgacgacatgttgaaagcgttagatgatgtcgtaggagttgcaattgaccagattaacacggtcgcacttcgaaccatatcttctatcgagaaactaatggaggaaacagagagacaaatttgggtcttattcaatcaggtcgtcccgaaagatatctctgaccgcctaactggactcaaagatgagcttcgtcgagtcattgatgacatcaaaaaagttggcaatgatcttagggctattatttcaatcgtggctaaggatatcaaggaaaaggctcgagctctaatcactaagattggtgacgcgatcagacccatctgggatttcattcgagcgctctggaaatttgttttcggtgtcgagccagagcaatgtctgcttgccgcgcaatggtttgaggaaagaatgaaacgaaccgagacagaattgctgtataagcgttcagtcagacctgtgagtgcggtgatccgaaggcacaaatatcttgagcttttaccatcggacgaaagtgcctggagaatatttgtgctccgatttctggatagaaacatcggcgtaccagcctggcacggccaacgtgctgctttacaaactttacttgaccaaacgaacgtaaacccaggccatgtggttcaactgaccagggacgagccgtttacggatgaacttggtgggacatcacgaatccagatgaccatactttactaccgttggcgcacaagagacttccgcaagatatcgtctggatttttgggtgtacttgccatggtcagtgcgatcgatgaacaaggtgaacattacgaacctccgccattgcgagtcaagcgggccgagcccgttaacacagacatatctgcaatgcagaagatatacgacgaaattggcccgcatctaggcttcatgccaaaacccagtgacgcggatgaggcgatattatccggctccaaaaagcgtgtatcaaggcagttgatgttcaaatatgatgacaatgtttggagaaggggtatttag

SEQ ID NO: 9963 - protein, 462 aa, Muscodor strobelii
  misc_feature: SGI Peptide ID NO. 563140
MGWFGIPQLMEGVGRKVESVMREEVQRQTGLPEHVIDSQFKDNITAEVARIAIDETTQRLRDISNNVAPGLLKTAEDKAKEAKQAVKDLKSAVLQMETTGSDIQKRIAAEVSEIVSTLTAIDDNTFDDMLKALDDVVGVAIDQINTVALRTISSIEKLMEETERQIWVLFNQVVPKDISDRLTGLKDELRRVIDDIKKVGNDLRAIISIVAKDIKEKARALITKIGDAIRPIWDFIRALWKFVFGVEPEQCLLAAQWFEERMKRTETELLYKRSVRPVSAVIRRHKYLELLPSDESAWRIFVLRFLDRNIGVPAWHGQRAALQTLLDQTNVNPGHVVQLTRDEPFTDELGGTSRIQMTILYYRWRTRDFRKISSGFLGVLAMVSAIDEQGEHYEPPPLRVKRAEPVNTDISAMQKIYDEIGPHLGFMPKPSDADEAILSGSKKRVSRQLMFKYDDNVWRRGI

SEQ ID NO: 9964 - DNA, 1515 bp, Muscodor strobelii
  misc_feature: SGI cDNA ID NO. 563141
  misc_feature: Encodes the peptide sequence at SEQ ID NO 9965
atgttacaatccgccaaccctgccactaacatctatctcctctctgttagccgcgatgctaatgaaaaacgactcgcaaagggtgttcttgttacattgggaactatgttctataatgcttttatgcatcctcttcgccaatttcctggccccatctctcatcgggttactgtcattccacgagctttttatcagatgaagggtgctctggcgtttcatgtcgcagagcttcacagtcaatatggagacgttgttagtacggtggttagggttgcaccaaatgagcttgcgttctcatcacttcaagccgtacgagatatttataaaaagaacggccaagggcaagagtttccaaagcataaaggattctataaaatcttcgatcatttaccatcgtcaataatcaatgcagatactgtagaacatggtatgcttcgtcgacaatttgctgtcgggttttcagaccgcgcaatgcgcgaacaagaacctatcattaagagctacgttgatttgctgattcaaaggctgcgagaaaacgttgacaaatcaccatcagccgcctgcaacatgacagactggtttgattggactctatttgatttaatcggagatctcagttttggcgttgatggtggctttggttgtttagaaaactcgagctaccatccgtgggtcaaaagcatacacgaatccttgcggcagcaggggacactccagggtctcatagtgctgggctttaaaaaacctattgcatggcttcataagcacgcgagcacctttttcattgagagcgagcatcgcctcattgtgaaagaaaaggttgcgatccggatgagaggcggtcaacggccagatttcttggatggcttgatccgcaacaaggaagaactcggcctcgacgaaggacgcatagcgatgaatgcatcgatattcattatggccggatcggaaacaacggctactgtactttgcggttgtacatattacttaacaactcatcctgaaatcctgggcaagctcaaacgcgaaattcgatctacattcattaatgaacgcgacatcaacttgtccagcgttgataatctccctttaaaaatggctaaccttctttatgaagataacccgttcatggcgggcggagaaagatatagtccccatgatgccatcatagacggtcattttatcccacgaaatactattctcacatcatatcaatacgctattaaccgcgacaagcgctattggacccaacctgacaagttcgcaccggaacgatggacaaacgatcctgactacaagaatgatcaacttaatgccatgcagccattcggaatcggaccgcgtaattgcatcgggcgaaacctcgcttacgctgagatgcgcctcattcttgctcgaattatttacaactttgatatcgaaatagctgacgatagtcaattttggctagaaggtcagaaagcttatgtcggatggcataagcccaagctcaatgttcacatgagattggcatga

SEQ ID NO: 9965 - protein, 504 aa, Muscodor strobelii
  misc_feature: SGI Peptide ID NO. 563141
  misc_feature (49)..(501): Pfam Id: PF00067 Pfam Desc: Cytochrome P450
  misc_feature (381)..(501): Pfam Id: PF00067 Pfam Desc: Cytochrome P450
  misc_feature (162)..(364): Pfam Id: PF00067 Pfam Desc: Cytochrome P450
  misc_feature (20)..(501): NCBI GI: 224969386 Blast Desc: cytochrome P450 ClCP1 [Glomerella lindemuthiana]
  misc_feature (18)..(501): NCBI GI: 212545779 Blast Desc: cytochrome P450 monooxygenase, [Penicillium marneffei ATCC 18224] gi|210064563|gb|EEA18658.1| cytochrome P450 monooxygenase, [Penicillium marneffei ATCC 18224]
  misc_feature (29)..(501): NCBI GI: 255933153 Blast Desc: Pc12g12330 [Penicillium chrysogenum Wisconsin 54-1255] gi|211582666|emb|CAP80860.1| Pc12g12330 [Penicillium chrysogenum Wisconsin 54-1255]
  misc_feature (10)..(502): NCBI GI: 261202730 Blast Desc: cytochrome P450 monooxygenase [Ajellomyces dermatitidis SLH14081] gi|239590676|gb|EEQ73257.1| cytochrome P450 monooxygenase [Ajellomyces dermatitidis SLH14081]
  misc_feature (25)..(501): NCBI GI: 242777790 Blast Desc: cytochrome P450 monooxygenase, [Talaromyces stipitatus ATCC 10500] gi|218722724|gb|EED22142.1| cytochrome P450 monooxygenase, [Talaromyces stipitatus ATCC 10500]
  misc_feature (10)..(502): NCBI GI: 239612397 Blast Desc: cytochrome P450 monooxygenase [Ajellomyces dermatitidis ER-3]
  misc_feature (34)..(501): NCBI GI: 238502139 Blast Desc: cytochrome P450 monooxygenase, [Aspergillus flavus NRRL3357] gi|220691113|gb|EED47461.1| cytochrome P450 monooxygenase, [Aspergillus flavus NRRL3357]
  misc_feature (19)..(502): NCBI GI: 145241728 Blast Desc: An09g01950 [Aspergillus niger] gi|134078050|emb|CAK40133.1| protein product [Aspergillus niger]
  misc_feature (29)..(501): NCBI GI: 242801842 Blast Desc: cytochrome P450, [Talaromyces stipitatus ATCC 10500] gi|218717197|gb|EED16618.1| cytochrome P450, [Talaromyces stipitatus ATCC 10500]
  misc_feature (38)..(501): NCBI GI: 154285174 Blast Desc: [Ajellomyces capsulatus NAm1] gi|150407023|gb|EDN02564.1| [Ajellomyces capsulatus NAm1]
  misc_feature (130)..(484): SWISSPROT Homolog: EC 1.14.14.1 Unspecific monooxygenase
MLQSANPATNIYLLSVSRDANEKRLAKGVLVTLGTMFYNAFMHPLRQFPGPISHRVTVIPRAFYQMKGALAFHVAELHSQYGDVVSTVVRVAPNELAFSSLQAVRDIYKKNGQGQEFPKHKGFYKIFDHLPSSIINADTVEHGMLRRQFAVGFSDRAMREQEPIIKSYVDLLIQRLRENVDKSPSAACNMTDWFDWTLFDLIGDLSFGVDGGFGCLENSSYHPWVKSIHESLRQQGTLQGLIVLGFKKPIAWLHKHASTFFIESEHRLIVKEKVAIRMRGGQRPDFLDGLIRNKEELGLDEGRIAMNASIFIMAGSETTATVLCGCTYYLTTHPEILGKLKREIRSTFINERDINLSSVDNLPLKMANLLYEDNPFMAGGERYSPHDAIIDGHFIPRNTILTSYQYAINRDKRYWTQPDKFAPERWTNDPDYKNDQLNAMQPFGIGPRNCIGRNLAYAEMRLILARIIYNFDIEIADDSQFWLEGQKAYVGWHKPKLNVHMRLA

SEQ ID NO: 9966 - DNA, 713 bp, Muscodor strobelii
  misc_feature: SGI EST ID NO. CUFF.23557.0
  misc_feature: Variant of the nucleotide sequence at SEQ ID NO 9964
aaaatcttcgatcatttaccatcgtcaataatcaatgcagatactgtagaacatggtatgcttcgtcgacaatttgctgtcgggttttcagaccgcgcaatgcgcgaacaagaacctatcattaagagctacgttgatttgctgattcaaaggctgcgagaaaacgttgacaaatcaccatcagccgcctgcaacatgacagactggtttgattggactctatttgatttaatcggagatctcagttttggcgttgatggtggctttggttgtttagaaaactcgagctaccatccgtgggtcaaaagcatacacgaatccttgcggcagcaggggacactccagggtctcatagtgctgggctttaaaaaacctattgcatggcttcataagcacgcgagcacctttttcattgagagcgagcatcgcctcattgtgaaagaaaaggttgcgatccggatgagaggcggtcaacggccagatttcttggatggcttgatccgcaacaaggaagaactcggcctcgacgaaggacgcatagcgatgaatgcatcgatattcattatggccggatcggaaacaacggctactgtactttgcggttgtacatattacttaacaactcatcctgaaatcctgggcaagctcaaacgcgaaattcgatctacattcattaatgaacgcgacatcaacttgtccagcgttgataatct

SEQ ID NO: 9967 - DNA, 1248 bp, Muscodor strobelii
  misc_feature: SGI cDNA ID NO. 563142
  misc_feature: Encodes the peptide sequence at SEQ ID NO 9968
atgacgttgaatactacaaacaaaattgatcatgctcggaaaaggaagctgttgaacgtcgccttcacggagaaggcattgcgagctgcatctagcttcgtcatcaaacacgtggaccggtggcatagtattcttggtgaatgttgcaaggacgattggtcacctccggtagacttttcggacaaagtagacgatctcattttcgatatcatgggtgatctatgtttcggaaaatctttcgatatcaaagagcctggcgacaaccccttgaagagtatcccgaagcatatcactgcatatatgcagttttattatccgatttgccgctctccgcttctgaatctcatgctctggttaaagcctagaggcttagacaccatctttgcttttctcacacccagtcctgttaaacaatactatcagttcgtgtacgatcgggtgactgagagaatagcgaaacagcacgagcagaaatcatgggcagagtcacaacgccgacaagatatgttttatttcctttgtgaagcaatcgatggtgatacaggccttccagcatacactgagaacgaactccgtgcagaggcgaaccttttgattgttgctggattcgatgcgactgctctgacactgtccggaatattcttttacttaacaggcgatgagcgtcgataccaaaagctcgtgcgcgaaattcgaacaacttttaatcgtacagaagacatcgtttatggatcaaagctttcggactgcacttatttacaagcatgtatcgacgagggaatgcgcctcactccgtccggtgtaagtgagtttccgagggaagtgctgaaaggcggaatacagattcaagggaatcactacccagctggaatcatcgtagggacagtaccatgggcaaacagtcggaacgaagaggtcttcggagatccaggggtgtttaggcccgaacgatggatcattgaccaaaccaatacgaaagacgacgtagctaaaattcggtcgaacttccacccttttgcgactggacctggtacctgtattggcaagcatctggcgatgacggagctactgcttatagttgcaagaactattcacaaattagacattcgaagaacaccaggctctactgttggaggaggttctcccgagcgaggatggggtgctagagatagcaagcagttccaattgcttgatgcgtatattggtgtgcgacatggtccagtagtgcagttcaggtgcagatgctga

SEQ ID NO: 9968 - protein, 415 aa, Muscodor strobelii
  misc_feature: SGI Peptide ID NO. 563142
  misc_feature (1)..(398): Pfam Id: PF00067 Pfam Desc: Cytochrome P450
  misc_feature (186)..(366): Pfam Id: PF00067 Pfam Desc: Cytochrome P450
  misc_feature (2)..(414): NCBI GI: 119483816 Blast Desc: benzoate 4-monooxygenase cytochrome P450 [Neosartorya fischeri NRRL 181] gi|119409967|gb|EAW19914.1| benzoate 4-monooxygenase cytochrome P450 [Neosartorya fischeri NRRL 181]
  misc_feature (2)..(414): NCBI GI: 115386118 Blast Desc: [Aspergillus terreus NIH2624] gi|114190598|gb|EAU32298.1| [Aspergillus terreus NIH2624]
  misc_feature (2)..(414): NCBI GI: 189189070 Blast Desc: cytochrome P450 67 [Pyrenophora tritici-repentis Pt-1C-BFP] gi|187972480|gb|EDU39979.1| cytochrome P450 67 [Pyrenophora tritici-repentis Pt-1C-BFP]
  misc_feature (2)..(414): NCBI GI: 189204718 Blast Desc: cytochrome P450 67 [Pyrenophora tritici-repentis Pt-1C-BFP] gi|187985793|gb|EDU51281.1| cytochrome P450 67 [Pyrenophora tritici-repentis Pt-1C-BFP]
  misc_feature (2)..(414): NCBI GI: 256727731 Blast Desc: NECHADRAFT_76848 [Nectria haematococca mpVI 77-13-4]
  misc_feature (130)..(414): NCBI GI: 154314239 Blast Desc: BC1G_05213 [Botryotinia fuckeliana B05.10] gi|150848858|gb|EDN24051.1| BC1G_05213 [Botryotinia fuckeliana B05.10]
  misc_feature (2)..(415): NCBI GI: 154313085 Blast Desc: BC1G_05544 [Botryotinia fuckeliana B05.10] gi|150849629|gb|EDN24822.1| BC1G_05544 [Botryotinia fuckeliana B05.10]
  misc_feature (2)..(415): NCBI GI: 156062766 Blast Desc: SS1G_01499 [Sclerotinia sclerotiorum 1980] gi|154696835|gb|EDN96573.1| SS1G_01499 [Sclerotinia sclerotiorum 1980]
  misc_feature (4)..(414): NCBI GI: 169603764 Blast Desc: SNOG_04890 [Phaeosphaeria nodorum SN15] gi|111066161|gb|EAT87281.1| SNOG_04890 [Phaeosphaeria nodorum SN15]
  misc_feature (2)..(412): NCBI GI: 46123381 Blast Desc: FG06068.1 [Gibberella zeae PH-1]
  misc_feature (3)..(359): SWISSPROT Homolog: EC 1.14.13.12 Benzoate 4-monooxygenase
MTLNTTNKIDHARKRKLLNVAFTEKALRAASSFVIKHVDRWHSILGECCKDDWSPPVDFSDKVDDLIFDIMGDLCFGKSFDIKEPGDNPLKSIPKHITAYMQFYYPICRSPLLNLMLWLKPRGLDTIFAFLTPSPVKQYYQFVYDRVTERIAKQHEQKSWAESQRRQDMFYFLCEAIDGDTGLPAYTENELRAEANLLIVAGFDATALTLSGIFFYLTGDERRYQKLVREIRTTFNRTEDIVYGSKLSDCTYLQACIDEGMRLTPSGVSEFPREVLKGGIQIQGNHYPAGIIVGTVPWANSRNEEVFGDPGVFRPERWIIDQTNTKDDVAKIRSNFHPFATGPGTCIGKHLAMTELLLIVARTIHKLDIRRTPGSTVGGGSPERGWGARDSKQFQLLDAYIGVRHGPVVQFRCRC

SEQ ID NO: 9969 - DNA, 182 bp, Muscodor strobelii
  misc_feature: SGI EST ID NO. CUFF.23572.0
  misc_feature: Variant of the nucleotide sequence at SEQ ID NO 9967
cgattggtcacctccggtagacttttcggacaaagtagacgatctcattttcgatatcatgggtgatctatgtttcggaaaatctttcgatatcaaagagcctggcgacaaccccttgaagagtatcccgaagcatatcactgcatatatgcagttttattatccgatttgccgctctccgc

SEQ ID NO: 9970 - DNA, 1074 bp, Muscodor strobelii
  misc_feature: SGI cDNA ID NO. 563143
  misc_feature: Encodes the peptide sequence at SEQ ID NO 9971
atgtgggatcacgccttgaactcgggctccatgactcattactacgatgcgatcattaagcatatagagacctttcgtgaaatagttcatcagtcaaagtcgcaaccgctctcagtcaatgagccgatttctacgttgatgctaaaagcaattggtgatattggttttggtcaggatctcaataggatggaagccacagagctgaagaaagtcaatgggtggatgcgttcctctcttagcctactcggcccttttggttcttgcacatggatacctagacttgttctagcatactctcctcgtgtatggaaagttcaagactggtataatatgcggggatttgcagacaattgcatggctttgaggaaactgactcgccataaagacaaatgccttgatatggtatcgttctttctcgaaacatttgaacagaaacagggtgagccaggttggcaaaatattagtggagatgcaacgactgtccttgtagctggaagtgatacaacgacgtccagtctcatattcctattatactttctcgctagacatcctaaagatgtagagaaaactcagcaggaattgacaggcattgattgcactgatgtaaatgccctgtccaggttaaagcatctcaatggtgtcatcaatgagacaatgcgacttctcccttcgattccgacctttggtgagagaatgacgcctcccgaaggcttgactgtagacggaaccttcatccctggcaacacaaaaataacagcgccacgttactctatcggtcgtctcgagactgcttacgcaaaccctcattgttttattcctgagagatggtacagtttgccgcatctcatcaaagacaagcgaagctatgcgccattcggacttggacgaacgagctgtgttggcaaaaagctgtcactcgtgtttatgagacttttcgtagcatctatgcttagtaaatacaacatcagacctgcacccgacacagcggatggatacgccgtggaggcagatttgaaagatcaactcacggcgaatgcgggtgaactggtattgatttttgaaccacgtcgatag

SEQ ID NO: 9971 - protein, 357 aa, Muscodor strobelii
  misc_feature: SGI Peptide ID NO. 563143
  misc_feature (1)..(353): Pfam Id: PF00067 Pfam Desc: Cytochrome P450
  misc_feature (113)..(328): Pfam Id: PF00067 Pfam Desc: Cytochrome P450
  misc_feature (1)..(356): NCBI GI: 242805794 Blast Desc: cytochrome P450, [Talaromyces stipitatus ATCC 10500] gi|218715231|gb|EED14653.1| cytochrome P450, [Talaromyces stipitatus ATCC 10500]
  misc_feature (39)..(354): NCBI GI: 169614173 Blast Desc: SNOG_10222 [Phaeosphaeria nodorum SN15] gi|160707291|gb|EAT82557.2| SNOG_10222 [Phaeosphaeria nodorum SN15]
  misc_feature (51)..(294): NCBI GI: 255950776 Blast Desc: Pc22g22610 [Penicillium chrysogenum Wisconsin 54-1255] gi|211593172|emb|CAP99549.1| Pc22g22610 [Penicillium chrysogenum Wisconsin 54-1255]
  misc_feature (1)..(356): NCBI GI: 242771984 Blast Desc: benzoate 4-monooxygenase cytochrome P450, [Talaromyces stipitatus ATCC 10500] gi|218721570|gb|EED20988.1| benzoate 4-monooxygenase cytochrome P450, [Talaromyces stipitatus ATCC
  misc_feature (1)..(356): NCBI GI: 171691038 Blast Desc: protein product [Podospora anserina] gi|170945467|emb|CAP71579.1| protein product [Podospora anserina]
  misc_feature (33)..(353): NCBI GI: 67515453 Blast Desc: AN0008.2 [Aspergillus nidulans FGSC A4] gi|40746171|gb|EAA65327.1| AN0008.2 [Aspergillus nidulans FGSC A4]
  misc_feature (2)..(357): NCBI GI: 121720148 Blast Desc: benzoate 4-monooxygenase cytochrome P450 [Aspergillus clavatus NRRL 1] gi|119404984|gb|EAW15346.1| benzoate 4-monooxygenase cytochrome P450 [Aspergillus clavatus NRRL 1]
  misc_feature (1)..(357): NCBI GI: 145258880 Blast Desc: An04g08440 [Aspergillus niger] gi|134074816|emb|CAK38931.1| protein product [Aspergillus niger]
  misc_feature (1)..(354): NCBI GI: 119189629 Blast Desc: conserved [Coccidioides immitis RS]
  misc_feature (2)..(356): NCBI GI: 46114488 Blast Desc: FG03086.1 [Gibberella zeae PH-1]
  misc_feature (48)..(326): SWISSPROT Homolog: EC 1.14.13.13 Calcidiol 1-monooxygenase
MWDHALNSGSMTHYYDAIIKHIETFREIVHQSKSQPLSVNEPISTLMLKAIGDIGFGQDLNRMEATELKKVNGWMRSSLSLLGPFGSCTWIPRLVLAYSPRVWKVQDWYNMRGFADNCMALRKLTRHKDKCLDMVSFFLETFEQKQGEPGWQNISGDATTVLVAGSDTTTSSLIFLLYFLARHPKDVEKTQQELTGIDCTDVNALSRLKHLNGVINETMRLLPSIPTFGERMTPPEGLTVDGTFIPGNTKITAPRYSIGRLETAYANPHCFIPERWYSLPHLIKDKRSYAPFGLGRTSCVGKKLSLVFMRLFVASMLSKYNIRPAPDTADGYAVEADLKDQLTANAGELVLIFEPRR

SEQ ID NO: 9972 - DNA, 276 bp, Muscodor strobelii
  misc_feature: SGI EST ID NO. CUFF.23584.0
  misc_feature: Variant of the nucleotide sequence at SEQ ID NO 9970
tctcgctagacatcctaaagatgtagagaaaactcagcaggaattgacaggcattgattgcactgatgtaaatgccctgtccaggttaaagcatctcaatggtgtcatcaatgagacaatgcgacttctcccttcgattccgacctttggtgagagaatgacgcctcccgaaggcttgactgtagacggaaccttcatccctggcaacacaaaaataacagcgccacgttactctatcggtcgtctcgagactgcttacgcaaaccctcattgttt

SEQ ID NO: 9973 - DNA, 858 bp, Muscodor strobelii
  misc_feature: SGI cDNA ID NO. 563144
  misc_feature: Elevated expression when VOC is produced
  misc_feature: Encodes the peptide sequence at SEQ ID NO 9974
atggagccacctttcccttgtccaacgcaaaagtggcataatgatctttacccaccaatccagtactcgaatcctcagttgagtcgggagggcgacactgtcgttgtcactggagctggctctgggatagggcgtgagacagccgttgctttcgctaccgcgggcgcgaagcatatactgcttctcggtcgtgatgaatcagctcttaaagagacagagtcacagacactgcaagccaataacagtacacaggtcaccgtccatgtgggagatgtttccgatgaagatgttatcaagaaagtagcaggtagccttgatagctggaatgtcatcgttcactgcgctgcctacatgaactcgccttccccaatttcgacagctgacgtcgacacttacttcaaatgttacgagaccaatgtgaaaagtctcgccctgctcgccaaatactttacccaaacggcgcatccaaccgacgcttctttcatagctctcattgccggtcctgttgctctccccccatcaatggtgatagggctgtccggctatcttgtatcgaagctggctatgtcaaagatgatcgaatttctttctgttgaggacactcaagtcaatttttttgctgttcacccgggcttcattgatacctacctgtttcgaagatctggagctcagccggaaacgatgccaatggataccgtgcaacttgctgctgggttcaatctttggatttcctcatccaacgcccgatttctcaatggaaagacagtgtgggctaactgggatatcgatgaactgattgacatgaaagaagacattgtgcagggcagcaagctgtcttatactctgaacggtctttga

SEQ ID NO: 9974 - protein, 285 aa, Muscodor strobelii
  misc_feature: SGI Peptide ID NO. 563144
  misc_feature (32)..(188): Pfam Id: PF00106 Pfam Desc: short chain dehydrogenase
  misc_feature (33)..(211): Pfam Id: PF08659 Pfam Desc: KR domain
  misc_feature (32)..(116): Pfam Id: PF00106 Pfam Desc: short chain dehydrogenase
  misc_feature (33)..(96): Pfam Id: PF08659 Pfam Desc: KR domain
  misc_feature (34)..(117): Pfam Id: PF02719 Pfam Desc: Polysaccharide biosynthesis protein
  misc_feature (1)..(284): NCBI GI: 154316564 Blast Desc: BC1G_04213 [Botryotinia fuckeliana B05.10] gi|150846013|gb|EDN21206.1| BC1G_04213 [Botryotinia fuckeliana B05.10]
  misc_feature (1)..(284): NCBI GI: 156052701 Blast Desc: SS1G_06517 [Sclerotinia sclerotiorum 1980] gi|154704296|gb|EDO04035.1| SS1G_06517 [Sclerotinia sclerotiorum 1980]
  misc_feature (1)..(284): NCBI GI: 121720144 Blast Desc: NADP(+)-dependent dehydrogenase, [Aspergillus clavatus NRRL 1] gi|119404982|gb|EAW15344.1| NADP(+)-dependent dehydrogenase, [Aspergillus clavatus NRRL 1]
  misc_feature (17)..(284): NCBI GI: 46117514 Blast Desc: FG04599.1 [Gibberella zeae PH-1]
  misc_feature (5)..(284): NCBI GI: 212541548 Blast Desc: short-chain dehydrogenase, [Penicillium marneffei ATCC 18224] gi|210068228|gb|EEA22320.1| short-chain dehydrogenase, [Penicillium marneffei ATCC 18224]
  misc_feature (1)..(282): NCBI GI: 116198493 Blast Desc: CHGG_07402 [Chaetomium globosum CBS 148.51] gi|88178681|gb|EAQ86149.1| CHGG_07402 [Chaetomium globosum CBS 148.51]
  misc_feature (4)..(284): NCBI GI: 169762954 Blast Desc: [Aspergillus oryzae RIB40] gi|83770405|dbj|BAE60538.1| protein product [Aspergillus oryzae]
  misc_feature (4)..(284): NCBI GI: 119173190 Blast Desc: CIMG_10113 [Coccidioides immitis RS]
  misc_feature (4)..(284): NCBI GI: 238488779 Blast Desc: oxidoreductase, short chain dehydrogenase/reductase family, [Aspergillus flavus NRRL3357] gi|220698015|gb|EED54355.1| oxidoreductase, short chain dehydrogenase/reductase family,
  misc_feature (11)..(285): NCBI GI: 119193560 Blast Desc: CIMG_01157 [Coccidioides immitis RS]
  misc_feature (30)..(235): SWISSPROT Homolog: EC 1.1.1.102 3-dehydrosphinganine reductase
  misc_feature: Useful for introducing or modulating the production of volatile compounds
MEPPFPCPTQKWHNDLYPPIQYSNPQLSREGDTVVVTGAGSGIGRETAVAFATAGAKHILLLGRDESALKETESQTLQANNSTQVTVHVGDVSDEDVIKKVAGSLDSWNVIVHCAAYMNSPSPISTADVDTYFKCYETNVKSLALLAKYFTQTAHPTDASFIALIAGPVALPPSMVIGLSGYLVSKLAMSKMIEFLSVEDTQVNFFAVHPGFIDTYLFRRSGAQPETMPMDTVQLAAGFNLWISSSNARFLNGKTVWANWDIDELIDMKEDIVQGSKLSYTLNGL

SEQ ID NO: 9975 - DNA, 1083 bp, Muscodor strobelii
  misc_feature: SGI EST ID NO. CUFF.23602.0
  misc_feature: Variant of the nucleotide sequence at SEQ ID NO 9973
ttctactacaagcagctgaaactatagatataggtggcctatcacaaagattgtcttgtgatcatcgaagcatcatctacatagaagtgattcatactatttattgtaggtggatcgataaacgccatggagccacctttcccttgtccaacgcaaaagtggcataatgatctttacccaccaatccagtactcgaatcctcagttgagtcgggagggcgacactgtcgttgtcactggagctggctctgggatagggcgtgagacagccgttgctttcgctaccgcgggcgcgaagcatatactgcttctcggtcgtgatgaatcagctcttaaagagacagagtcacagacactgcaagccaataacagtacacaggtcaccgtccatgtgggagatgtttccgatgaagatgttatcaagaaagtagcaggtagccttgatagctggaatgtcatcgttcactgcgctgcctacatgaactcgccttccccaatttcgacagctgacgtcgacacttacttcaaatgttacgagaccaatgtgaaaagtctcgccctgctcgccaaatactttacccaaacggcgcatccaaccgacgcttctttcatagctctcattgccggtcctgttgctctccccccatcaatggtgatagggctgtccggctatcttgtatcgaagctggctatgtcaaagatgatcgaatttctttctgttgaggacactcaagtcaatttttttgctgttcacccgggcttcattgatacctacctgtttcgaagatctggagctcagccggaaacgatgccaatggataccgtgcaacttgctgctgggttcaatctttggatttcctcatccaacgcccgatttctcaatggaaagacagtgtgggctaactgggatatcgatgaactgattgacatgaaagaagacattgtgcagggcagcaagctgtcttatactctgaacggtctttgaaccaggaatttagattacttgaataccttttttttataaagatagctccgtctgtgtacatgcatactatcgtattttcaaagtaaaactcatctccta

SEQ ID NO: 9976 - DNA, 1014 bp, Muscodor strobelii
  misc_feature: SGI cDNA ID NO. 563145
  misc_feature: Encodes the peptide sequence at SEQ ID NO 9977
atggatccaaacacgacacccgcgctcaagcccccaggcgatttgacctcgaattttgacaaccctttttccatccacactgccgaggttgttgtgtcatccgtgtcccttgctctatgcacaacatttgtcgccgcacatgtatacgctcgagctgtacttatgaaaacattcaggctaaccgatgttgctcttttgatctcattggcatcgcttgcagcgtacgttgcgattgctatctacgacggccagtttggtcaaggtacacatcaatgggacgtcaccttggcagacttcttgaagctccagcagcccctcaatgtcctcgaaattctgtacagccctgtcgtatttggtgcgaagtacgctgtgcttcggcaaatcgagactattttctttgagcaccgccgtaagcacctagcctatcggattattcgaggcctaatatgggccaattttctcttctacgcggccattatgttcgttttcatattcgcgtgcgttccacgagaaaagatatggaacccatttctgcctggcaaatgcatcgataccacagctgccatcgtcggtagcggaacgattaacctagtatctgacttgacgatactcattgtacccgtctcgactgtgttgagtctcaaaataccaaccaagaagaaactcggcatcgctgctgtgtttgcagttggtatccttgcaaatatagcgagcgcaatcaagctctactatagcgtcaagctgacccagacacaagacataacgtttgcaatatctcatgttggtttcgcctcatttgcggagattacttcaattttccttgttgcttgcgtgcctcaatttccacgaatcattcaacacttcagacatcaaaaagcatcgcagacggaatatccctcaacaggaatgggtcggaaaaagacctctgactacatacaggttgaggaaggcatccagttgcctgagtcgcgcagtaaatcatcgacccgtagcgatgaacctctgcgaggctaa

SEQ ID NO: 9977 - protein, 337 aa, Muscodor strobelii
  misc_feature: SGI Peptide ID NO. 563145
  misc_feature (36)..(302): NCBI GI: 16945439 Blast Desc: related to integral membrane protein PTH11 [Neurospora crassa]
  misc_feature (8)..(287): NCBI GI: 156057637 Blast Desc: SS1G_04550 [Sclerotinia sclerotiorum 1980] gi|154702335|gb|EDO02074.1| SS1G_04550 [Sclerotinia sclerotiorum 1980]
  misc_feature (74)..(288): NCBI GI: 67528508 Blast Desc: AN4452.2 [Aspergillus nidulans FGSC A4] gi|40741027|gb|EAA60217.1| AN4452.2 [Aspergillus nidulans FGSC A4] gi|259482731|tpe|CBF77490.1| TPA: 60S ribosomal protein L36
  misc_feature (17)..(301): NCBI GI: 169614171 Blast Desc: SNOG_10221 [Phaeosphaeria nodorum SN15] gi|111061436|gb|EAT82556.1| SNOG_10221 [Phaeosphaeria nodorum SN15]
  misc_feature (93)..(302): NCBI GI: 164423873 Blast Desc: NCU07769 [Neurospora crassa OR74A] gi|157070267|gb|EAA29027.2| [Neurospora crassa OR74A]
  misc_feature (74)..(301): NCBI GI: 238489453 Blast Desc: conserved [Aspergillus flavus NRRL3357] gi|220698352|gb|EED54692.1| conserved [Aspergillus flavus NRRL3357]
  misc_feature (1)..(291): NCBI GI: 189197019 Blast Desc: conserved [Pyrenophora tritici-repentis Pt-1C-BFP] gi|187980795|gb|EDU47421.1| conserved [Pyrenophora tritici-repentis Pt-1C-BFP]
  misc_feature (7)..(337): NCBI GI: 242818275 Blast Desc: conserved [Talaromyces stipitatus ATCC 10500] gi|218713549|gb|EED12973.1| conserved [Talaromyces stipitatus ATCC 10500]
  misc_feature (29)..(240): NCBI GI: 115398095 Blast Desc: conserved [Aspergillus terreus NIH2624] gi|114192830|gb|EAU34530.1| conserved [Aspergillus terreus NIH2624]
  misc_feature (7)..(328): NCBI GI: 256727941 Blast Desc: NECHADRAFT_26479 [Nectria haematococca mpVI 77-13-4]
MDPNTTPALKPPGDLTSNFDNPFSIHTAEVVVSSVSLALCTTFVAAHVYARAVLMKTFRLTDVALLISLASLAAYVAIAIYDGQFGQGTHQWDVTLADFLKLQQPLNVLEILYSPVVFGAKYAVLRQIETIFFEHRRKHLAYRIIRGLIWANFLFYAAIMFVFIFACVPREKIWNPFLPGKCIDTTAAIVGSGTINLVSDLTILIVPVSTVLSLKIPTKKKLGIAAVFAVGILANIASAIKLYYSVKLTQTQDITFAISHVGFASFAEITSIFLVACVPQFPRIIQHFRHQKASQTEYPSTGMGRKKTSDYIQVEEGIQLPESRSKSSTRSDEPLRG

SEQ ID NO: 9978 - DNA, 1035 bp, Muscodor strobelii
  misc_feature: SGI cDNA ID NO. 563146
  misc_feature: Encodes the peptide sequence at SEQ ID NO 9979
atggcggacttaaataaaggaatgaatcgaatcatgcgggtcacctacgacacgctggacggtcagcgaattcgagatgatcccgcggtcgctgttgagcgttatgacattcatggcgttcccaccgcacagggtcagactaatggtataaatctattttatacgccatccgcgaccgtcactccaccggaagctcctcgcccaccaccagctccgcggccgagaaagagaaagagaggagagaaaatatttccgcgggactttgatgaagatgagaaggagaaagaggaagaagaagtggaagagcagtcggtactagtaggcgggcatcatggtttaggctctctgaacgctttacctgtatcaccagaggttcttttcacgcatgggagcaatcgagggatcgaccaacccagcttccagcagttcgtttctggccttgcccgcaactgttctgttctcgccttcaacaaagataccgaaaacgacagcacagataggcgtgttgccgcaatgaattacttttttaacgatgcgtatggaaatgttcgcgcactgggagggcgaagctttggagcgagagtcgctgtaagaacaactgcgttcggtagcggcaataagaacttgattctctggagttatccactagttcgagacatggatatcagggacgaagagcttttagcattgccggcagacgcgagggttttgttcatcaggggaatggaagactatatgaatccggagccgatattcagaaaggttcgagaaaagatgcgagcaaagacttgggtgattcacatcttgaaagtgaatcatggatttacaaatttgcctagtgaggacgcagaacaagcgctttctcgatgccttggcgtaatcgctgggctctggcttcgtggagatgtgtcaaatccccagaagccgaagccgtgggatcctctagacgggaccgatatggtagttaagtggaacaatcaaaccaagcaagtagagtggacgggctgggaggcggaacgccccaagatgagataa

SEQ ID NO: 9979 - protein, 344 aa, Muscodor strobelii
  misc_feature: SGI Peptide ID NO. 563146
  misc_feature (121)..(305): NCBI GI: 169612091 Blast Desc: SNOG_09162 [Phaeosphaeria nodorum SN15] gi|160702436|gb|EAT83354.2| SNOG_09162 [Phaeosphaeria nodorum SN15]
  misc_feature (121)..(276): NCBI GI: 12839613 Blast Desc: protein product [Mus musculus]
  misc_feature (125)..(276): NCBI GI: 126337487 Blast Desc: : similar to chromosome 13 open reading frame 27 [Monodelphis domestica]
  misc_feature (120)..(273): NCBI GI: 149634976 Blast Desc: : similar to chromosome 13 open reading frame 27 [Ornithorhynchus anatinus]
  misc_feature (125)..(273): NCBI GI: 90077778 Blast Desc: protein product [Macaca fascicularis]
  misc_feature (125)..(276): NCBI GI: 189054641 Blast Desc: protein product [Homo sapiens]
  misc_feature (125)..(275): NCBI GI: 208610011 Blast Desc: LOC613895 [Bos taurus] gi|125863813|sp|Q3ZC52.2|CM027_BOVIN RecName: Full=Uncharacterized protein C13orf27 homolog
  misc_feature (121)..(276): NCBI GI: 198278417 Blast Desc: LOC75623 [Mus musculus] gi|123790488|sp|Q3TUU5.1|CM027_MOUSE RecName: Full=Uncharacterized protein C13orf27 homolog protein product
  misc_feature (121)..(276): NCBI GI: 157823893 Blast Desc: LOC301381 [Rattus norvegicus] gi|149046246|gb|EDL99139.1| similar to BC015148 () [Rattus norvegicus]
  misc_feature (125)..(276): NCBI GI: 50730597 Blast Desc: : similar to OTTHUMP00000018668 [Gallus gallus]
MADLNKGMNRIMRVTYDTLDGQRIRDDPAVAVERYDIHGVPTAQGQTNGINLFYTPSATVTPPEAPRPPPAPRPRKRKRGEKIFPRDFDEDEKEKEEEEVEEQSVLVGGHHGLGSLNALPVSPEVLFTHGSNRGIDQPSFQQFVSGLARNCSVLAFNKDTENDSTDRRVAAMNYFFNDAYGNVRALGGRSFGARVAVRTTAFGSGNKNLILWSYPLVRDMDIRDEELLALPADARVLFIRGMEDYMNPEPIFRKVREKMRAKTWVIHILKVNHGFTNLPSEDAEQALSRCLGVIAGLWLRGDVSNPQKPKPWDPLDGTDMVVKWNNQTKQVEWTGWEAERPKMR

SEQ ID NO: 9980 - DNA, 2214 bp, Muscodor strobelii
  misc_feature: SGI cDNA ID NO. 563147
  misc_feature: Elevated expression when VOC is produced
  misc_feature: Encodes the peptide sequence at SEQ ID NO 9981
atgggtgatcgcagagatcagagattgatgacactgtgcgcggagatcctggtcagggctcccagcgcaatgtcttatgtcagggtcggtagtggtggtgtgggctacgggcaagttgctgccaaaaaggagggccgaatcacgggcgacgagggttttacggtgaccagacccgccggcttggtctgctggagccgtcatccaatggtggtgctcccttgcatggcatcgcgcacgcacgctgcatgggtgtgtagcaacgatgcttgggtggctctgcgcactgtcgcgctgccagcccaccgcggcccacttggtgctctggctgcagcagcacactctcgagtcctgtcgccgcccgcgtgccgccatgtgctgagccaggccctcgaacactgcaccctcgaattcgaatactcggcgctgcatcgaaactcgacccaggcctgtgttaaggttggccagctgcaaatcgcatcggtcgaggcgagtcagtccacgccggaagccagcgcttcgggttcctgtccgcccttccccaaccctccacctcccatcgaccagccaaactcaaaccaccgacccaactcgacggtcgaccgccgccgaaccccaaatcgctcgccccactcgcacgcatccgtcgccaggcagggcatcgacatgctgcaatcctccaagatgctgaccatacaaccagacaatctgttgggtcttgccgatgtccgatcaaaacaatcgcatccctccctggacaaagtcatttctagggacacgcgagatggccgccgtctcttctatcgcatggaagtgctgcaacagcccgaacgtgctcgagcttgtggttcggggccaaaatcatctaacgatcgccgtcccgttgaccccccaccggttgtcgtgctgaagatatatgaaggcgcaactttggaacacgccagagatgttacctttgactacaatgtcgatttcttctgctacgcctccctagaacaagcccgtgtcattgcgcccggccgagtgcaagcacctcaggccaaccaagtgcccgtcctctccggcttcccggtgtccggatgctgctacctcgaccggcccgaccctgccggatatttcatcttcccagatctttcggtccgccacgagggccgttaccgtcttgtgttcagcctctacgaattagtgaaggacgagaaggacctggatcccatcggcgaagcttccaaatccggggaggaatgccagctcaacgaagcccgccatcgcatggatcttagctccgccgaattcaccgtgtatagtgcgaagaaattcccgggcctcacagaaagcacacatctcagccgaactgtcgctgaacagggctgccgagtgcgtatccgacgtgacattcgcatgaggcgacgagacccgaatcccaaggcttcagcgccggaagaatacaacaatggcgaagacaagtaccaaggtaccggaacgcatacccctgagcatatgcgtgctcgctcgtcaagcaactcgagcatgaacagggcgccatattcggccgtcgagaggcggccgtcgatgatgggagagtatgagaatggtgcaccatcaccgtcaccatatgggcctaagtcgactgcgagtaatatactgaatttcagtgggcaaagtcacaaaggtttctcgcaaccatcttacgctcctgctcctagcataaatccgcagtcgacaccagtttcgcctgcgcagacgaatttcccctacgccgcaggcactgcagtaccaccatcacccagctatacaaacccggccttttcaccgttccatcagagcgacagcgagagatatccatcatactcgcaaactcccatcgccgctcggccctctagatctgatgatttaagatcttctatcagctccgctgtatctacggacggaagacaactgccggtcatcttgcctcatgtcggagcggatgtttcgtccaaataccacaataagcttccaaccatcgctccagctcccccatctgggtactggcctgaccggtccgcggcgcccatgaagcgttcagcagattcatccttcccgtcacatgaccaccatcgcaacatcgtaggcgatagaatggagagccatcggattactatcccgtctttcagtgacaattcgtatcgcaaggctgatggcagctatggttcggttgacttcccttgcggatattaa

SEQ ID NO: 9981 - protein, 737 aa, Muscodor strobelii
  misc_feature: SGI Peptide ID NO. 563147
  misc_feature (255)..(733): NCBI GI: 256730839 Blast Desc: NECHADRAFT_98593 [Nectria haematococca mpVI 77-13-4]
  misc_feature (255)..(733): NCBI GI: 83320511 Blast Desc: VeA protein [Gibberella moniliformis]
  misc_feature (255)..(625): NCBI GI: 146741181 Blast Desc: velvetA [Acremonium chrysogenum]
  misc_feature (251)..(670): NCBI GI: 85083653 Blast Desc: NCU01731 [Neurospora crassa OR74A] gi|8218240|emb|CAB92641.1| related to VeA protein [Neurospora crassa] gi|28918241|gb|EAA27918.1| [Neurospora crassa OR74A]
  misc_feature (247)..(582): NCBI GI: 171689036 Blast Desc: protein product [Podospora anserina] gi|170944480|emb|CAP70591.1| protein product [Podospora anserina]
  misc_feature (227)..(489): NCBI GI: 156050081 Blast Desc: SS1G_07626 [Sclerotinia sclerotiorum 1980] gi|154692028|gb|EDN91766.1| SS1G_07626 [Sclerotinia sclerotiorum 1980]
  misc_feature (254)..(456): NCBI GI: 39946688 Blast Desc: MGG_08556 [Magnaporthe grisea 70-15] gi|145012409|gb|EDJ97065.1| MGG_08556 [Magnaporthe grisea 70-15]
  misc_feature (250)..(456): NCBI GI: 154317986 Blast Desc: BC1G_02976 [Botryotinia fuckeliana B05.10] gi|150843634|gb|EDN18827.1| BC1G_02976 [Botryotinia fuckeliana B05.10]
  misc_feature (257)..(523): NCBI GI: 189195282 Blast Desc: sexual development activator VeA [Pyrenophora tritici-repentis Pt-1C-BFP] gi|187979858|gb|EDU46484.1| sexual development activator VeA [Pyrenophora tritici-repentis
  misc_feature (248)..(562): NCBI GI: 255937415 Blast Desc: Pc13g13200 [Penicillium chrysogenum Wisconsin 54-1255] gi|211584354|emb|CAP92389.1| Pc13g13200 [Penicillium chrysogenum Wisconsin 54-1255]
  misc_feature: Useful for introducing or modulating the production of volatile compounds
MGDRRDQRLMTLCAEILVRAPSAMSYVRVGSGGVGYGQVAAKKEGRITGDEGFTVTRPAGLVCWSRHPMVVLPCMASRTHAAWVCSNDAWVALRTVALPAHRGPLGALAAAAHSRVLSPPACRHVLSQALEHCTLEFEYSALHRNSTQACVKVGQLQIASVEASQSTPEASASGSCPPFPNPPPPIDQPNSNHRPNSTVDRRRTPNRSPHSHASVARQGIDMLQSSKMLTIQPDNLLGLADVRSKQSHPSLDKVISRDTRDGRRLFYRMEVLQQPERARACGSGPKSSNDRRPVDPPPVVVLKIYEGATLEHARDVTFDYNVDFFCYASLEQARVIAPGRVQAPQANQVPVLSGFPVSGCCYLDRPDPAGYFIFPDLSVRHEGRYRLVFSLYELVKDEKDLDPIGEASKSGEECQLNEARHRMDLSSAEFTVYSAKKFPGLTESTHLSRTVAEQGCRVRIRRDIRMRRRDPNPKASAPEEYNNGEDKYQGTGTHTPEHMRARSSSNSSMNRAPYSAVERRPSMMGEYENGAPSPSPYGPKSTASNILNFSGQSHKGFSQPSYAPAPSINPQSTPVSPAQTNFPYAAGTAVPPSPSYTNPAFSPFHQSDSERYPSYSQTPIAARPSRSDDLRSSISSAVSTDGRQLPVILPHVGADVSSKYHNKLPTIAPAPPSGYWPDRSAAPMKRSADSSFPSHDHHRNIVGDRMESHRITIPSFSDNSYRKADGSYGSVDFPCGY

SEQ ID NO: 9982 - DNA, 2857 bp, Muscodor strobelii
  misc_feature: SGI EST ID NO. CUFF.23638.0
  misc_feature: Variant of the nucleotide sequence at SEQ ID NO 9980
caggagcatcccaggaggccccctgcgacggccattcgaaccgttgcttgctgttccagaaacccaggccgcaaacccagcccgccgtgcccagcggcatcccagcatcccaggagcccgtcatctatagtcttgggtcccgcctcttattctcctctctcctcccccgttgcatccaacacgttcactgccgcccgccacgccgcgccaacctgctcgccgacaacgtcaaactctacccgggctcgtaacgtgctcacccctcggcaacagcagcagcacactctcgagtcctgtcgccgcccgcgtgccgccatgtgctgagccaggccctcgaacactgcaccctcgaattcgaatactcggcgctgcatcgaaactcgacccaggcctgtgttaaggttggccagctgcaaatcgcatcggtcgaggcgagtcagtccacgccggaagccagcgcttcgggttcctgtccgcccttccccaaccctccacctcccatcgaccagccaaactcaaaccaccgacccaactcgacggtcgaccgccgccgaaccccaaatcgctcgcccgttttgcctttgccctagctattcgctgccagagccaaccccaagcaccccaagcttcttctccgcccacagcctcggatcctgtcagtcgtgaagaatcaataattccgtcaatcagcactcgcacgcatccgtcgccaggcagggcatcgacatgctgcaatcctccaagatgctgaccatacaaccagacaatctgttgggtcttgccgatgtccgatcaaaacaatcgcatccctccctggacaaagtcatttctagggacacgcgagatggccgccgtctcttctatcgcatggaagtgctgcaacagcccgaacgtgctcgagcttgtggttcggggccaaaatcatctaacgatcgccgtcccgttgaccccccaccggttgtcgtgctgaagatatatgaaggcgcaactttggaacacgccagagatgttacctttgactacaatgtcgatttcttctgctacgcctccctagaacaagcccgtgtcattgcgcccggccgagtgcaagcacctcaggccaaccaagtgcccgtcctctccggcttcccggtgtccggatgctgctacctcgaccggcccgaccctgccggatatttcatcttcccagatctttcggtccgccacgagggccgttaccgtcttgtgttcagcctctacgaattagtgaaggacgagaaggacctggatcccatcggcgaagcttccaaatccggggaggaatgccagctcaacgaagcccgccatcgcatggatcttagctccgccgaattcaccgtgtatagtgcgaagaaattcccgggcctcacagaaagcacacatctcagccgaactgtcgctgaacagggctgccgagtgcgtatccgacgtgacattcgcatgaggcgacgagacccgaatcccaaggcttcagcgccggaagaatacaacaatggcgaagacaagtaccaaggtaccggaacgcatacccctgagcatatgcgtgctcgctcgtcaagcaactcgagcatgaacagggcgccatattcggccgtcgagaggcggccgtcgatgatgggagagtatgagaatggtgcaccatcaccgtcaccatatgggcctaagtcgactgcgagtaatatactgaatttcagtgggcaaagtcacaaaggtttctcgcaaccatcttacgctcctgctcctagcataaatccgcagtcgacaccagtttcgcctgcgcagacgaatttcccctacgccgcaggcactgcagtaccaccatcacccagctatacaaacccggccttttcaccgttccatcagagcgacagcgagagatatccatcatactcgcaaactcccatcgccgctcggccctctagatctgatgatttaagatcttctatcagctccgctgtatctacggacggaagacaactgccggtcatcttgcctcatgtcggagcggatgtttcgtccaaataccacaataagcttccaaccatcgctccagctcccccatctgggtactggcctgaccggtccgcggcgcccatgaagcgttcagcagattcatccttcccgtcacatgaccaccatcgcaacatcgtaggcgatagaatggagagccatcggattactatcccgtctttcagtgacaattcgtatcgcaaggctgatggcagctatggttcggttgacttcccttgcggatattaataatggtagtgtgtgttcgagacggcgtatcgaagctatgggagccggtcttaaagagcggccatagtggcttgatacccatttttggaaaattcatgttgtatatatcttacgatgcgtcccgccgtcaccggggttttctttgtttgcgacttttcattatggagctctttcaagagagtaagcgatgggtttactgcgatatggctgtaggatacccttaagcaaagatggtctattcgactcggaagggcgtctggagttagtatgccatctttcaatggccgcacacagtacgccacatggcgtcaatatcgacgttgcattacttcggacactattcatctctttcgaatcttcgcctcttgtattgcagatgagctccacgggccttcttggcgtcttattggtggtttagttgggggtatgagatagtacacagatctcatgcgaacacggtttggtatgtatagatgataaatgaagagacaagactgccacacacttattgccatgtcttactgtgtccacatcgtattattttagcgcaatttgttaatcgttccacgttgaacgggaa

SEQ ID NO: 9983 - DNA, 1869 bp, Muscodor strobelii
  misc_feature: SGI cDNA ID NO. 563148
  misc_feature: Encodes the peptide sequence at SEQ ID NO 9984
atgtcgttcgaagcgaggcggccactcactcgaagtggcagcggttccagaccgccgacatcccggtttcaagagggatctatgaacgacaggacgagcaacgcgccgcctgcccaattcctcggtcccgacgagctcaaggagcatgagagccagttctatggagatcagtccgagtcggaacggcaacgccacgacagaccatactcgactactgctcagatggagactgtcgcagtcccacgcgcatcacgttcttccgttgataggccgcatatcgcccacaagaagtcttctggcttcttcagtcgcgtccgcgatgcattgtttagtagaggcaccgcgcagcaagggcaaccttcggcacaggcacaagcacaagcacatgcgcaggcacataaacaacaagaagtacgtaggaagcatagcagccttcaagaaccgatacagcccccgcgacccggctacctgcactcagcacgctcgcaatctgagatcaacatccctcagataataccacagatggcttcctccggcgaccgcccgtccagggacgacgtgatggcttcgtataaagaactcatggcaacgggcttcttccagtcccacgccatacaatccacacgacatgctggcccagcaggcgcaagacaagcgcaggcacctgcaatgccgactatcgccggcacgcccaatccccctaaacgcgtatcatccatgaacgcgcccatagcatacgaccgatactcacaacccatgccatcccctcaacccaagcagcctcgtggccgcagcagcagggacttcaaacgccctgcaccacctcctctcgcagcagcgccttctgaacccgagctgcgggaaaagggatctcgatatgctctgcgaggccgtaagcgcacccgcgacgtagacgatacgcctctcgcgtccccagcagaaccccgtaccagcacatcttccaatcccacttccacaggctacttcgcgcaaccacttaagagagttgccaagaagctgcggaaaatgccctcttcaaccacaccctccgtcgaaaacacaccttcatcctctctggaagcccctccagtggcaccagacggcatagtccgcctcgtgccctctctctcagtcggtgggaccctgtaccaagactctcgcgcagtccgtctgcgctccccatcgcccgccacagcggaacttctcacaagcgatcaagacgcgcaccgcaaaccccgccggacattctccggctcgctgcgcggtcgtggtcgaggtcgtagtccagcaaaccgtctagctaagcgcgcaagcgctacacaggtcaacacctcccccaacccccattcctcccaaacttccccccaaaaacacaacgtcctgggacaatggcagcgcgtctccctagaagacagccttcctcccactcacaacctaccacctacccagcgctcatccgttgattctcagtctccacgccgttcaaatgaaagtccgcgccgctctagggaaatcagggaagcgcgcgaagtaacaatccaaaagacactacccccagtccttaaagtggtgccggatatgaatagaggtataccatccgtcccgctgattccggagcgctggcatggcacggggaaggcgtatcatcttcgggatcgcggacagagcgttgagattgctaggtctaggggtgttagaggtggtgaagtgagaaagggtttggggaatggggttaattcttttagagatgggaatgtgaatgtgaatgtagctggtgggaagggacagagggttgggaaggagaatatggatgtggatggtgatggtgatgtcgagatggagagttggaggattggcagtgctgtttga

SEQ ID NO: 9984 - protein, 622 aa, Muscodor strobelii
  misc_feature: SGI Peptide ID NO. 563148
  misc_feature (11)..(210): NCBI GI: 171689034 Blast Desc: protein product [Podospora anserina] gi|170944479|emb|CAP70590.1| protein product [Podospora anserina]
  misc_feature (21)..(209): NCBI GI: 46109118 Blast Desc: FG01441.1 [Gibberella zeae PH-1]
  misc_feature (181)..(223): NCBI GI: 39946690 Blast Desc: [Magnaporthe grisea 70-15] gi|145012408|gb|EDJ97064.1| [Magnaporthe grisea 70-15]
MSFEARRPLTRSGSGSRPPTSRFQEGSMNDRTSNAPPAQFLGPDELKEHESQFYGDQSESERQRHDRPYSTTAQMETVAVPRASRSSVDRPHIAHKKSSGFFSRVRDALFSRGTAQQGQPSAQAQAQAHAQAHKQQEVRRKHSSLQEPIQPPRPGYLHSARSQSEINIPQIIPQMASSGDRPSRDDVMASYKELMATGFFQSHAIQSTRHAGPAGARQAQAPAMPTIAGTPNPPKRVSSMNAPIAYDRYSQPMPSPQPKQPRGRSSRDFKRPAPPPLAAAPSEPELREKGSRYALRGRKRTRDVDDTPLASPAEPRTSTSSNPTSTGYFAQPLKRVAKKLRKMPSSTTPSVENTPSSSLEAPPVAPDGIVRLVPSLSVGGTLYQDSRAVRLRSPSPATAELLTSDQDAHRKPRRTFSGSLRGRGRGRSPANRLAKRASATQVNTSPNPHSSQTSPQKHNVLGQWQRVSLEDSLPPTHNLPPTQRSSVDSQSPRRSNESPRRSREIREAREVTIQKTLPPVLKVVPDMNRGIPSVPLIPERWHGTGKAYHLRDRGQSVEIARSRGVRGGEVRKGLGNGVNSFRDGNVNVNVAGGKGQRVGKENMDVDGDGDVEMESWRIGSAV

SEQ ID NO: 9985 - DNA, 1281 bp, Muscodor strobelii
  misc_feature: SGI EST ID NO. CUFF.23650.0
  misc_feature: Variant of the nucleotide sequence at SEQ ID NO 9983
gccacagcggaacttctcacaagcgatcaagacgcgcaccgcaaaccccgccggacattctccggctcgctgcgcggtcgtggtcgaggtcgtagtccagcaaaccgtctagctaagcgcgcaagcgctacacaggtcaacacctcccccaacccccattcctcccaaacttccccccaaaaacacaacgtcctgggacaatggcagcgcgtctccctagaagacagccttcctcccactcacaacctaccacctacccagcgctcatccgttgattctcagtctccacgccgttcaaatgaaagtccgcgccgctctagggaaatcagggaagcgcgcgaagtaacaatccaaaagacactacccccagtccttaaagtggtgccggatatgaatagaggtataccatccgtcccgctgattccggagcgctggcatggcacggggaaggcgtatcatcttcgggatcgcggacagagcgttgagattgctaggtctaggggtgttagaggtggtgaagtgagaaagggtttggggaatggggttaattcttttagagatgggaatgtgaatgtgaatgtagctggtgggaagggacagagggttgggaaggagaatatggatgtggatggtgatggtgatgtcgagatggagagttggaggattggcagtgctgtttgaggtgtattctttgcctgtaagttgggcgagcaatgttggacaaggggccgcttgagtgacgaaggataaggacgaagatgttttcgttgtttgttgcgcgttggttttgttgttgttgttgcgagcaacgtataccccccttgacgaaaaaaaccacgacatgaatgaacgaacgaacgaacgagctctttacgcagtttttgttacgctacgctcacgacacaggagtttacactgttttctcgtcattcttcggtctgatcttcgatcccccacctggtggttggtttcgattcggttcggtttgatctgtgttcgttggattcggttcgggctcggtctggataggaaggagttcaaaggctttgtttctatttcagtttcagggtttctattctaccgtacctcccccctacagcactattctccgcgagatgtgaggtatacggtacgcggagtctgacgaagttacttactttgtgatcatgatcacgatcacgatgatgacctggaaacagaaacgtgtcatgagactttatgatagtgtatataatatacatgctttgcatttcccgtcaaaaatttctaagtgcttttgag

SEQ ID NO: 9986 - DNA, 4317 bp, Muscodor strobelii
  misc_feature: SGI cDNA ID NO. 563149
  misc_feature: Reduced expression when VOC is produced
  misc_feature: Encodes the peptide sequence at SEQ ID NO 9987
atgcccacgtcaactacttttgaacaccgcgatgcgggcgatcaggacgcagacgtctctacatccgtgtacgactcgttcgacgaacatcacaactggctctcccagagcttggccttcgacgaccccgacaggctgtccacattgcctggcctgcctggctttctcgacgaaacactccccaaaactgtgcacccgcactcgcatgaaattccgccgtccacggtgcagccctccggccaccgagggtcgacgtcatcctccacatccttcagctccaactcactcggccttgccccgtcccccgtggacggcatgatggacgtaaatcactctcctgctgcttggtcgctaggctctgcggacgaaggctatcctgacgattttaccgccgacccactcgtcaccgacgacctaatgaacgagtttcttgttggctacgactcgcctagcccgccagacgccgtcatgaccgcgcccccgctgcccatgaacgggattgctgagaatcagtctaatggccctgctccgaaacggcgaaaagcccagcccaagaagaaatcttcacaattggatcaagcaaaaagaaaaccgcaatctcaggcgacgcgcgggaagaagacaagaccagtctcgcctgcttctgacccgaaccgaagcaacgggccatcaccacctctgccgtacggaagcacgccgcctgctagcgcacacttcaatactccatcgaacggagcagtcaacccagcatggcagcatacgccgccgggtctaatgaacggctccccattccaacaatcgagatcgaactcggccagcatgccaactcatgggctgccaatgagcaatacgcctccggctgctcctgctcccgctccgattcctgccccaatgcccgctgcaaaccctgctccgaatattggcgttcctagactggtcattcaccctttgccgcccaaatctcgtgtggaaacacaaattccattcaagatgaccatacacaaccttccaccaggcattaaaagagtacatatcccaactcattcgatcgccaagcctaagctgctacacaaacccaagccactgccatcgcccgacatgctagagctttcaacgttattagtctgtaccagcgcgatggctgatgatgcgaaacggagacgggccttcgagtgggctgcgcacaagccccttcttgctgatcccaacaaccccatcaacaaagatgccgaggagcacaagccgcagaatggcggcgaggtgcgcatctgtcaaggttgtatgaaccgggaacggaagcgcagcaataggaaaaagatcgtcaaaccggaggacgaagagctagcaaacctctacgagcacgaacgcgccatcgtgtttaatacacaggaggtgaaggactggcagagagtcacgcctgtgatggcagatcctacgggaggcggcttcggtcacgtcccgccagagggcacatatcaagtcgatgcaccaatgcgcatcacgtgctactgtcgccatcatagtgaaaagcagggttttaaatttatcgttacgttgaaaaaccacttgggcacagctgtggcccaatcgatgtcaggctcgatcattataactgatgaccataaaaaccctccaacatcgccatcgaacatggaaccacatcatcatcaacaacatccaaatttatcccaccctccagtttccaacggcacatcgagcatagcgcctcaacagccggtccctatcaatgtctctcgaccggtggcgccggctgtcacatatcagccgcaccctggagagacagcattaccgattcgtcacactcaatcgacttctgatcttcaggctatggggcaggctccctttgccttctcctcgcccccaaatcagatgaatccctcacaagtctcctcggcttgtacttctcgacaagcctcgccagctagtccctcagggcccggcaacagaaagaggaaagcgagcttaggtgcaaagatacccccaggtcttgctatgaccaagatcgaaactaacccgccagtcaacccaatgccgctcaatcctcagaatgagtctgcggttgtttcagcacatacttcgccttttatgcagactcatgcgtcattccctgccaatggcgaaatgatcagccctcaggcgcctcagccaatgttcgacggcatgagatcttcatttggaccgatatctgctaacacaacagccaatgcaatgaacggcggagccccattcattttcggcgggcacatgaacatggatctggccgaaaatcacatgtttccaggttcagtatcagcccagcctagtcgtgctccaagtccgacaccgttcgcgcagcgatctacagacatgctccctgtgcttacagctgggccacctaccattctgcgaatcattccagccgagggaccaaaagcagggggtgtcgagattactgttctcggccggaatttcaccaacgacgggctcgaggtctattttggaggatccaaagccactactacgacttactggggagagtcgtctctagtgtgcctgctaccgccttccccatgtgcaggtctggtacaagtgacaatacgtcatccaaccaaacggcactccatgccacccggcgctccatccaccttcaaatacacggatgatgatgagcaagagcttatccgtgccgcgctcgcggttctcgggagaggggctcacggcgatgtcgtagattttgccaaggatgttatgtacagagaggcattcggcaatggtccgaataaccaatctcacaatgggaacggccctatgaataacaacggcttcacgaacttcaaccgaggcactggtcgaagtgttgaatccagccttcttcgagtcctcgacctgattcatcttaatgatagcacgactgaagctgatttggactacgagtcaccaagtggacatacgatgctacatcgtgcatgctcccttggcttagtgcgactggctgcccgcctggtatctcggggtgccaatatcaacgctagagataagaatgggtttacgccattacacatggcagtaatgaatgatcgacttgatcttgtgggttggctcatccccaagggggctgatcgagacgctcggtcgatcttggggcttaagcccatccatgttgctcgctcgcgtgccatgagccgtgtacttcgcggttccgcgaacttcaccaggtcacgcagcgctggagcccttcacagcagagccaacagcactggctcgctgatatcacgctgggaacacacgctgactatgaactcaagtcgtcaagcatcctggcaagacgacagcgattcgggcgaccagcctgatgatgagggctcgaccgatgacgccgatagcacagaaactgatgccgactggctcgacatgcgacgaactagtatggtggaccatcgtgctatatcacggaggactagcatggcagaccttcgtcgccagtctgtagctgggactgcgcaaacgaatgtgacggaaggcaatcccccaattcccagtgatacaataacagcattcagagagcagtttgctgcacagctgcaacaacttcagcatgctgtggcaatgggcttccaaaaccccgtcccgcaattgcaacagttacaacatcttatgacgacgcatctgcagaatttccagccgttccagatgccaaacatgccacaaatgatgcctgattatccggcttatctcaatgctgcccccgtaatgcagcgtattagttccttcgtaccaaacattcgcgggcagcggccaggatctggagatgcaacaccaagtccgccggagaacaagtggggaggtctttcattctttggggcaaacgaatcgccgccggcttacgaggacgtcttcccacagaaagttgttgatgttaaacaggcatcagccgctcaagcggctgcagaatacgaagcggatgccaagtgtacagcgctttacgaccagccttcagccgaaggttcgacaatacgtgcgcagactgaggaaatgccgacttcgctccaaattggtcgcaagcatcatattaccaaggaacaacaagagaacctacagcgggcacatgctcaacgactgaaaactgtcagccgtgacaagatgctgtggtttgtctggatcccaatactcacactagttctcggcgcaatgctctggagtggtgcaccttctctcgcttccagcgcaacaggcgcagctaaagcatgccgcagtctactcaccaacccacaagaaattcgtgagaggttcaatcgctatgtacaggagttggcttga

SEQ ID NO: 9987 - protein, 1438 aa, Muscodor strobelii
  misc_feature: SGI Peptide ID NO. 563149
  misc_feature (1014)..(1046): Pfam Id: PF00023 Pfam Desc: Ankyrin repeat
  misc_feature (981)..(1013): Pfam Id: PF00023 Pfam Desc: Ankyrin repeat
  misc_feature (799)..(885): Pfam Id: PF01833 Pfam Desc: IPT/TIG domain
  misc_feature (318)..(1403): NCBI GI: 145604438 Blast Desc: MGG_14003 [Magnaporthe grisea 70-15] gi|145012437|gb|EDJ97093.1| MGG_14003 [Magnaporthe grisea 70-15]
  misc_feature (85)..(1405): NCBI GI: 256730613 Blast Desc: NECHADRAFT_89812 [Nectria haematococca mpVI 77-13-4]
  misc_feature (310)..(1410): NCBI GI: 154317992 Blast Desc: BC1G_02979 [Botryotinia fuckeliana B05.10] gi|150843637|gb|EDN18830.1| BC1G_02979 [Botryotinia fuckeliana B05.10]
  misc_feature (157)..(1409): NCBI GI: 46109120 Blast Desc: FG01442.1 [Gibberella zeae PH-1]
  misc_feature (311)..(1437): NCBI GI: 261358579 Blast Desc: SPT23 [Verticillium albo-atrum VaMs.102]
  misc_feature (302)..(1410): NCBI GI: 156050075 Blast Desc: SS1G_07623 [Sclerotinia sclerotiorum 1980] gi|154692025|gb|EDN91763.1| SS1G_07623 [Sclerotinia sclerotiorum 1980]
  misc_feature (277)..(1422): NCBI GI: 171689042 Blast Desc: protein product [Podospora anserina] gi|170944483|emb|CAP70594.1| protein product [Podospora anserina]
  misc_feature (306)..(1405): NCBI GI: 240278870 Blast Desc: ankyrin repeat protein [Ajellomyces capsulatus H143]
  misc_feature (169)..(1410): NCBI GI: 119184030 Blast Desc: CIMG_06873 [Coccidioides immitis RS]
  misc_feature (306)..(1427): NCBI GI: 225560124 Blast Desc: ankyrin repeat protein [Ajellomyces capsulatus G186AR]
  misc_feature: Useful for introducing or modulating the production of volatile compounds
MPTSTTFEHRDAGDQDADVSTSVYDSFDEHHNWLSQSLAFDDPDRLSTLPGLPGFLDETLPKTVHPHSHEIPPSTVQPSGHRGSTSSSTSFSSNSLGLAPSPVDGMMDVNHSPAAWSLGSADEGYPDDFTADPLVTDDLMNEFLVGYDSPSPPDAVMTAPPLPMNGIAENQSNGPAPKRRKAQPKKKSSQLDQAKRKPQSQATRGKKTRPVSPASDPNRSNGPSPPLPYGSTPPASAHFNTPSNGAVNPAWQHTPPGLMNGSPFQQSRSNSASMPTHGLPMSNTPPAAPAPAPIPAPMPAANPAPNIGVPRLVIHPLPPKSRVETQIPFKMTIHNLPPGIKRVHIPTHSIAKPKLLHKPKPLPSPDMLELSTLLVCTSAMADDAKRRRAFEWAAHKPLLADPNNPINKDAEEHKPQNGGEVRICQGCMNRERKRSNRKKIVKPEDEELANLYEHERAIVFNTQEVKDWQRVTPVMADPTGGGFGHVPPEGTYQVDAPMRITCYCRHHSEKQGFKFIVTLKNHLGTAVAQSMSGSIIITDDHKNPPTSPSNMEPHHHQQHPNLSHPPVSNGTSSIAPQQPVPINVSRPVAPAVTYQPHPGETALPIRHTQSTSDLQAMGQAPFAFSSPPNQMNPSQVSSACTSRQASPASPSGPGNRKRKASLGAKIPPGLAMTKIETNPPVNPMPLNPQNESAVVSAHTSPFMQTHASFPANGEMISPQAPQPMFDGMRSSFGPISANTTANAMNGGAPFIFGGHMNMDLAENHMFPGSVSAQPSRAPSPTPFAQRSTDMLPVLTAGPPTILRIIPAEGPKAGGVEITVLGRNFTNDGLEVYFGGSKATTTTYWGESSLVCLLPPSPCAGLVQVTIRHPTKRHSMPPGAPSTFKYTDDDEQELIRAALAVLGRGAHGDVVDFAKDVMYREAFGNGPNNQSHNGNGPMNNNGFTNFNRGTGRSVESSLLRVLDLIHLNDSTTEADLDYESPSGHTMLHRACSLGLVRLAARLVSRGANINARDKNGFTPLHMAVMNDRLDLVGWLIPKGADRDARSILGLKPIHVARSRAMSRVLRGSANFTRSRSAGALHSRANSTGSLISRWEHTLTMNSSRQASWQDDSDSGDQPDDEGSTDDADSTETDADWLDMRRTSMVDHRAISRRTSMADLRRQSVAGTAQTNVTEGNPPIPSDTITAFREQFAAQLQQLQHAVAMGFQNPVPQLQQLQHLMTTHLQNFQPFQMPNMPQMMPDYPAYLNAAPVMQRISSFVPNIRGQRPGSGDATPSPPENKWGGLSFFGANESPPAYEDVFPQKVVDVKQASAAQAAAEYEADAKCTALYDQPSAEGSTIRAQTEEMPTSLQIGRKHHITKEQQENLQRAHAQRLKTVSRDKMLWFVWIPILTLVLGAMLWSGAPSLASSATGAAKACRSLLTNPQEIRERFNRYVQELA

SEQ ID NO: 9988 - DNA, 10035 bp, Muscodor strobelii
  misc_feature: SGI EST ID NO. CUFF.23839.3
  misc_feature: Variant of the nucleotide sequence at SEQ ID NO 9986
ccagagtctgcctagacattggcgaggtgggtcaagaaaatagtgatatatcctggtacctaacacagcgaagttcagtacgagaatgtatcactattttcttggcccgcctccattgggcaggcacgaaaaattgctcgacgagcttcattctcaattcaccggcacaccggactccatcggcagggacactatgagtggggcggttgtagaacctgagatccagtctccagctttgatggtcgctagcgggagggtccgagtctcagcactttaacaaccgcccttatgcgcctctaatacacgacgtgcttatctcgaactctcaagtgcaactctcactggccgtcaggcgagcatcaagtcgtataccaatactacccaacctcccacatactctttcggcctatctgaagctctcgttaaagtgatcgacatattcttgagcgtcaaaccatcgagcgtcacggactgcacaccccacgttcacatctctgagtctcgaacatctatcaaagtggcaggtcattgtccgggcaccgactcctcaacttactttccaaatgattcaataacacttgcttcgttcccgccggcttactactacgtcccggcattaaggacgtcgatagacgactcgggagtaacttgacagctcttcacgatgccaactcttgacataacaaactttaatatcgccgtcagtgtgcttggtggatggatctcactttttggcttggtgtcatatttgctgaaggagaacttctacttatccgaggctcgtaagtcgccgtttgcgcaatatcagctctctacctcctggcaattctcattgtgcctgttcatgacatgctaatactccgattagtcatttctctcttggctggagtcacgttctcgcccagtgctcttaattgggtccggccactggagtatgctagaggtatccaggcaaatctagacgatgtaactctgtattttactcgcctcgttctgggcgttcagcttgtccttgcaggtgtccagctacctagtcggtatctgaagaaagaatggaagcctctcgcccttcttttgggacctattatgacggcgatgtggattgcgacaagccttcttgtttgggcactggttccacatcttcctttcctacatgcgcttgctattggcgcttgtgtcacgcctacagaccctgtgctctctaacgtcatcgtgaagggcaagttcgcggaccacaacgttcccaaggaccttcagaaaatcattatcgcggagtctggtgccaatgatggattgggttatccattcttgttcttagccttgtatttaatcaaatacgtgggtgatggaggcaaatctttctcaggcggtggtggccttgcaattggactgtggtttggagagacatggggttatacaatcatactgagcaccttatacggcgcgttcgtaggatgggttgcaaaggaactacttcactattgtgaggaacgcaaatttgtcgatagagaaagctttcttgtttttgcactgtcgctcgcattgttcataacgggtacgtgtggtcttatcggtagtgacgatattcttgcctgtttcattgcgggaaatgttttcacgtgggatgattggtttcgactagagacactcgatgagtatgaccgactttcaatctactcacaaagcttagaatctgctaacagccttgaacgatagctcgcttcaacccacaatcgatatgcttctaaacgtggtgatatttatgtggtatggtgccgttataccatggcatagtttcgtagcaaattcggtcatcccaatctatcgcctgataccgctggctatcttgattctgctgcttagacgtccgccattccttattggggttcacaagaagattccccagattgaaaacattcgccatgcaatcttcatgggtttcttcgggccaattggctgttctgccgtcttctatctctatatcagtgtcgacttcattaactcgttgagtcctggtacggaagaacctagatctgatgtagctaatatggctgaggctgtcactgtgatcgtatggttcatggtagttgtcagtgttgttgtgcatggtctcagtattcctttgggcaaatttgggttttacttgcctcggactctgtcacggactctcaccacagctagcagtagtgagcgtgctccctttcaattcagcaatctcgtgcgcctacctagaagcgtctcacgcaccgagacagaagtgaatacacccgatgaacgtccttcgatttcaaggggaccaggaccagtctataagattgggggatcgatcattcctccccaggagcccacaccgattatgcagcacgaagactccacaaccctagatggagaggttccatccgaggcagccaacccatactcccgtccgcagatttccggtccccctaatcgaaccatccggtttcccgacgaacgagcatctgaaccaaatctagagccggaggcggaggcgaacccgactgccaatcagcaaagctctcatcggcaatcggcgcaagagccactcccggtttagtttcaacacatccgcggatagtgaaaacatcgacaagtagtccgatctcgacggtgggccagcttaggactcaaggctatttacctacccgagagcgcaaaaggacagagagaagcttctgcattgtatctattaatatttgggttatgttcccggttccgtacatttctggcaacatcaataggcagcaaggcagcagttttctttttgaattcgaatgaagacacatatacattcggcgccccgacagagccgccttgtatcgtgacacacgtaagcctgttagggaccggcccgcatccggtttaggaccccaagaacctcaacgtcacggcatccgcgggttcttgcgcattcggaaaggtatagagaaatgttggggattttcggggccccgagtttgttgaggattatgtcaactatgtcatctgcctaaactcgtgcgacgtaatcctgcttctggaaatgaaaagaacgtcaatgatccttcactcgatctacaagagtgtttttattgcatgatcagttcttagagaaaattaggtcactaaaattcgcgtcgggttatggtttgtgttcaggtagaagcttgatgatggcggcgcaaaaatacgcgcagctatatgcactctcgaaaccattaccttatgaaatcagtagcaagcccaggcgatatgatatcaagatagcgacggacagtccgtgaggtatggctgagaggggctgtgattgggccagcgctggatatagggccttggtctcagctcatgatcatgtaggtgaagctggattaatgcaggtgcatctgtttagcacgtggagtgatatgcaccgaatcgtgagtagataccatccaggttcacaactggaatgcgcaagtcatgtcaatgcatcgtattgttgtaataaacgcgtgaattgataaagcacgacatcgattgagaaaagattttccgtttaaatgcaaccttcatattatattgctcatacatagtcgtctcgtatcaacgcgatatcgcattctgagttcgaaggcccgaatgcgtgttgccgtagttcggcgtagtttatcaaggccgttcatgatccgtcagtgattagtatgagtgaagtaaataaccaattacaagaaattttatagagaactcatagttggcctcaattgaaagaaggtgtcgccagcgatcctgtcgtgagggtcgatggtgcctgtcgcctatcaagccggtttgaatgtactgtagtattgagtttttgcggattgatacctaaaggaccctaaggctgttagcgctgggtcgtgggtttatctggcgagctggcgagtccaggtcgatgggaaggatttagagagacagatttgaccccgtgggcgcccaatcatgtgggtgtaatactcggttcgaatctcgaagtggtctgccacaggcaggaaattgtctgcgaggtgcggtgcctttccatcagctcctgctcctgctctgttctactgctgtagaaacccacactccccgcccctgacagctctgcacatcctagcaaaagtgaaagtcgacaggtcctccccgaccgacaggccgccgttcgtgccgtccccatctctagagtgtggactggcgcacccacttgcccacacgccaatcccctgccgccgcttccaggccaccaagtctggacgccgacagtcgacagcacacctgccacctaccactggcttgcattgctttctttgctgaccaggacacgacacacgacctgctccctcagctatactcttaccacacacacattctatgcttcatatcgcacacaacacaaggccagaactcataattcccgacggagaaatatcttagagatttctgtcacattaatcctacccgactctctggcacggcgtgtctgtgtgtctcgagtattccatatcggccagtgacccctactctactgcaggagcgggtccaatcgacagggtaatatcaacgcccgcctcacaggtcaccaccagtattgacctccaattttcaccgacatctccagcctggccgtctcccgctctcagtgcctaccacaccaccaccgcagcccaatttgccgtcttgtcgctcacgacacccacgcccacgcaccttcggctcgacaccaattgcgcccaccgtcgctcccgattaacgtctggggaaccaagcaccacccatctcatttcgacaattggacattgcgatctgccgctgccaacgacgagaaccatgttgtgataaattgcgaaaggcacacgagtcacgaactgtcactcccaagagccctccgtatccatactccgttgtacaaccatctgcacaaccgcatcgttagataccctccagcagaactcactacagtactgcctaggctagtgttcggaacgctctttgccagtcgagctccgagagggtaggagagactttcgggtcgaggacacacgtgtgcgagcaatgcccacgtcaactacttttgaacaccgcgatgcgggcgatcaggacgcagacgtctctacatccgtgtacgactcgttcgacgaacatcacaactggctctcccagagcttggccttcgacgaccccgacaggctgtccacattgcctggcctgcctggctttctcgacgaaacactccccaaaactgtgcacccgcactcgcatgaaattccgccgtccacggtgcagccctccggccaccgagggtcgacgtcatcctccacatccttcagctccaactcactcggccttgccccgtcccccgtggacggcatgatggacgtaaatcactctcctgctgcttggtcgctaggctctgcggacgaaggctatcctgacgattttaccgccgacccactcgtcaccgacgacctaatgaacgagtttcttgttggctacgactcgcctagcccgccagacgccgtcatgaccgcgcccccgctgcccatgaacgggattgctgagaatcagtctaatggccctgctccgaaacggcgaaaagcccagcccaagaagaaatcttcacaattggatcaagcaaaaagaaaaccgcaatctcaggcgacgcgcgggaagaagacaagaccagtctcgcctgcttctgacccgaaccgaagcaacgggccatcaccacctctgccgtacggaagcacgccgcctgctagcgcacacttcaatactccatcgaacggagcagtcaacccagcatggcagcatacgccgccgggtctaatgaacggctccccattccaacaatcgagatcgaactcggccagcatgccaactcatgggctgccaatgagcaatacgcctccggctgctcctgctcccgctccgattcctgccccaatgcccgctgcaaaccctgctccgaatattggcgttcctagactggtcattcaccctttgccgcccaaatctcgtgtggaaacacaaattccattcaagatgaccatacacaaccttccaccaggcattaaaagagtacatatcccaactcattcgatcgccaagcctaagctgctacacaaacccaagccactgccatcgcccgacatgctagagctttcaacgttattagtctgtaccagcgcgatggctgatgatgcgaaacggagacgggccttcgagtgggctgcgcacaagccccttcttgctgatcccaacaaccccatcaacaaagatgccgaggagcacaagccgcagaatggcggcgaggtgcgcatctgtcaaggttgtatgaaccgggaacggaagcgcagcaataggaaaaagatcgtcaaaccggaggacgaagagctagcaaacctctacgagcacgaacgcgccatcgtgtttaatacacaggaggtgaaggactggcagagagtcacgcctgtgatggcagatcctacgggaggcggcttcggtcacgtcccgccagagggcacatatcaagtcgatgcaccaatgcgcatcacgtgctactgtcgccatcatagtgaaaagcagggttttaaatttatcgttacgttgaaaaaccacttgggcacagctgtggcccaatcgatgtcaggctcgatcattataactgatgaccataaaaaccctccaacatcgccatcgaacatggaaccacatcatcatcaacaacatccaaatttatcccaccctccagtttccaacggcacatcgagcatagcgcctcaacagccggtccctatcaatgtctctcgaccggtggcgccggctgtcacatatcagccgcaccctggagagacagcattaccgattcgtcacactcaatcgacttctgatcttcaggctatggggcaggctccctttgccttctcctcgcccccaaatcagatgaatccctcacaagtctcctcggcttgtacttctcgacaagcctcgccagctagtccctcagggcccggcaacagaaagaggaaagcgagcttaggtgcaaagatacccccaggtcttgctatgaccaagatcgaaactaacccgccagtcaacccaatgccgctcaatcctcagaatgagtctgcggttgtttcagcacatacttcgccttttatgcagactcatgcgtcattccctgccaatggcgaaatgatcagccctcaggcgcctcagccaatgttcgacggcatgagatcttcatttggaccgatatctgctaacacaacagccaatgcaatgaacggcggagccccattcattttcggcgggcacatgaacatggatctggccgaaaatcacatgtttccaggttcagtatcagcccagcctagtcgtgctccaagtccgacaccgttcgcgcagcgatctacagacatgctccctgtgcttacagctgggccacctaccattctgcgaatcattccagccgagggaccaaaagcagggggtgtcgagattactgttctcggccggaatttcaccaacgacgggctcgaggtctattttggaggatccaaagccactactacgacttactggggagagtcgtctctagtgtgcctgctaccgccttccccatgtgcaggtctggtacaagtgacaatacgtcatccaaccaaacggcactccatgccacccggcgctccatccaccttcaaatacacggatgatgatgagcaagagcttatccgtgccgcgctcgcggttctcgggagaggggctcacggcgatgtcgtagattttgccaaggatgttatgtacagagaggcattcggcaatggtccgaataaccaatctcacaatgggaacggccctatgaataacaacggcttcacgaacttcaaccgaggcactggtcgaagtgttgaatccagccttcttcgagtcctcgacctgattcatcttaatgatagcacgactgaagctgatttggactacgagtcaccaagtggacatacgatgctacatcgtgcatgctcccttggcttagtgcgactggctgcccgcctggtatctcggggtgccaatatcaacgctagagataagaatgggtttacgccattacacatggcagtaatgaatgatcgacttgatcttgtgggttggctcatccccaagggggctgatcgagacgctcggtcgatcttggggcttaagcccatccatgttgctcgctcgcgtgccatgagccgtgtacttcgcggttccgcgaacttcaccaggtcacgcagcgctggagcccttcacagcagagccaacagcactggctcgctgatatcacgctgggaacacacgctgactatgaactcaagtcgtcaagcatcctggcaagacgacagcgattcgggcgaccagcctgatgatgagggctcgaccgatgacgccgatagcacagaaactgatgccgactggctcgacatgcgacgaactagtatggtggaccatcgtgctatatcacggaggactagcatggcagaccttcgtcgccagtctgtagctgggactgcgcaaacgaatgtgacggaaggcaatcccccaattcccagtgatacaataacagcattcagagagcagtttgctgcacagctgcaacaacttcagcatgctgtggcaatgggcttccaaaaccccgtcccgcaattgcaacagttacaacatcttatgacgacgcatctgcagaatttccagccgttccagatgccaaacatgccacaaatgatgcctgattatccggcttatctcaatgctgcccccgtaatgcagcgtattagttccttcgtaccaaacattcgcgggcagcggccaggatctggagatgcaacaccaagtccgccggagaacaagtggggaggtctttcattctttggggcaaacgaatcgccgccggcttacgaggacgtcttcccacagaaagttgttgatgttaaacaggcatcagccgctcaagcggctgcagaatacgaagcggatgccaagtgtacagcgctttacgaccagccttcagccgaaggttcgacaatacgtgcgcagactgaggaaatgccgacttcgctccaaattggtcgcaagcatcatattaccaaggaacaacaagagaacctacagcgggcacatgctcaacgactgaaaactgtcagccgtgacaagatgctgtggtttgtctggatcccaatactcacactagttctcggcgcaatgctctggagtggtgcaccttctctcgcttccagcgcaacaggcgcagctaaagcatgccgcagtctactcaccaacccacaagaaattcgtgagaggttcaatcgctatgtacaggagttggcttgagcagccctgttctcctgctgcgtttccctgtctcaccgcgtcaagagtcttagagcagtctttgactgttggcgccaatacaatatcttattgaatattatcgcattatttaacgatttctttgtttgtatagggatttttggatttcctaaggcaatactgcaataggaatggaatatcgggtactcggcgttcgaacgggttggcgcacaggagctggaatcagttttgatacatgttatatatgtgggtgggcgctctgggacacaaacgtccgttataggcgaggagttctcagcactcgctcgcgagactaaaggaaagttgtgcgcttgggttgggtggcagagcagcatcactttcgtccactttattagcgtcacatccaggacgcgcccaaacatgttttacggcggccgatttgaccaggtcttggaaacaccaacattctactacacaaaagaacgtcaacgccggcttcgactttttaccagtggcccatgaaaaaatattacgtttagaaaagcgaacattgggaggaagggggaaatcgtcacaacagaaatatttcgtagtgttgatagaacagacgagatgagagggctcactgcctacctagccgattgtggaggtttgggcttatcaatagacaagactttttgatctaac

SEQ ID NO: 9989 - DNA, 1764 bp, Muscodor strobelii
  misc_feature: SGI cDNA ID NO. 563150
  misc_feature: Encodes the peptide sequence at SEQ ID NO 9990
atgccaactcttgacataacaaactttaatatcgccgtcagtgtgcttggtggatggatctcactttttggcttggtgtcatatttgctgaaggagaacttctacttatccgaggctctcatttctctcttggctggagtcacgttctcgcccagtgctcttaattgggtccggccactggagtatgctagaggtatccaggcaaatctagacgatgtaactctgtattttactcgcctcgttctgggcgttcagcttgtccttgcaggtgtccagctacctagtcggtatctgaagaaagaatggaagcctctcgcccttcttttgggacctattatgacggcgatgtggattgcgacaagccttcttgtttgggcactggttccacatcttcctttcctacatgcgcttgctattggcgcttgtgtcacgcctacagaccctgtgctctctaacgtcatcgtgaagggcaagttcgcggaccacaacgttcccaaggaccttcagaaaatcattatcgcggagtctggtgccaatgatggattgggttatccattcttgttcttagccttgtatttaatcaaatacgtgggtgatggaggcaaatctttctcaggcggtggtggccttgcaattggactgtggtttggagagacatggggttatacaatcatactgagcaccttatacggcgcgttcgtaggatgggttgcaaaggaactacttcactattgtgaggaacgcaaatttgtcgatagagaaagctttcttgtttttgcactgtcgctcgcattgttcataacgggtacgtgtggtcttatcggtagtgacgatattcttgcctgtttcattgcgggaaatgttttcacgtgggatgattggtttcgactagagacactcgatgactcgcttcaacccacaatcgatatgcttctaaacgtggtgatatttatgtggtatggtgccgttataccatggcatagtttcgtagcaaattcggtcatcccaatctatcgcctgataccgctggctatcttgattctgctgcttagacgtccgccattccttattggggttcacaagaagattccccagattgaaaacattcgccatgcaatcttcatgggtttcttcgggccaattggctgttctgccgtcttctatctctatatcagtgtcgacttcattaactcgttgagtcctggtacggaagaacctagatctgatgtagctaatatggctgaggctgtcactgtgatcgtatggttcatggtagttgtcagtgttgttgtgcatggtctcagtattcctttgggcaaatttgggttttacttgcctcggactctgtcacggactctcaccacagctagcagtagtgagcgtgctccctttcaattcagcaatctcgtgcgcctacctagaagcgtctcacgcaccgagacagaagtgaatacacccgatgaacgtccttcgatttcaaggggaccaggaccagtctataagattgggggatcgatcattcctccccaggagcccacaccgattatgcagcacgaagactccacaaccctagatggagaggttccatccgaggcagccaacccatactcccgtccgcagatttccggtccccctaatcgaaccatccggtttcccgacgaacgagcatctgaaccaaatctagagccggaggcggaggcgaacccgactgccaatcagcaaagctctcatcggcaatcggcgcaagagccactcccggtttag

SEQ ID NO: 9990 - protein, 587 aa, Muscodor strobelii
  misc_feature: SGI Peptide ID NO. 563150
  misc_feature (14)..(442): Pfam Id: PF00999 Pfam Desc: Sodium/hydrogen exchanger family
  misc_feature (14)..(382): Pfam Id: PF00999 Pfam Desc: Sodium/hydrogen exchanger family
  misc_feature (1)..(555): NCBI GI: 169597367 Blast Desc: SNOG_01469 [Phaeosphaeria nodorum SN15] gi|111069998|gb|EAT91118.1| SNOG_01469 [Phaeosphaeria nodorum SN15]
  misc_feature (1)..(556): NCBI GI: 154317976 Blast Desc: BC1G_02971 [Botryotinia fuckeliana B05.10] gi|150843629|gb|EDN18822.1| BC1G_02971 [Botryotinia fuckeliana B05.10]
  misc_feature (1)..(557): NCBI GI: 189195234 Blast Desc: Na(+)/H(+) antiporter 2 [Pyrenophora tritici-repentis Pt-1C-BFP] gi|187979834|gb|EDU46460.1| Na(+)/H(+) antiporter 2 [Pyrenophora tritici-repentis Pt-1C-BFP]
  misc_feature (1)..(534): NCBI GI: 70991230 Blast Desc: Na/H antiporter [Aspergillus fumigatus Af293] gi|66848096|gb|EAL88426.1| Na/H antiporter, [Aspergillus fumigatus Af293] gi|159130937|gb|EDP56050.1| Na/H antiporter,
  misc_feature (1)..(568): NCBI GI: 85077659 Blast Desc: NCU01724 [Neurospora crassa OR74A] gi|8218249|emb|CAB92650.1| related to Na+/H+-exchanging protein [Neurospora crassa] gi|28917080|gb|EAA26802.1| NCU01724 crassa
  misc_feature (1)..(517): NCBI GI: 115388641 Blast Desc: conserved [Aspergillus terreus NIH2624] gi|114195910|gb|EAU37610.1| conserved [Aspergillus terreus NIH2624]
  misc_feature (1)..(534): NCBI GI: 119496355 Blast Desc: Na/H antiporter, [Neosartorya fischeri NRRL 181] gi|119413113|gb|EAW23054.1| Na/H antiporter, [Neosartorya fischeri NRRL 181]
  misc_feature (1)..(513): NCBI GI: 255948660 Blast Desc: Pc22g11500 [Penicillium chrysogenum Wisconsin 54-1255] gi|211592114|emb|CAP98438.1| Pc22g11500 [Penicillium chrysogenum Wisconsin 54-1255]
  misc_feature (4)..(556): NCBI GI: 256728219 Blast Desc: NECHADRAFT_53857 [Nectria haematococca mpVI 77-13-4]
  misc_feature (1)..(527): NCBI GI: 238489997 Blast Desc: Na/H antiporter, [Aspergillus flavus NRRL3357] gi|220698624|gb|EED54964.1| Na/H antiporter, [Aspergillus flavus NRRL3357]
MPTLDITNFNIAVSVLGGWISLFGLVSYLLKENFYLSEALISLLAGVTFSPSALNWVRPLEYARGIQANLDDVTLYFTRLVLGVQLVLAGVQLPSRYLKKEWKPLALLLGPIMTAMWIATSLLVWALVPHLPFLHALAIGACVTPTDPVLSNVIVKGKFADHNVPKDLQKIIIAESGANDGLGYPFLFLALYLIKYVGDGGKSFSGGGGLAIGLWFGETWGYTIILSTLYGAFVGWVAKELLHYCEERKFVDRESFLVFALSLALFITGTCGLIGSDDILACFIAGNVFTWDDWFRLETLDDSLQPTIDMLLNVVIFMWYGAVIPWHSFVANSVIPIYRLIPLAILILLLRRPPFLIGVHKKIPQIENIRHAIFMGFFGPIGCSAVFYLYISVDFINSLSPGTEEPRSDVANMAEAVTVIVWFMVVVSVVVHGLSIPLGKFGFYLPRTLSRTLTTASSSERAPFQFSNLVRLPRSVSRTETEVNTPDERPSISRGPGPVYKIGGSIIPPQEPTPIMQHEDSTTLDGEVPSEAANPYSRPQISGPPNRTIRFPDERASEPNLEPEAEANPTANQQSSHRQSAQEPLPV

SEQ ID NO: 9991 - DNA, 10035 bp, Muscodor strobelii; identical to SEQ ID NO: 9988
  misc_feature: SGI EST ID NO. CUFF.23839.3
  misc_feature: Variant of the nucleotide sequence at SEQ ID NO 9989

SEQ ID NO: 9992 - DNA, 1038 bp, Muscodor strobelii
  misc_feature: SGI cDNA ID NO. 563151
  misc_feature: Encodes the peptide sequence at SEQ ID NO 9993
atgccggcgactacaaaaaccaagaatagcaagcctgccacggctaccagcagcgaaaagcccagcactaccccaaccgcagctaccgccaagccgagcaagaagcgaaagatggaccccaacaccaagaaatactacgctgtgcgagctggtaaggtgccaggtgtatacgaagactggaatgagtgtcaagagcagatctccggctttcgcggcgcatctttcaaggctttcacgagtaaggacgacgccaaagcattcgtggctggcaagaagacatcggtcacagctgagggcgaggcaaggttctacggtattgctgtcggcagacaacccggagtctacaccgactgggacgaggcatcgcaggctatcaaaggatggaagggaccaaagtacaagaaattcagcacacgcgaagaagctatcgagtttatccgcgccaatggcaacgaagaggcacagcaatggctcaaggacgagggtgaagttgctgtagagccgcccaagaaaaagaaaaagacatcagggaaaacggagtcagaagtcgaccttcaggcttttgcaaaagaacctgacgttgagcaagttttcacagatggcgcctgtacgcgcaatggccagaaaggtgcatgcgcaggtgttggtgtatactggggagcgaacgacaaacgaaatgtctcggagcctctcaagggcgatatacagaccaaccaacgggctgagctaaccgctattcttcgggctctcgaggctgccgaggacgacgtcaccatccgaattttctcagatagcagatatgccatcgactgtgtgaatagttggtacaagaattgggagaagaatggctggaaaaccgcgaacggaactgacgttacgaatccggatgtgatcaaggcagcccgggttaagatcgatgaccgcaaggcactgggcgccgatactcttttccagtgggttaagggacacgacaaaaatgttggcaacattgcggccgacgcacttgctgtgaagggcgcagccatgcaacggaaataa

SEQ ID NO: 9993 - protein, 345 aa, Muscodor strobelii
  misc_feature: SGI Peptide ID NO. 563151
  misc_feature (192)..(341): Pfam Id: PF00075 Pfam Desc: RNase H
  misc_feature (192)..(288): Pfam Id: PF00075 Pfam Desc: RNase H
  misc_feature (33)..(342): NCBI GI: 116200977 Blast Desc: CHGG_08373 [Chaetomium globosum CBS 148.51] gi|88176891|gb|EAQ84359.1| CHGG_08373 [Chaetomium globosum CBS 148.51]
  misc_feature (32)..(342): NCBI GI: 85093608 Blast Desc: NCU05750 [Neurospora crassa OR74A] gi|28921176|gb|EAA30489.1| [Neurospora crassa OR74A]
  misc_feature (34)..(342): NCBI GI: 261355451 Blast Desc: ribonuclease H [Verticillium albo-atrum VaMs.102]
  misc_feature (43)..(340): NCBI GI: 154317974 Blast Desc: BC1G_02970 [Botryotinia fuckeliana B05.10] gi|150843628|gb|EDN18821.1| BC1G_02970 [Botryotinia fuckeliana B05.10]
  misc_feature (33)..(344): NCBI GI: 145604442 Blast Desc: MGG_14004 [Magnaporthe grisea 70-15] gi|145012439|gb|EDJ97095.1| MGG_14004 [Magnaporthe grisea 70-15]
  misc_feature (4)..(340): NCBI GI: 70991232 Blast Desc: ribonuclease H [Aspergillus fumigatus Af293] gi|66848097|gb|EAL88427.1| ribonuclease H, [Aspergillus fumigatus Af293] gi|159130938|gb|EDP56051.1| ribonuclease H, [Aspergillus
  misc_feature (4)..(340): NCBI GI: 242807454 Blast Desc: ribonuclease H, [Talaromyces stipitatus ATCC 10500] gi|218715584|gb|EED15006.1| ribonuclease H, [Talaromyces stipitatus ATCC 10500]
  misc_feature (4)..(340): NCBI GI: 169764014 Blast Desc: [Aspergillus oryzae RIB40] gi|83770935|dbj|BAE61068.1| protein product [Aspergillus oryzae]
  misc_feature (4)..(340): NCBI GI: 119496353 Blast Desc: RNase H domain protein [Neosartorya fischeri NRRL 181] gi|119413112|gb|EAW23053.1| RNase H domain protein [Neosartorya fischeri NRRL 181]
  misc_feature (14)..(340): NCBI GI: 115388643 Blast Desc: conserved [Aspergillus terreus NIH2624] gi|114195911|gb|EAU37611.1| conserved [Aspergillus terreus NIH2624]
  misc_feature (103)..(341): SWISSPROT Homolog: EC 3.1.26.4 Ribonuclease H
MPATTKTKNSKPATATSSEKPSTTPTAATAKPSKKRKMDPNTKKYYAVRAGKVPGVYEDWNECQEQISGFRGASFKAFTSKDDAKAFVAGKKTSVTAEGEARFYGIAVGRQPGVYTDWDEASQAIKGWKGPKYKKFSTREEAIEFIRANGNEEAQQWLKDEGEVAVEPPKKKKKTSGKTESEVDLQAFAKEPDVEQVFTDGACTRNGQKGACAGVGVYWGANDKRNVSEPLKGDIQTNQRAELTAILRALEAAEDDVTIRIFSDSRYAIDCVNSWYKNWEKNGWKTANGTDVTNPDVIKAARVKIDDRKALGADTLFQWVKGHDKNVGNIAADALAVKGAAMQRK

SEQ ID NO: 9994 - DNA, 1774 bp, Muscodor strobelii
  misc_feature: SGI EST ID NO. CUFF.23979.0
  misc_feature: Variant of the nucleotide sequence at SEQ ID NO 9992
ctggaaggcaccggcgcctgagcagggcctatcttatcgcagctggggggttgtcggaacctgacctctgatgcaatgcgcagcaacagcaggtccgttccctgttctttgctcccatctcttgattgcattgggcatgcaccagtgaacatgaagcagggcatagctgcgagcggaaaccttctttgatcttgtcccttagtccttcacctagaggggtcttcccaaaatgacctttctttgactatcccaacccacccttcttcgcatcttcggtgtctctgtccactgccgcctctcctttgccaacaaagccccgtgtttcaaacaagtaccagtggtctcgatctgccgcagtgtgacatgggctggccaaccactattcaacgatataaatgacatattgacgaccttcacgatgccggcgactacaaaaaccaagaatagcaagcctgccacggctaccagcagcgaaaagcccagcactaccccaaccgcagctaccgccaagccgagcaagaagcgaaagatggaccccaacaccaagaaatactacgctgtgcgagctggtaaggtgccaggtgtatacgaagactggaatgagtgtcaagagcagatctccggctttcgcggcgcatctttcaaggctttcacgagtaaggacgacgccaaagcattcgtggctggcaagaagacatcggtcacagctgagggcgaggcaaggttctacggtattgctgtcggcagacaacccggagtctacaccgactgggacgaggcatcgcaggctatcaaaggatggaagggaccaaagtacaagaaattcagcacacgcgaagaagctatcgagtttatccgcgccaatggcaacgaagaggcacagcaatggctcaaggacgagggtgaagttgctgtagagccgcccaagaaaaagaaaaagacatcagggaaaacggagtcagaagtcgaccttcaggcttttgcaaaagaacctgacgttgagcaagttttcacagatggcgcctgtacgcgcaatggccagaaaggtgcatgcgcaggtgttggtgtatactggggagcgaacgacaaacggtaagcccaacaaccaagtctatctctgtcttgttgtccctccactgatacccaattatagaaatgtctcggagcctctcaagggcgatatacagaccaaccaacgggctgagctaaccgctattcttcgggctctcgaggctgccgaggacgacgtcaccatccgaattttctcagatagcagatatgccatcgactgtgtgaatagttggtacaagaattgggagaagaatggctggaaaaccgcgaacggaactgacgttacgaatccggatgtgatcaaggcagcccgggttaagatcgatgaccgcaaggcactgggcgccgatactcttttccagtgggttaagggacacgacaaaaatgttggcaacattgcggccgacgcacttgctgtgaagggcgcagccatgcaacggaaataacaggcgaggtttgtgatattctcggcgccagcttcattgcgcacggggttacgttttgtcaacgaacccctagatgttgataggttggctattcgtataggctggatatgtatagtgcgccatgttctatcttgccttgtcctggtggaagttttctaagaatatttgcatttacgtagcaacatctgaagaagactgtatgagcgaaagaccaattcttaaatctcccattccatgacacatattttaaaatgaac

SEQ ID NO: 9995 - DNA, 1557 bp, Muscodor strobelii
  misc_feature: SGI cDNA ID NO. 563152
  misc_feature: Encodes the peptide sequence at SEQ ID NO 9996
atgagcgattccatgaaggaagtcgtcgagacgctcgaccccgtctccagacggctcatccctgcaaatatcgaccctggaactttagtccctctgaagaccacccttgagctgcgagacaatctaaccctcggcctcgcctatgtcacgcgagctcccacccgtcttaccaatgacattgtgacgattgcccgagcgctggccagtgaagatgcggctaagaaccttcctcacttgcgtcggtgctctaaacccgtcgacctcccttcccatctcaagtcccagttcatgaatgaaggaaacgggagggcaatccacactggaaagtccaactggctgtacattctgatcggacccaaggatgagattgcttatgacgaacttgtgagaggtcttgcctctattgatggtattagagatgacatcttcattggcttgattcctgttcctctgctggcacctacatcccaagtccaggccaatctatggtctcagcagttttggcagaccgtctacagaaagaacaaccctctcggcccgcacccaagcagcatttgccgaaccacttctgttgtctcccgcgatgcctctgtttggatgacgctggcgcaccaaatagccaaagcatcacaacaagcgggaattggagagccaattggggctgttatcatcaagcgaacaagcgccggaaagcctgacgacgcgaagaacaccgatctcaagtctgataaccccaatggcgacgacatccaggctgcacccctcacgtctgagttggtagatgttcatgcagctatgaacagcaacaatcgtgacccaggcgataatcaacatgtccaacccccttcggaggcaggagacgttcgttcagttgctggcaacaatttccatgatatggctggtaacccgatcaactcggagaatcaagacgctggaggcaacttcatcaacgacgacactggaggcgaagatctttcgggatccgaatctgatagcaaggaaaccacgcagatcgtagctctggccgcagatgctcgctggtatcaacaagagaagactggccagacaggcaaccccatgggccatgctgccctccgagctatcagcatggtagcacagaagctagtccgtggtgaagataaacagcaggctgcgccgggcatcatggagttcgaagccttccaagatggaccggttcttgacgacgagcgtactgtctttgaagccgaccatccttgccctgatggatacctctgccacgaacttgagctctaccttacacatgagccttgcgtcatgtgtgccatggccatcttgcactcccgcatgggtcgtatcatcttccgtcaccgtatgccattgacaggcggcatgagctcagaagatcgcggctatgatgcatgcaacggatccagtacatgtgacgatggagcatgcggtggtggccgtgggctcggactacattggcgcaaagagctgaactggagcatgctaggctgggagtgggaaaccgacagcattgagcgctttgctgttgatccccatctccacgcgtga

SEQ ID NO: 9996 - protein, 518 aa, Muscodor strobelii
  misc_feature: SGI Peptide ID NO. 563152
  misc_feature (193)..(450): Pfam Id: PF00383 Pfam Desc: Cytidine and deoxycytidylate deaminase zinc-binding region
  misc_feature (424)..(450): Pfam Id: PF00383 Pfam Desc: Cytidine and deoxycytidylate deaminase zinc-binding region
  misc_feature (4)..(231): NCBI GI: 85077663 Blast Desc: NCU01725 [Neurospora crassa OR74A] gi|8218247|emb|CAB92648.1| conserved [Neurospora crassa] gi|28917081|gb|EAA26803.1| conserved [Neurospora crassa OR74A]
  misc_feature (4)..(238): NCBI GI: 116204963 Blast Desc: CHGG_10365 [Chaetomium globosum CBS 148.51] gi|88176493|gb|EAQ83961.1| CHGG_10365 [Chaetomium globosum CBS 148.51]
  misc_feature (19)..(231): NCBI GI: 256730611 Blast Desc: [Nectria haematococca mpVI 77-13-4]
  misc_feature (3)..(226): NCBI GI: 171689046 Blast Desc: protein product [Podospora anserina] gi|170944485|emb|CAP70596.1| protein product [Podospora anserina]
  misc_feature (338)..(518): NCBI GI: 85077663 Blast Desc: NCU01725 [Neurospora crassa OR74A] gi|8218247|emb|CAB92648.1| conserved [Neurospora crassa] gi|28917081|gb|EAA26803.1| conserved [Neurospora crassa OR74A]
  misc_feature (14)..(226): NCBI GI: 261355452 Blast Desc: conserved [Verticillium albo-atrum VaMs.102]
  misc_feature (336)..(518): NCBI GI: 116204963 Blast Desc: CHGG_10365 [Chaetomium globosum CBS 148.51] gi|88176493|gb|EAQ83961.1| CHGG_10365 [Chaetomium globosum CBS 148.51]
  misc_feature (23)..(226): NCBI GI: 46109124 Blast Desc: FG01444.1 [Gibberella zeae PH-1]
  misc_feature (5)..(231): NCBI GI: 39946638 Blast Desc: MGG_08581 [Magnaporthe grisea 70-15] gi|145012440|gb|EDJ97096.1| MGG_08581 [Magnaporthe grisea 70-15]
  misc_feature (333)..(518): NCBI GI: 171689046 Blast Desc: protein product [Podospora anserina] gi|170944485|emb|CAP70596.1| protein product [Podospora anserina]
MSDSMKEVVETLDPVSRRLIPANIDPGTLVPLKTTLELRDNLTLGLAYVTRAPTRLTNDIVTIARALASEDAAKNLPHLRRCSKPVDLPSHLKSQFMNEGNGRAIHTGKSNWLYILIGPKDEIAYDELVRGLASIDGIRDDIFIGLIPVPLLAPTSQVQANLWSQQFWQTVYRKNNPLGPHPSSICRTTSVVSRDASVWMTLAHQIAKASQQAGIGEPIGAVIIKRTSAGKPDDAKNTDLKSDNPNGDDIQAAPLTSELVDVHAAMNSNNRDPGDNQHVQPPSEAGDVRSVAGNNFHDMAGNPINSENQDAGGNFINDDTGGEDLSGSESDSKETTQIVALAADARWYQQEKTGQTGNPMGHAALRAISMVAQKLVRGEDKQQAAPGIMEFEAFQDGPVLDDERTVFEADHPCPDGYLCHELELYLTHEPCVMCAMAILHSRMGRIIFRHRMPLTGGMSSEDRGYDACNGSSTCDDGACGGGRGLGLHWRKELNWSMLGWEWETDSIERFAVDPHLHA

SEQ ID NO: 9997 - DNA, 2413 bp, Muscodor strobelii
  misc_feature: SGI EST ID NO. CUFF.23641.0
  misc_feature: Variant of the nucleotide sequence at SEQ ID NO 9995
tggaaatttcacattgtgtaaggagataacttcaggatcatacctttaatatcaggcttcttgtgccatctattattcgtctgaagttgcgcctattcagaaaagctggcctcgatccactgagtcacacgtagctgccggacacgattgctggcctctcgtctcattcatcaactgcaatggacatatccaatcctgtatcttagcaaccactggttgtcccttcattgaggcactggtagcgacgccattactgtggcagtccataacagctttgaactcagataattgtgatgctacctgcctttgtaactccctaaaggttaatcgtgcctgccctcacctttcctgcacaacacggcgaccatctcgactccggttccatgtatccgctatgagcgattccatgaaggaagtcgtcgagacgctcgaccccgtctccagacggctcatccctgcaaatatcgaccctggaactttagtccctctgaagaccacccttgagctgcgagacaatctaaccctcggcctcgcctatgtcacgcgagctcccacccgtcttaccaatgacattgtgacgattgcccgagcgctggccagtgaagatgcggctaagaaccttcctcacttgcgtcggtgctctaaacccgtcgacctcccttcccatctcaagtcccagttcatgaatgaaggaaacgggagggcaatccacactggaaagtccaactggctgtacattctgatcggacccaaggatgagattgcttatgacgaacttgtgagaggtcttgcctctattgatggtattagagatgacatcttcattggcttgattcctgttcctctgctggcacctacatcccaagtccaggccaatctatggtctcagcagttttggcagaccgtctacagaaagaacaaccctctcggcccgcacccaagcagcatttgccgaaccacttctgttgtctcccgcgatgcctctgtttggatgacgctggcgcaccaaatagccaaagcatcacaacaagcgggaattggagagccaattggggctgttatcatcaagcgaacaagcgccggaaagcctgacgacgcgaagaacaccgatctcaagtctgataaccccaatggcgacgacatccaggctgcacccctcacgtctgagttggtagatgttcatgcagctatgaacagcaacaatcgtgacccaggcgataatcaacatgtccaacccccttcggaggcaggagacgttcgttcagttgctggcaacaatttccatgatatggctggtaacccgatcaactcggagaatcaagacgctggaggcaacttcatcaacgacgacactggaggcgaagatctttcgggatccgaatctgatagcaaggaaaccacgcagatcgtagctctggccgcagatgctcgctggtatcaacaagagaagactggccagacaggcaaccccatgggccatgctgccctccgagctatcagcatggtagcacagaagctagtccgtggtgaagataaacagcaggctgcgccgggcatcatggagttcgaagccttccaagatggaccggttcttgacgacgagcgtactgtctttgaagccgaccatccttgccctgatggatacctctgccacgaacttgagctctaccttacacatgagccttgcgtcatgtgtgccatggccatcttgcactcccgcatgggtcgtatcatcttccgtcaccgtatgccattgacaggcggcatgagctcagaagatcgcggctatgatgcatgcaacggatccagtacatgtgacgatggagcatgcggtggtggccgtgggctcggactacattggcgcaaagagctgaactggagcatgctaggctgggagtgggaaaccgacagcattgagcgctttgctgttgatccccatctccacgcgtgattgatcattgtgtttttgattaagatatgatacagcacaaagtaaaggagaggatttgttttgcggcaagtacggaattaggtagtccgcttgtctggcatttgacattatggaatcatggcttagaaagccacgggagtggaagcagatcggcccctgttgttactatgcttcaatcatgtcttaccaatcaccgctgctcacatctttgtcccctcgttccatgattttctcagagcccaagattcattccagggaaaaatcactgggttggatggatacgaacatttccttccgagatccgacgggagatgagtctgaaggagggcttaccggggatctggggacgtgtacacctgtgttaagcattttgatagctcagaataaaaaccaaaaacatgttgcgacctaagatgaagatcatatcgtgtcttaccctcttgcaaatagagtcaaatttgg

SEQ ID NO: 9998 - DNA, 1866 bp, Muscodor strobelii
  misc_feature: SGI cDNA ID NO. 563153
  misc_feature: Encodes the peptide sequence at SEQ ID NO 9999
atgatgcctcctccggcgatagccctgcccagcgctgcgcctgttgcgcatccgtcctctctcgcaaacgcacttcgcgccgtcaaagacggctccaacaccctgcccatacgtaaacctccgtttgcggaagattcgccctacaccaaaagcatatcctcgaccgcgccggcgtcgcccagaattccccctatccgacagaactccggctcggcgacaccacgagtccgcccacatgccactaccctcagcattccgggcatgacccgatcgctcgtttcgcccgacggcagaatcgcagaccgagatgtcgccgccaagttagttatcatcatggtcggcctgcccgccaggggcaaatcgtacatcaccaagaagctacgaagatacctggcctggcagcaacacaataccaagatcttcaatgttggcaaccggagacgtgttactgctaaccctttctcccccaccaaacccactgctaagaacccaatggatgcgcccatacttgccgcgaaggtccttcttaacggcgcgccagctcccagcggcccgctcaagccccaaggctctttagcgaggaaagagagtcagtcatcccgtgttgaccacactgccgagttcttcgatccaaaaaattcggaagcttcgaaacttcgggaggagatggctatcgatactctagacgagttgttggactacttacttcgtggtggtggctcggtcggcattctcgatgccacaaacagcaccatcgaacgaagacaacatctcttcgagcatatcaaagcccgtgagccaaaattgggcattttgtttatcgagagtgtctgcaaaaacccagaactgctcgaagcaaacatgcgtctcaaattatcagggcccgactacaaggacaaagaccctgtgaaatccctggccgatttcagggaacgagtgaaagcttatgaaagtgcgtacgtacctctgggcgactatgaagaagatcacgggatgcagtacatcaagatgatcgatgtcgggaagaagctcacgcactttggtctcgagggtttccttagcagcggaatcgctcactatctctcgtcattcaacttatcaccaagacagatctggatcacccggcatggccaatccgaagataaccggcttggtaagattggaggcaacgccgagttgactgatcgcggtgatctctacagtgctgtcctctataaattcatgacccaaaagcgtaaagagtggctgatcgatcagaaaaacaagatcgcacagtcaactttcccgcctttgcctggcgacgaatcaccaccttatccggaactgtcagaggaactggatgagaagaacacgtgcgtgtggacatcgatgttgacacgcagtatccaaacggcccagcatttcgaggctgatgaagattacgacgtcaagaattgggaaatgctgaacgagctaaatgcgggcaagttcgagggcttgacatacgaagaaattgcccgtgaccacacggatgaatataccaaacgccagatggacaagcttcaatatgtttatccgggggtaggcggcgaaggctaccttcaggtcattagccgacttcgagatatggttcgggagatcgagcgaatcaaggaccacctggtcatcatcggtcatcggtctgtttgtcgcgtcttgatggcgtacttcctcgacctgacgcgggatgatattgcagacctcgacatgccactgggagtcatatatgccatcgagccgaagccctatggaacagagttccatgcatatagatataacgaagcggagggatggttcgacgaaatccccaactatcgacctcaaaagacggttgaccgaagcgcctga

SEQ ID NO: 9999 - protein, 621 aa, Muscodor strobelii
  misc_feature: SGI Peptide ID NO. 563153
  misc_feature (95)..(368): Pfam Id: PF01591 Pfam Desc: 6-phosphofructo-2-kinase
  misc_feature (370)..(559): Pfam Id: PF00300 Pfam Desc: Phosphoglycerate mutase family
  misc_feature (206)..(368): Pfam Id: PF01591 Pfam Desc: 6-phosphofructo-2-kinase
  misc_feature (95)..(148): Pfam Id: PF01591 Pfam Desc: 6-phosphofructo-2-kinase
  misc_feature (441)..(559): Pfam Id: PF00300 Pfam Desc: Phosphoglycerate mutase family
  misc_feature (370)..(397): Pfam Id: PF00300 Pfam Desc: Phosphoglycerate mutase family
  misc_feature (9)..(621): NCBI GI: 171689048 Blast Desc: protein product [Podospora anserina] gi|170944486|emb|CAP70597.1| protein product [Podospora anserina]
  misc_feature (18)..(621): NCBI GI: 116204961 Blast Desc: CHGG_10364 [Chaetomium globosum CBS 148.51] gi|88176492|gb|EAQ83960.1| CHGG_10364 [Chaetomium globosum CBS 148.51]
  misc_feature (1)..(620): NCBI GI: 16416104 Blast Desc: related to 6-phosphofructo-2-kinase [Neurospora crassa]
  misc_feature (1)..(621): NCBI GI: 261355453 Blast Desc: 6-phosphofructo-2-kinase [Verticillium albo-atrum VaMs.102]
  misc_feature (1)..(620): NCBI GI: 11359606 Blast Desc: 6-phosphofructo-2-kinase [Verticillium albo-atrum VaMs.102]
  misc_feature (42)..(620): NCBI GI: 256730837 Blast Desc: NECHADRAFT_29935 [Nectria haematococca mpVI 77-13-4]
  misc_feature (1)..(620): NCBI GI: 46109126 Blast Desc: FG01445.1 [Gibberella zeae PH-1]
  misc_feature (53)..(620): NCBI GI: 145604446 Blast Desc: MGG_08582 [Magnaporthe grisea 70-15] gi|145012442|gb|EDJ97098.1| MGG_08582 [Magnaporthe grisea 70-15]
  misc_feature (1)..(620): NCBI GI: 164428146 Blast Desc: NCU01728 [Neurospora crassa OR74A] gi|157072030|gb|EAA26806.2| NCU01728 [Neurospora crassa OR74A]
  misc_feature (54)..(619): NCBI GI: 154317972 Blast Desc: BC1G_02969 [Botryotinia fuckeliana B05.10] gi|150843627|gb|EDN18820.1| BC1G_02969 [Botryotinia fuckeliana B05.10]
  misc_feature (81)..(609): SWISSPROT Homolog: EC 2.7.1.105 6-phosphofructo-2-kinase
MMPPPAIALPSAAPVAHPSSLANALRAVKDGSNTLPIRKPPFAEDSPYTKSISSTAPASPRIPPIRQNSGSATPRVRPHATTLSIPGMTRSLVSPDGRIADRDVAAKLVIIMVGLPARGKSYITKKLRRYLAWQQHNTKIFNVGNRRRVTANPFSPTKPTAKNPMDAPILAAKVLLNGAPAPSGPLKPQGSLARKESQSSRVDHTAEFFDPKNSEASKLREEMAIDTLDELLDYLLRGGGSVGILDATNSTIERRQHLFEHIKAREPKLGILFIESVCKNPELLEANMRLKLSGPDYKDKDPVKSLADFRERVKAYESAYVPLGDYEEDHGMQYIKMIDVGKKLTHFGLEGFLSSGIAHYLSSFNLSPRQIWITRHGQSEDNRLGKIGGNAELTDRGDLYSAVLYKFMTQKRKEWLIDQKNKIAQSTFPPLPGDESPPYPELSEELDEKNTCVWTSMLTRSIQTAQHFEADEDYDVKNWEMLNELNAGKFEGLTYEEIARDHTDEYTKRQMDKLQYVYPGVGGEGYLQVISRLRDMVREIERIKDHLVIIGHRSVCRVLMAYFLDLTRDDIADLDMPLGVIYAIEPKPYGTEFHAYRYNEAEGWFDEIPNYRPQKTVDRSA

SEQ ID NO: 10000 - DNA, 4311 bp, Muscodor strobelii
  misc_feature: SGI EST ID NO. CUFF.23810.0
  misc_feature: Variant of the nucleotide sequence at SEQ ID NO 9998
atccagtcaggcaagactcgagcttttaaggcttcgtatataaacgacgggtctcgggaagaaaccgaggactaaagcccaagatatatctcggcactcaaccgacgtgatcttgaacacaagcctacctgatagacaacggattcggatgcgtccaaacggtcaactcttaccaagacagtaccttctaaccacactcgatatcaagtacaaagtgatgcgattgagcactgctgatagcaaggctctcttttaagcaccttgattcaacagatccattctattgatccagaaaggacggcagcgacggcaacagcggactggactactaatagttagctagcaactattgatccaatcatcatccacagagtctcaccttgaagaagtccccgagccccggacaagttaagcagccgatacaacattgtggtcaaattgggggtgtgccattgcggcggatacctggtcgccggtgtcgctaagcttcagcattccattaacaacacattcacccaatcccatccagtgcaaatagtcgaatctagaagctcataagctgtctcttccgcggccttattttgtacaaagtcgacattggtagcaccgagagtcgctggccgtttcgtgctattcatcttgttaagctcctgcggttccacgtgccatttcagggctctccttcttcgcccctctcccatctcgcgccgagccaacaatcgcaataatacggcgtctgcttctccatttggcggccctttttttttggagcgctacactgcacctagagcttagcgcttcaccactgcagccacaacagcagtggactgcagcgagggagtcgctgtgcgcaatatccgtcgcaaacatcggaaagtcgtgcgtcattgtgtcgaggaagcgaacccaaggacccaaaccttgcacgagttggcacaagttgttggaccctggcccacctcgcgcacctgggcgcacggctctgggacaagacatgactcctgagaggccgggaggtgctggtccactcgtacttgcgcaaccggcaccagctcacaaggccagcagtacctctgcacccaaatctcgccgcgcgagtacaacaacgagcttcctgggtgagtcgacggcttcaactttattttcctcccctgcgtggctgccatctgcccttttcccgtcgagctctcttttttttttcgcatggccgatgctttgcagcgattgatgtgcattggtcttcacacccacgttgccaagttgcatcatcccaactcgcctgcactcaccttcttcaagttctcgaccaagtccctgaacagccctgcctgcatcacatgtactctctgccccatactccaatccatacatcccactctgtattctgcccctcctattattagtgcggcagacgggaaatactggaacgggcttgtgattactactgaaagctgctttccacccgactccgactgacatagcctattatttctgtcgacaggttatcgtctcgcttgtggacatctccagtcacggcaatccaccctcgccatagtggcaatgactaatcggcgactcgtcgctcctcctcaacatgttgttccctcagccagctcgacgtctctccaaccgccgcctaggtcgcaggtagcagtgggagccgatcgcccagctacacgcccaaacgatggtactgcgtcacccccgactcccacatcttcgaacagtgacagcgacgtcatgatgcctcctccggcgatagccctgcccagcgctgcgcctgttgcgcatccgtcctctctcgcaaacgcacttcgcgccgtcaaagacggctccaacaccctgcccatacgtaaacctccgtttgcggaagattcgccctacaccaaaagcatatcctcgaccgcgccggcgtcgcccagaatgtttgtgccgccccaatgcaaacggcacgtctacgtctgacttggccaatggctaactgtgtttggcgcagtccccctatccgacagaactccggctcggcgacaccacgagtccgcccacatgccactaccctcagcattccgggcatgacccgatcgctcgtttcgcccgacggcagaatcgcagaccgagatgtcgccgccaagttagttatcatcatggtcggcctgcccgccaggggcaaatcgtacatcaccaagaagctacgaagatacctggcctggcagcaacacaataccaagatcttcaatgttggcaaccggagacgtgttactgctaaccctttctcccccaccaaacccactgctaagaacccaatggatgcgcccatacttgccgcgaaggtccttcttaacggcgcgccagctcccagcggcccgctcaagccccaaggctctttagcgaggaaagagagtcagtcatcccgtgttgaccacactgccgagttcttcgatccaaaaaattcggaagcttcgaaacttcgggaggagatggctatcgatactctagacgagttgttggactacttacttcgtggtggtggctcggtcggcattctcgatgccacaaacagcaccatcgaacgaagacaacatctcttcgagcatatcaaagcccgtgagccaaaattgggcattttgtttatcgagagtgtctgcaaaaacccagaactgctcgaagcaaacatgcgtctcaaattatcagggcccgactacaaggacaaagaccctgtgaaatccctggccgatttcagggaacgagtgaaagcttatgaaagtgcgtacgtacctctgggcgactatgaagaagatcacgggatgcagtacatcaagatgatcgatgtcgggaagaagctcacgcactttggtctcgagggtttccttagcagcggaatcgctcactatctctcgtcattcaacttatcaccaagacagatctggatcacccggcatggccaatccgaagataaccggcttggtaagattggaggcaacgccgagttgactgatcgcggtgatctctacagtgctgtcctctataaattcatgacccaaaagcgtaaagagtggctgatcgatcagaaaaacaagatcgcacagtcaactttcccgcctttgcctggcgacgaatcaccaccttatccggaactgtcagaggaactggatgagaagaacacgtgcgtgtggacatcgatgttgacacgcagtatccaaacggcccagcatttcgaggctgatgaagattacgacgtcaagaattgggaaatgctgaacgagctaaatgcgggcaagttcgagggcttgacatacgaagaaattgcccgtgaccacacggatgaatataccaaacgccagatggacaagcttcaatatgtttatccgggggtaggcggcgaaggctaccttcaggtcattagccgacttcgagatatggttcgggagatcgagcgaatcaaggaccacctggtcatcatcggtcatcggtctgtttgtcgcgtcttgatggcgtacttcctcgacctgacgcgggatgatattgcagacctcgacatgccactgggagtcatatatgccatcgagccgaagccctatggaacagagttccatgcatatagatataacgaagcggagggatggttcgacgaaatccccaactatcgacctcaaaagacggttgaccgaagcgcctgacaaaacatactgtgaggcatcgatgcagtgccaagaaaaaggcacaaaaactatctgtacattattacggcgtaatgtggcgtttgcggaccatgcaagaaaagagagataccacggaacaattggcggattagcacgaatagctttctgcggacaatgactttttgcaacagatcagattacatgtttcggcgttcagagaaggagtttcttagggtccccaggaaagggcagcgcacgacatgtccgcgcacggcgtaaggggctggcatcatcacgaatctagagcatgcctagctatatcatcatcgctgagaccagcgaggacgaacgaacgagtagacaggtggactggttcttggcttcatagaaggcgtggtgggatggacgtcctcaactctactcggtacaggcgctcggcgtgaggtgacatgtagctgtatatacatcctattccaagaatatggccttttgaggctctattgatatcactgctaataagctaatgagacgtattcgtaaaacaggattttacagatttgacttagatcgttgagtctagtgtctcattgttgcttgcagagccatttcactcactgcgatacgaacagagttcggatcaatatagttacac

SEQ ID NO: 10001 - DNA, 2565 bp, Muscodor strobelii
  misc_feature: SGI cDNA ID NO. 563154
  misc_feature: Reduced expression when VOC is produced
  misc_feature: Encodes the peptide sequence at SEQ ID NO 10002
atgaacggccacttcgctgctgtcggcgatgcgccgactgatgcccaatatgagcacggcgtccaagtcatcgacgaggacaaggagttcaacacccatctcaactcctatttgcatgcaaccaacgttgccgaggccggcttcaattaccacctgatatcggtcttcggttcccagtccaccggcaagtccacccttctcaatgccctcttcggcaccgagttcaacgtcatgtccgagaccgagcggcggcagaccaccaaggggatatggatgtccaagaacaaaactgccaccatgaccgacaacatcctcgtcatggatgtcgagggcaccgacggccgcgagcgcggcgaagatcaggatttcgagaggaagagtgcgctatttgccttggccaccagcgaagttctcattgtcaatatttgggagcatcaggtcggtctgtatcaaggtgccaatatggggctgttgaagactgtattcgaggtgaatctccagctatttttgaaagacaagcaatccacaccgaggtcgctgttattcttcgttattcgtgaccacatcgggcatacccctttatccaacttgcggaacaccttgattcaagatctttctaagatatggtcgtctatatcgaagccgcaaggcctggaaaagtcgcgcattgaagactacttcgacttcgccttctctgcactgccacacaaaattctacagcccgagaagttcgttgacgaggtcaagaatcttgggaaacgatttgttgccggtagtcgaaactccaagacgcagctagaacatggggaacaagaactcgatggtggcgtttttctcgccgaatatcatagaagaatcccggccgatggattttctgtatacgccgaaggagtctgggaccagattgtcaataacaaagacctcgacttgcccacgcagcaggaacttttagcacaattccgctgtgatgagatctcgcgcgaggttcttgtctcattcgatgctgcaatcggtcccctggaagaacagcaggcggagtcggcacgtattggtaaacctactgtcctacccgatcttggagagaccggaaggacaacgagagagaaatgtgtcaaggcttttgagacacaagctagtcggtatcacaaggcggtatacgcacggaaacgcacagagcttgagggcaagatcgaccaacggctcaagactctttatcagggtcagctttcggcagctcacaagactggcgttgccacattcagcgacgctgtttccaatgcggtgaaagctggtcagaaatcgggagctaaatacgagttcgctgagattgtcgcctccaagaagaccaagtgtctggagcagttcaagaccgaagcgcaaagtcttgccatggagggcgtggcctggacgaacttcaagccacaatttgtgcttttcgaaaaggagttggacgaagtgagtgcccgtctacggaaagaagaaatgcgccggctggctacgcggacggagcggtatgtcaaatctcgactcggcgacgatgttggtcttgagttcaataaactgggatcgggaagaggtggatcgggcgcaccggaatctgaagataagcccccaagcgaaaaggacctttgggatcgtatctggaaagtttttgtcaccatcatcaaagacgccgagactcgcttcactgatcgtgccaagagctttgaagctactgaagatgaggtagatgtgggactttggcgcttaagacgcaagagctgggttgccttgagagaaagattggaagaggaagtgatggagggcaacattctgcttaagcttcgtgaaaacttcgaagacaaattccgatatgatgaggcgggcgttccccggatatggcggcctgccgacgacatagaaggcatctacacacgagcacgagagtcgactctaactctgatccctctgctttccaagttcaagctttcgaccacctacgctcccccagacttactgggctttatcggtcatcagcctgccggcgccgaacaagaagacgaggacgacctgacacctatcggtggcgttgacgaggaagaaggaaagagtctcgaagaagagatgactgtgttgagtgagggcaagcgacaggatttggtggtccggttcaagaagatggccgatggcgtctacgttgaggcgaagcgaagtgctattggtggagttgcgcaagtgccgttgtacttctacggaatcctgttggctctggggtggaacgaattattgactgtcctccgtaaccccatactcttcctactactcatcatcatggctggcggaacatacgtagcatacaacctcaacctgctaggcccgatgatgcagatgagcagcgcggcatgggctcaggcggtggagatcggcaagcagaagctgcgcgagttcctggagaataacgagacggcgcgccaggccatcggtgtgcccgctcgcgaggactcgtctatcagcttggataccttggacagccgggggaagaagacttctcgacctactgctgctgacgacgatgacgatttttga

SEQ ID NO: 10002 - protein, 854 aa, Muscodor strobelii
  misc_feature: SGI Peptide ID NO. 563154
  misc_feature (56)..(833): Pfam Id: PF05879 Pfam Desc: Root hair defective 3 GTP-binding protein (RHD3)
  misc_feature (1)..(854): NCBI GI: 46107900 Blast Desc: FG00833.1 [Gibberella zeae PH-1]
  misc_feature (1)..(854): NCBI GI: 259510017 Blast Desc: FG00833.1 [Gibberella zeae PH-1]
  misc_feature (1)..(851): NCBI GI: 85110264 Blast Desc: protein SEY1 [Neurospora crassa OR74A] gi|73919310|sp|Q9P5X6.1|SEY1_NEUCR RecName: Full=Protein sey1 gi|7800997|emb|CAB91394.1| conserved [Neurospora crassa] protein
  misc_feature (1)..(843): NCBI GI: 256734644 Blast Desc: [Nectria haematococca mpVI 77-13-4]
  misc_feature (1)..(852): NCBI GI: 171689872 Blast Desc: protein product [Podospora anserina] gi|259509987|sp|B2B1M4.1|SEY1_PODAN RecName: Full=Protein SEY1 gi|170944898|emb|CAP71009.1| protein product [Podospora anserina]
  misc_feature (1)..(837): NCBI GI: 39978189 Blast Desc: MGG_06979 [Magnaporthe grisea 70-15] gi|73919309|sp|Q525S7.1|SEY1_MAGGR RecName: Full=Protein SEY1 gi|145013445|gb|EDJ98086.1| MGG_06979 [Magnaporthe grisea 70-15]
  misc_feature (1)..(824): NCBI GI: 261357034 Blast Desc: SEY1 [Verticillium albo-atrum VaMs.102]
  misc_feature (1)..(844): NCBI GI: 154308785 Blast Desc: BC1G_07815 [Botryotinia fuckeliana B05.10] gi|259509967|sp|A6S544.1|SEY1_BOTFB RecName: Full=Protein sey1 gi|150852766|gb|EDN27958.1| BC1G_07815 [Botryotinia fuckeliana
  misc_feature (1)..(844): NCBI GI: 156050545 Blast Desc: SS1G_07860 [Sclerotinia sclerotiorum 1980] gi|259510006|sp|A7ERA6.1|SEY1_SCLS1 RecName: Full=Protein sey1 gi|154692260|gb|EDN91998.1| SS1G_07860 [Sclerotinia sclerotiorum
  misc_feature (1)..(756): NCBI GI: 116200223 Blast Desc: CHGG_08267 [Chaetomium globosum CBS 148.51] gi|88179546|gb|EAQ87014.1| CHGG_08267 [Chaetomium globosum CBS 148.51]
  misc_feature: Useful for introducing or modulating the production of volatile compounds
MNGHFAAVGDAPTDAQYEHGVQVIDEDKEFNTHLNSYLHATNVAEAGFNYHLISVFGSQSTGKSTLLNALFGTEFNVMSETERRQTTKGIWMSKNKTATMTDNILVMDVEGTDGRERGEDQDFERKSALFALATSEVLIVNIWEHQVGLYQGANMGLLKTVFEVNLQLFLKDKQSTPRSLLFFVIRDHIGHTPLSNLRNTLIQDLSKIWSSISKPQGLEKSRIEDYFDFAFSALPHKILQPEKFVDEVKNLGKRFVAGSRNSKTQLEHGEQELDGGVFLAEYHRRIPADGFSVYAEGVWDQIVNNKDLDLPTQQELLAQFRCDEISREVLVSFDAAIGPLEEQQAESARIGKPTVLPDLGETGRTTREKCVKAFETQASRYHKAVYARKRTELEGKIDQRLKTLYQGQLSAAHKTGVATFSDAVSNAVKAGQKSGAKYEFAEIVASKKTKCLEQFKTEAQSLAMEGVAWTNFKPQFVLFEKELDEVSARLRKEEMRRLATRTERYVKSRLGDDVGLEFNKLGSGRGGSGAPESEDKPPSEKDLWDRIWKVFVTIIKDAETRFTDRAKSFEATEDEVDVGLWRLRRKSWVALRERLEEEVMEGNILLKLRENFEDKFRYDEAGVPRIWRPADDIEGIYTRARESTLTLIPLLSKFKLSTTYAPPDLLGFIGHQPAGAEQEDEDDLTPIGGVDEEEGKSLEEEMTVLSEGKRQDLVVRFKKMADGVYVEAKRSAIGGVAQVPLYFYGILLALGWNELLTVLRNPILFLLLIIMAGGTYVAYNLNLLGPMMQMSSAAWAQAVEIGKQKLREFLENNETARQAIGVPAREDSSISLDTLDSRGKKTSRPTAADDDDDF

SEQ ID NO: 10003 - DNA, 4808 bp, Muscodor strobelii
  misc_feature: SGI EST ID NO. CUFF.23659.0
  misc_feature: Variant of the nucleotide sequence at SEQ ID NO 10001
tggcattcttactggccacattgttgattcccagcatttgcagcggtcagcacagtaaaaaaaaaaaggagcgactctccggcactgagttgaatgacactctgaaaggcacattctgttgcatatgtagcaaaggtattaataagggagccactcttgtccgtcggggtgctttatttacacgcatctctctctaaaaccctcgctgtatacgtaaggtagctttgtgcctggccgactaggattccttagcttactgaaccaacctcgagcttgcgatttggaggcttcccacaagacgtaacacacgcacatactcctgccatggtcatggcaataactctctcaagatctgttctctagaatacctcgcctgcatttgctctccaatctgcgccgcctccaaccgcctccatgaacggccacttcgctgctgtcggcgatgcgccgactgatgcccaatatgagcacggcgtccaagtcatcgacgaggacaaggagttcaacacccatctcaactcctatttgcatgcaaccaacgttgccgaggccggcttcaattaccacctgatatcggtcttcggttcccagtccaccggcaagtccacccttctcaatgccctcttcggcaccgagttcaacgtcatgtccgagaccgagcggcggcagaccaccaaggggatatggatgtccaagaacaaaactgccaccatgaccgacaacatcctcgtcatggatgtcgagggcaccgacggccgcgagcgcggcgaagatcaggatttcgagaggaagagtgcgctatttgccttggccaccagcgaagttctcattgtcaatatttgggagcatcaggtcggtctgtatcaaggtgccaatatggggctgttgaagactgtattcgaggtgaatctccagctatttttgaaagacaagcaatccacaccgaggtcgctgttattcttcgttattcgtgaccacatcgggcatacccctttatccaacttgcggaacaccttgattcaagatctttctaagatatggtcgtctatatcgaagccgcaaggcctggaaaagtcgcgcattgaagactacttcgacttcgccttctctgcactgccacacaaaattctacagcccgagaagttcgttgacgaggtcaagaatcttgggaaacgatttgttgccggtagtcgaaactccaagacgcagctagaacatggggaacaagaactcgatggtggcgtttttctcgccgaatatcatagaagaatcccggccgatggattttctgtatacgccgaaggagtctgggaccagattgtcaataacaaagacctcgacttgcccacgcagcaggaacttttagcacaattccgctgtgatgagatctcgcgcgaggttcttgtctcattcgatgctgcaatcggtcccctggaagaacagcaggcggagtcggcacgtattggtaaacctactgtcctacccgatcttggagagaccggaaggacaacgagagagaaatgtgtcaaggcttttgagacacaagctagtcggtatcacaaggcggtatacgcacggaaacgcacagagcttgagggcaagatcgaccaacggctcaagactctttatcagggtcagctttcggcagctcacaagactggcgttgccacattcagcgacgctgtttccaatgcggtgaaagctggtcagaaatcgggagctaaatacgagttcgctgagattgtcgcctccaagaagaccaagtgtctggagcagttcaagaccgaagcgcaaagtcttgccatggagggcgtggcctggacgaacttcaagccacaatttgtgcttttcgaaaaggagttggacgaagtgagtgcccgtctacggaaagaagaaatgcgccggctggctacgcggacggagcggtatgtcaaatctcgactcggcgacgatgttggtcttgagttcaataaactgggatcgggaagaggtggatcgggcgcaccggaatctgaagataagcccccaagcgaaaaggacctttgggatcgtatctggaaagtttttgtcaccatcatcaaagacgccgagactcgcttcactgatcgtgccaagagctttgaagctactgaagatgaggtagatgtgggactttggcgcttaagacgcaagagctgggttgccttgagagaaagattggaagaggaagtgatggagggcaacattctgcttaagcttcgtgaaaacttcgaagacaaattccgatatgatgaggcgggcgttccccggatatggcggcctgccgacgacatagaaggcatctacacacgagcacgagagtcgactctaactctgatccctctgctttccaagttcaagctttcgaccacctacgctcccccagacttactgggctttatcggtcatcagcctgccggcgccgaacaagaagacgaggacgacctgacacctatcggtggcgttgacgaggaagaaggaaagagtctcgaagaagagatgactgtgttgagtgagggcaagcgacaggatttggtggtccggttcaagaagatggccgatggcgtctacgttgaggcgaagcgaagtgctattggtggagttgcgcaagtgccgttgtacttctacggaatcctgttggctctggggtggaacgaattattgactgtcctccgtaaccccatactcttcctactactcatcatcatggctggcggaacatacgtagcatacaacctcaacctgctaggcccgatgatgcagatgagcagcgcggcatgggctcaggcggtggagatcggcaagcagaagctgcgcgagttcctggagaataacgagacggcgcgccaggccatcggtgtgcccgctcgcgaggactcgtctatcagcttggataccttggacagccgggggaagaagacttctcgacctactgctgctgacgacgatgacgatttttgaaatgatggggtggaaaggaaagcttgcacgcatgaaaagaaagcgcatgatttgggttggtctgggtgggctgcatgatatggatagtttcgatcgcaggatatagtatcaatttcacacgtccctccgagtagacggacgatcgttcatatgcctctccgtctgtactttttcttcttttgccttctaatactgggtaggtaggtaggcgtgtcgctatccggcgcggtggaatctcagtcgtcacccactgtcctactttcgttagtaatcagacttatatatcacaataacgcgtctatatttcaccatttcattaccggtgccttcgtaggcgtcttggaaattcttcgatcccgtctggcatatgtaggtatcttaacggtgtttcagacgtaatatacaggaaaccccctccccctaacgccacgccgcacagtgtgcaatgcatcaacaccattcttccttagtttcctatcgaaaaaacactcagaaagcctccaagcccgcaggactaccaaaccaagaccccaactcatcagcgtctttctgccttccgtcactagtggtgaagaagtccgtaacgcgatgcgtgctctcgtcctcgtccaccgccggccaatcgatggatatgccgcccttagcatctagcatatccttcgcggtgccccaactaaatctgcattctgggccccagccaaagactggatgcatgtttcgctttagccaacctatgcagcgcgcgtcgcttgggtagccgctgccccaggtttctccctccgtacctccttcgttctctccttttaatttggacatttctgcttggcggtgtgagaagaggacgtcgagcgcggcgtctcgcgtgactttcgcgcagacggatgctgctgagacacaggggtataaggaatctgcctttttggcgacggtgatgcgtatattgggccatatgcgggagagtttattctggtaggtttgtggttggccgatggtgtctacgtatatctcttgcacattcacgcctctatccagtacgccctgaatcaaatcgatcgtcgcgtccatggcttgcgcgttgaggttgtaaggggagggtttgtacatgtttacgcttatgtcccgtgcggagagggagctgatggcccacccgcaggatgtgtgcagggaggtggacggtgtgcagagcgtccgcattagggtgctgcgcacggaggtggtgaggacttttgagtcgtcgaagtggtgggttgtttttaggaggggtgttgagagagggatggggaggtagaatattccgtagaccatggggccgaggacgggaccgcggccggcttcgtcgacgcctagacagcatggggtgccggtggatgggttggttgggtttgcgaggagggagggcgggacgggggagtagtgcgtgtaagagtcgccggcgagggttggggagacgtggatggagggcgggatgtatgttgatgttgttgatgttgaggtggtttcgggggtctcgtctgcgagggtctccatgggtgtgtccgtttcatccattgtgaatttgatttggttatggagtagaggatcggaagttggcttggttgtgatagattagatgaggtttgtggtggggtgttgtaggagttgaagtcgagaagagtgttgtaaggtggttgtaagactctgatcgaccttggaattaggacaattaagtcgattgatagaatcttccaatgatacaattagctatgtacctcgtctaagaaacacaagataacatgacaacctaggacgtattgtcgaattgcaggtcaaagacacatcttagtcgggtg

SEQ ID NO: 10004 - DNA, 1059 bp, Muscodor strobelii
  misc_feature: SGI cDNA ID NO. 563155
  misc_feature: Encodes the peptide sequence at SEQ ID NO 10005
atggatgaaacggacacacccatggagaccctcgcagacgagacccccgaaaccacctcaacatcaacaacatcaacatacatcccgccctccatccacgtctccccaaccctcgccggcgactcttacacgcactactcccccgtcccgccctccctcctcgcaaacccaaccaacccatccaccggcaccccatgctgtctaggcgtcgacgaagccggccgcggtcccgtcctcggccccatggtctacggaatattctacctccccatccctctctcaacacccctcctaaaaacaacccaccacttcgacgactcaaaagtcctcaccacctccgtgcgcagcaccctaatgcggacgctctgcacaccgtccacctccctgcacacatcctgcgggtgggccatcagctccctctccgcacgggacataagcgtaaacatgtacaaaccctccccttacaacctcaacgcgcaagccatggacgcgacgatcgatttgattcagggcgtactggatagaggcgtgaatgtgcaagagatatacgtagacaccatcggccaaccacaaacctaccagaataaactctcccgcatatggcccaatatacgcatcaccgtcgccaaaaaggcagattccttatacccctgtgtctcagcagcatccgtctgcgcgaaagtcacgcgagacgccgcgctcgacgtcctcttctcacaccgccaagcagaaatgtccaaattaaaaggagagaacgaaggaggtacggagggagaaacctggggcagcggctacccaagcgacgcgcgctgcataggttggctaaagcgaaacatgcatccagtctttggctggggcccagaatgcagatttagttggggcaccgcgaaggatatgctagatgctaagggcggcatatccatcgattggccggcggtggacgaggacgagagcacgcatcgcgttacggacttcttcaccactagtgacggaaggcagaaagacgctgatgagttggggtcttggtttggtagtcctgcgggcttggaggctttctga

SEQ ID NO: 10005 - protein, 352 aa, Muscodor strobelii
  misc_feature: SGI Peptide ID NO. 563155
  misc_feature (68)..(296): Pfam Id: PF01351 Pfam Desc: Ribonuclease HII
  misc_feature (68)..(232): Pfam Id: PF01351 Pfam Desc: Ribonuclease HII
  misc_feature (258)..(296): Pfam Id: PF01351 Pfam Desc: Ribonuclease HII
  misc_feature (13)..(352): NCBI GI: 46107902 Blast Desc: FG00834.1 [Gibberella zeae PH-1]
  misc_feature (3)..(352): NCBI GI: 171689874 Blast Desc: protein product [Podospora anserina] gi|170944899|emb|CAP71010.1| protein product [Podospora anserina]
  misc_feature (3)..(352): NCBI GI: 256735361 Blast Desc: NECHADRAFT_75114 [Nectria haematococca mpVI 77-13-4]
  misc_feature (28)..(352): NCBI GI: 116200221 Blast Desc: CHGG_08266 [Chaetomium globosum CBS 148.51] gi|88179545|gb|EAQ87013.1| CHGG_08266 [Chaetomium globosum CBS 148.51]
  misc_feature (21)..(345): NCBI GI: 156063040 Blast Desc: SS1G_01636 [Sclerotinia sclerotiorum 1980] gi|154696972|gb|EDN96710.1| SS1G_01636 [Sclerotinia sclerotiorum 1980]
  misc_feature (23)..(344): NCBI GI: 119196321 Blast Desc: CIMG_02535 [Coccidioides immitis RS]
  misc_feature (23)..(344): NCBI GI: 240110925 Blast Desc: ribonuclease H2 subunit A, [Coccidioides posadasii C735 delta SOWgp]
  misc_feature (27)..(352): NCBI GI: 164422805 Blast Desc: NCU09608 [Neurospora crassa OR74A] gi|157069829|gb|EAA34136.2| NCU09608 [Neurospora crassa OR74A]
  misc_feature (27)..(352): NCBI GI: 11387103 Blast Desc: RNH2A_NEUCR RecName: Full=Ribonuclease H2 subunit A; Short=RNase H2 subunit A; AltName: Full=Ribonuclease HI subunit A; AltName: Full=Ribonuclease HI large subunit; Short=RNase HI 35
  misc_feature (5)..(346): NCBI GI: 154318955 Blast Desc: BC1G_02429 [Botryotinia fuckeliana B05.10] gi|150856860|gb|EDN32052.1| BC1G_02429 [Botryotinia fuckeliana B05.10]
  misc_feature (27)..(352): SWISSPROT Homolog: EC 3.1.26.4 Ribonuclease H
MDETDTPMETLADETPETTSTSTTSTYIPPSIHVSPTLAGDSYTHYSPVPPSLLANPTNPSTGTPCCLGVDEAGRGPVLGPMVYGIFYLPIPLSTPLLKTTHHFDDSKVLTTSVRSTLMRTLCTPSTSLHTSCGWAISSLSARDISVNMYKPSPYNLNAQAMDATIDLIQGVLDRGVNVQEIYVDTIGQPQTYQNKLSRIWPNIRITVAKKADSLYPCVSAASVCAKVTRDAALDVLFSHRQAEMSKLKGENEGGTEGETWGSGYPSDARCIGWLKRNMHPVFGWGPECRFSWGTAKDMLDAKGGISIDWPAVDEDESTHRVTDFFTTSDGRQKDADELGSWFGSPAGLEAF

SEQ ID NO: 10006 - DNA, 2007 bp, Muscodor strobelii
  misc_feature: SGI cDNA ID NO. 563156
  misc_feature: Encodes the peptide sequence at SEQ ID NO 10007
atggctccgaaagctaattcacaatcgcaacgtcgccagacgtttctggcgcagggcgaacagttgcaccagttaggaaaacagggaaggaagacaggcatcacgttacccgatgctccacgcgacgaacatggcttcgaggtcatagacaacctgttctcttcgccggagaaagacatcggcaacggcgcacagtccgacagcgagcaggacatggagatcgacaatggtctcgagcccggccctgctactaccaggaagatgcaaggccagggtcgcctccccgtccctcgcgccagatctcccgtcaagaccacacagcagtcactgcagtctcccgcgcgtcagaacccccacctcggccctacctcgtctccaacgcgggggaccatcgtcaccaccaaggagaaggagcccaagggtaaagcgatccgcaaactgaacttcggcaacaatgctccatccgtcacagctatcgagaaaccaagggccgcccttaagattaacggtaccaagggtgcaccagggaaaaaggtgaacgggcatcgccgctctccttctccaatcgaagagtttgaagaagatgatcccgcggtggaagacgatgtggaagaacctgaagaggacgaagaagaggaagactccatggagttgctggacgctgctgctaccgccggccccgaagacgacgacccaacaccagatgctatcgatgaagttccctccgaatcagaacccgaggagccagttcaggagctgaaagcggctagtaaagcgaaatctggtggaaagagaggccgtaaacccaagacagttgtcgaagaccaggaagaggaagcagatgagtcagagcccgagcccgagcctgagcctgaacctgaaccagtcatggaggaggagcctgtgaagaaaaggaaagggcgacctaaggcttcgcccgttcacacacaggagccatcccctccttctgatccttcgccgcctgtcaaaacgggaaaacgaggacggccggcgaggaattccacaggtgaggcagaagagagtcatcccgaaccagagcagtcgagggagacgaaacgtctgaagacgcaaccaaaggctgagaagagtgtcggatcaaagccagcgacaaaacaggtgaagggcaaagcagggcgaaagcgaaaatcttccggtgttggggttgactcgcctgccatccaacgcggtccgcctctgccaaagagtcgtgggctcgtgaccgtacgccgggaggattcggcggaaatgaagacgacgcgatcaggccgcagctcgttcaagcccctggaatggtggaagggagagcacgtggagtacgatgacgaaaacgaggagatctacgatatggctggttatcgtggagagaatgataggagacatttcaagatgcggacaattaaaggtgttgtccggacggaggagaatgaagaagagaccaagtttagacggcgaggtcgtccagccagtgcacgacccaggggacgaccagtagcgatacccgaggaggtattggaccgcgacgaatgggaagacgacccaggtcgggttacgggtgaagttatctactggtatccagagcacgagttcaacccgccgcaggaagaagaccaagtcgaggtcgtgccagaagaattagccatctcagaagctgcgatacaacttaaggatatcaaggacgcgactttcaaatttgctaagacgctgactatgccgttctttggatcgggcatagtggatctaccgcccggtgcggagaagagaccgaagaactctaggaagatgcatcttacgttctttgtccacactgggactgtcgaggtcacggttgcgcagactacttttaatatctccaagggggggcaatttttcgtgcctagagggaatcattatagtattacgaataactcagatcaccactcgagaatattctttgcgcagggctgcgaaatctttgctcagcctgaggagttgaaggatgaggaatga

SEQ ID NO: 10007 - protein, 668 aa, Muscodor strobelii
  misc_feature: SGI Peptide ID NO. 563156
  misc_feature (1)..(663): NCBI GI: 46107904 Blast Desc: FG00835.1 [Gibberella zeae PH-1]
  misc_feature (399)..(663): NCBI GI: 256734645 Blast Desc: NECHADRAFT_90245 [Nectria haematococca mpVI 77-13-4]
  misc_feature (1)..(657): NCBI GI: 116200219 Blast Desc: CHGG_08265 [Chaetomium globosum CBS 148.51] gi|88179544|gb|EAQ87012.1| CHGG_08265 [Chaetomium globosum CBS 148.51]
  misc_feature (20)..(668): NCBI GI: 39978151 Blast Desc: MGG_06960 [Magnaporthe grisea 70-15] gi|145013463|gb|EDJ98104.1| MGG_06960 [Magnaporthe grisea 70-15]
  misc_feature (376)..(667): NCBI GI: 7800996 Blast Desc: related to neurofilament triplet H1 protein [Neurospora crassa]
  misc_feature (376)..(667): NCBI GI: 85110262 Blast Desc: NCU09609 [Neurospora crassa OR74A] gi|28925051|gb|EAA34137.1| NCU09609 [Neurospora crassa OR74A]
  misc_feature (15)..(657): NCBI GI: 171689876 Blast Desc: protein product [Podospora anserina] gi|170944900|emb|CAP71011.1| protein product [Podospora anserina]
  misc_feature (385)..(657): NCBI GI: 154318957 Blast Desc: BC1G_02430 [Botryotinia fuckeliana B05.10] gi|150856861|gb|EDN32053.1| BC1G_02430 [Botryotinia fuckeliana B05.10]
  misc_feature (24)..(655): NCBI GI: 121702281 Blast Desc: cupin domain protein [Aspergillus clavatus NRRL 1] gi|119397548|gb|EAW07979.1| cupin domain protein [Aspergillus clavatus NRRL 1]
  misc_feature (24)..(655): NCBI GI: 145238900 Blast Desc: An07g10220 [Aspergillus niger] gi|134076598|emb|CAK45151.1| protein product [Aspergillus niger]
MAPKANSQSQRRQTFLAQGEQLHQLGKQGRKTGITLPDAPRDEHGFEVIDNLFSSPEKDIGNGAQSDSEQDMEIDNGLEPGPATTRKMQGQGRLPVPRARSPVKTTQQSLQSPARQNPHLGPTSSPTRGTIVTTKEKEPKGKAIRKLNFGNNAPSVTAIEKPRAALKINGTKGAPGKKVNGHRRSPSPIEEFEEDDPAVEDDVEEPEEDEEEEDSMELLDAAATAGPEDDDPTPDAIDEVPSESEPEEPVQELKAASKAKSGGKRGRKPKTVVEDQEEEADESEPEPEPEPEPEPVMEEEPVKKRKGRPKASPVHTQEPSPPSDPSPPVKTGKRGRPARNSTGEAEESHPEPEQSRETKRLKTQPKAEKSVGSKPATKQVKGKAGRKRKSSGVGVDSPAIQRGPPLPKSRGLVTVRREDSAEMKTTRSGRSSFKPLEWWKGEHVEYDDENEEIYDMAGYRGENDRRHFKMRTIKGVVRTEENEEETKFRRRGRPASARPRGRPVAIPEEVLDRDEWEDDPGRVTGEVIYWYPEHEFNPPQEEDQVEVVPEELAISEAAIQLKDIKDATFKFAKTLTMPFFGSGIVDLPPGAEKRPKNSRKMHLTFFVHTGTVEVTVAQTTFNISKGGQFFVPRGNHYSITNNSDHHSRIFFAQGCEIFAQPEELKDEE

SEQ ID NO: 10008 - DNA, 2606 bp, Muscodor strobelii
  misc_feature: SGI EST ID NO. CUFF.23662.0
  misc_feature: Variant of the nucleotide sequence at SEQ ID NO 10006
cttctgtcgggtcttgttattgatgctcgtcttgtgcaccctccccaccatcgcatcacatcgcatcgccattgtcttgctcttgtctttggaacagcatacattgattcgagtcgcggcttgctggtctcgcgcgagacattgccatcgttacctactatatacccgacttctcgtctggctgtcacattacctgagtttacgccatcgcatgacccgccatggctccgaaagctaattcacaatcgcaacgtcgccagacgtttctggcgcagggcgaacagttgcaccagttaggaaaacagggaaggaagacaggcatcacgttacccgatgctccacgcgacgaacatggcttcgaggtcatagacaacctgttctcttcgccggagaaagacatcggcaacggcgcacagtccgacagcgagcaggacatggagatcgacaatggtctcgagcccggccctgctactaccaggaagatgcaaggccagggtcgcctccccgtccctcgcgccagatctcccgtcaagaccacacagcagtcactgcagtctcccgcgcgtcagaacccccacctcggccctacctcgtctccaacgcgggggaccatcgtcaccaccaaggagaaggagcccaagggtaaagcgatccgcaaactgaacttcggcaacaatgctccatccgtcacagctatcgagaaaccaagggccgcccttaagattaacggtaccaagggtgcaccagggaaaaaggtgaacgggcatcgccgctctccttctccaatcgaagagtttgaagaagatgatcccgcggtggaagacgatgtggaagaacctgaagaggacgaagaagaggaagactccatggagttgctggacgctgctgctaccgccggccccgaagacgacgacccaacaccagatgctatcgatgaagttccctccgaatcagaacccgaggagccagttcaggagctgaaagcggctagtaaagcgaaatctggtggaaagagaggccgtaaacccaagacagttgtcgaagaccaggaagaggaagcagatgagtcagagcccgagcccgagcctgagcctgaacctgaaccagtcatggaggaggagcctgtgaagaaaaggaaagggcgacctaaggcttcgcccgttcacacacaggagccatcccctccttctgatccttcgccgcctgtcaaaacgggaaaacgaggacggccggcgaggaattccacaggtgaggcagaagagagtcatcccgaaccagagcagtcgagggagacgaaacgtctgaagacgcaaccaaaggctgagaagagtgtcggatcaaagccagcgacaaaacaggtgaagggcaaagcagggcgaaagcgaaaatcttccggtgttggggttgactcgcctgccatccaacgcggtccgcctctgccaaagagtcgtgggctcgtgaccgtacgccgggaggattcggcggaaatgaagacgacgcgatcaggccgcagctcgttcaagcccctggaatggtggaagggagagcacgtggagtacgatgacgaaaacgaggagatctacgatatggctggttatcgtggagagaatgataggagacatttcaagatgcggacaattaaaggtgttgtccggacggaggagaatgaagaagagaccaagtttagacggcgaggtcgtccagccagtgcacgacccaggggacgaccagtagcgatacccgaggaggtattggaccgcgacgaatgggaagacgacccaggtcgggttacgggtgaagttatctactggtatccagagcacgagttcaacccgccgcaggaagaagaccaagtcgaggtcgtgccagaagaattagccatctcagaagctgcgatacaacttaaggatatcaaggacgcgactttcaaatttgctaagacgctgactatgccgttctttggatcgggcatagtggatctaccgcccggtgcggagaagagaccgaagaactctaggaagatgcatcttacgttctttgtccacactgggactgtcgaggtcacggttgcgcagactacttttaatatctccaagggggggcaatttttcgtgcctagagggaatcattatagtattacgaataactcagatcaccactcgagaatattctttgcgcagggctgcgaaatctttgctcagcctgaggagttgaaggatgaggaatgagagacgagtgcgagtctacgaaaatgatttggtggaagtcggtgtgtcatccgtgattttgagcatacaccatggagacaactcgaggcgaaaaacatgtataaatgggccgacgtcaggacgaaatgttgggtccttgtgacggaattgcgattgtcaaaaagctgtctggggagaggtagctggtatgatttctggcctgttttctttattagggtcgtgggagtgttgtggtgttctgtgtataagtctaagctgtttacgataccattcccgaattgaggtttccttgattgcttcatgcctagttctgcctcttactatctaagactcgaatgcgagatgtgtaaattggaaggacaggtgcctataccttgg

SEQ ID NO: 10009 - DNA, 1575 bp, Muscodor strobelii
  misc_feature: SGI cDNA ID NO. 563157
  misc_feature: Encodes the peptide sequence at SEQ ID NO 10010
atgtgggttaatccagattgcggcaaattaaatgagaccgacaaagctcagtgcgaagctcacggccactataatccaaccaaatcatctacgagcatcaacacgacggaaacgtacgatacaagttacgcagatggctccagcgccaatctgacgtacttcaccgacaccatcacgctggtcagtggccagccattcaccaacgtcacatttggcgtggccactacttctttcgggttttcaactggctttttggggcttggttatggcattgtcgatgcgcagatgacccaggccgggtttattgatcaattggctgcgcagggaatcattaacagcaaggcgttcagtcttgcgttggccgactcagacacagcagatgacgaaggcatactcatcctcggaggcattgatactaagaagttcagcggcgagcttaaagaccagaaaatagtgcccctagtgggatacgatgattacgagcgatacagcatccagatgacgagcataggcgtcaagcacgaagacaattcaaccagcgactataagaatagcagtgttatcgtacttctagatgccggtacaacaatatcctatcttcctcagtatatcgcggatcccatatttgctgatttaggcgcgacatggatcaaagacttcttttccctggcatcagtgccctgctctcagcagcagaatacatcttccttcgcctttacgttcgcagaccttaccgtatccgcaccaatctccgacttcgttgtacgattcaacgacactttctgctacttcggcatttcatacgcgacggaattgatctatccttcactcggactgaacttcctacgctctgtatacgccgtctacgaccagtcgcttttgaaaatctcgctgggtcaatacatcaactgcggctcccatgatcagcccatgttcagctcaggtgctgctggctttgtcggcgaatgcgaaatttttaacggaacgacgcccacctctaatacgtcctcgccatccggtactaatacgtccagtcctacaagtagctccactttaggactgtctaccgccgccaaagctggcattggcgtcggttcctctgcggtaggtttgcttatcatcacgggctcattgttcctgtgtcgacggcgtggcagccgtgagaaaaccgagcagccagttgagcagtcctattctgagacgcagatcgcaacctactacagcccacagtaccccggggagctttcagggcagtctaatccgcagtaccctggcgagctctcaggacagtcctacaacagcccaggacatccgggcgagctcctggggcatccatactataactcacaatatcccggcgagctctcaggacagtctacgtcacccgcaggggcgcagattccaccgaatgatctctccaacataaacggcaacacggatatcggcggcgacccttctcaattgtcagaattgggtgactcgcaacaccgtgaggatggtcaatataagtacttgtctagcacgccgatagagcgtgcgaaggacgcagctaagtctggacatacaccactataa

SEQ ID NO: 10010 - protein, 524 aa, Muscodor strobelii
  misc_feature: SGI Peptide ID NO. 563157
  misc_feature (1)..(301): Pfam Id: PF00026 Pfam Desc: Eukaryotic aspartyl protease
  misc_feature (18)..(301): Pfam Id: PF00026 Pfam Desc: Eukaryotic aspartyl protease
  misc_feature (1)..(373): NCBI GI: 39970765 Blast Desc: MGG_02849 [Magnaporthe grisea 70-15] gi|149210259|ref|XP_001522504.1| MGCH7_ch7g607 [Magnaporthe grisea 70-15] gi|86196562|gb|EAQ71200.1| MGCH7_ch7g607 grisea
  misc_feature (1)..(346): NCBI GI: 171680938 Blast Desc: protein product [Podospora anserina] gi|170940427|emb|CAP65654.1| protein product [Podospora anserina]
  misc_feature (1)..(323): NCBI GI: 116191517 Blast Desc: CHGG_05476 [Chaetomium globosum CBS 148.51] gi|88181389|gb|EAQ88857.1| CHGG_05476 [Chaetomium globosum CBS 148.51]
  misc_feature (1)..(306): NCBI GI: 39948622 Blast Desc: MGG_08698 [Magnaporthe grisea 70-15] gi|145009241|gb|EDJ93952.1| MGG_08698 [Magnaporthe grisea 70-15]
  misc_feature (1)..(324): NCBI GI: 261353472 Blast Desc: candidapepsin-1 [Verticillium albo-atrum VaMs.102]
  misc_feature (1)..(316): NCBI GI: 118161444 Blast Desc: secreted aspartic proteinase [Hypocrea lixii]
  misc_feature (1)..(324): NCBI GI: 171691448 Blast Desc: protein product [Podospora anserina] gi|170945672|emb|CAP71785.1| protein product [Podospora anserina]
  misc_feature (1)..(308): NCBI GI: 145606406 Blast Desc: MGG_11945 [Magnaporthe grisea 70-15] gi|145014070|gb|EDJ98711.1| MGG_11945 [Magnaporthe grisea 70-15]
  misc_feature (1)..(349): NCBI GI: 156065227 Blast Desc: SS1G_00624 [Sclerotinia sclerotiorum 1980] gi|154691483|gb|EDN91221.1| SS1G_00624 [Sclerotinia sclerotiorum 1980]
  misc_feature (1)..(355): NCBI GI: 212546157 Blast Desc: aspartic-type endopeptidase (OpsB), [Penicillium marneffei ATCC 18224] gi|210064752|gb|EEA18847.1| aspartic-type endopeptidase (OpsB), [Penicillium marneffei ATCC 18224]
  misc_feature (18)..(300): SWISSPROT Homolog: EC 3.4.23.24 Candidapepsin
MWVNPDCGKLNETDKAQCEAHGHYNPTKSSTSINTTETYDTSYADGSSANLTYFTDTITLVSGQPFTNVTFGVATTSFGFSTGFLGLGYGIVDAQMTQAGFIDQLAAQGIINSKAFSLALADSDTADDEGILILGGIDTKKFSGELKDQKIVPLVGYDDYERYSIQMTSIGVKHEDNSTSDYKNSSVIVLLDAGTTISYLPQYIADPIFADLGATWIKDFFSLASVPCSQQQNTSSFAFTFADLTVSAPISDFVVRFNDTFCYFGISYATELIYPSLGLNFLRSVYAVYDQSLLKISLGQYINCGSHDQPMFSSGAAGFVGECEIFNGTTPTSNTSSPSGTNTSSPTSSSTLGLSTAAKAGIGVGSSAVGLLIITGSLFLCRRRGSREKTEQPVEQSYSETQIATYYSPQYPGELSGQSNPQYPGELSGQSYNSPGHPGELLGHPYYNSQYPGELSGQSTSPAGAQIPPNDLSNINGNTDIGGDPSQLSELGDSQHREDGQYKYLSSTPIERAKDAAKSGHTPL

SEQ ID NO: 10011 - DNA, 1921 bp, Muscodor strobelii
  misc_feature: SGI EST ID NO. CUFF.23665.0
  misc_feature: Variant of the nucleotide sequence at SEQ ID NO 10009
aaaacagcggcgcgaccaatttgtgccactagatgggaacaggtcctctgtcgaatacgatgtcacgtgttagaaagccattcccttcttaagcgatgacttttttttttaccatgctaatacccaaggttttaaaaagtgtccatcggcacgacacctggccagaaaataacgttattgttagggttggattacaacggcatgtgggttaatccagattgcggcaaattaaatgagaccgacaaagctcagtgcgaagctcacggccactataatccaaccaaatcatctacgagcatcaacacgacggaaacgtacgatacaagttacgcagatggctccagcgccaatctgacgtacttcaccgacaccatcacgctggtcagtggccagccattcaccaacgtcacatttggcgtggccactacttctttcgggttttcaactggctttttggggcttggttatggcattgtcgatgcgcagatgacccaggccgggtttattgatcaattggctgcgcagggaatcattaacagcaaggcgttcagtcttgcgttggccgactcagacacagcagatgacgaaggcatactcatcctcggaggcattgatactaagaagttcagcggcgagcttaaagaccagaaaatagtgcccctagtgggatacgatgattacgagcgatacagcatccagatgacgagcataggcgtcaagcacgaagacaattcaaccagcgactataagaatagcagtgttatcgtacttctagatgccggtacaacaatatcctatcttcctcagtatatcgcggatcccatatttgctgatttaggcgcgacatggatcaaagacttcttttccctggcatcagtgccctgctctcagcagcagaatacatcttccttcgcctttacgttcgcagaccttaccgtatccgcaccaatctccgacttcgttgtacgattcaacgacactttctgctacttcggcatttcatacgcgacggaattgatctatccttcactcggactgaacttcctacgctctgtatacgccgtctacgaccagtcgcttttgaaaatctcgctgggtcaatacatcaactgcggctcccatgatcagcccatgttcagctcaggtgctgctggctttgtcggcgaatgcgaaatttttaacggaacgacgcccacctctaatacgtcctcgccatccggtactaatacgtccagtcctacaagtagctccactttaggactgtctaccgccgccaaagctggcattggcgtcggttcctctgcggtaggtttgcttatcatcacgggctcattgttcctgtgtcgacggcgtggcagccgtgagaaaaccgagcagccagttgagcagtcctattctgagacgcagatcgcaacctactacagcccacagtaccccggggagctttcagggcagtctaatccgcagtaccctggcgagctctcaggacagtcctacaacagcccaggacatccgggcgagctcctggggcatccatactataactcacaatatcccggcgagctctcaggacagtctacgtcacccgcaggggcgcagattccaccgaatgatctctccaacataaacggcaacacggatatcggcggcgacccttctcaattgtcagaattgggtgactcgcaacaccgtgaggatggtcaatataagtacttgtctagcacgccgatagagcgtgcgaaggacgcagctaagtctggacatacaccactataattacgccactagtttgagcattttacctgcatatgcgagggaatgcatgatttatcaatcatttaacataagcatgtctggataatattaataatctcaagtcgttaattaaagacaaaataagttgtgacgttaataaattctt

SEQ ID NO: 10012 - DNA, 2514 bp, Muscodor strobelii
  misc_feature: SGI cDNA ID NO. 563158
  misc_feature: Reduced expression when VOC is produced
  misc_feature: Encodes the peptide sequence at SEQ ID NO 10013
atggctgcaagacatatgtcgggccgcataaggcctttgacaagatgtcctcgtctcacgcctcgtcaattgggcacaccactgtggcagacaacaagatggaactcgacggagacgggtgggaagaaaagcggccacatagaggcagcttctaatgagtcgatactttggtttgaccgactgtacccactcaagctttccggtcttctgcgactaccatggctcaaccccgagagcaacatatccgaattgaccaggagattcgaaaggtcaagcctggggatcatggacccgatgaacctagtcaaacgagccctaaaacccgaccttcccatcgacgtgaccgagattgtccctagaatcaaagacggaggcgcatttgttaaattcacacgtcccgccggtatctcgccccgtgagatagaagaggctgttactaaggagctcgccaacaatcccgtcaagcccatattcagcccgtttcgcgcagttcaggctggcctggtgcaaggcattccttggcttgaggatctgcatagatttcccaagaccagactgcgcatcgagttcgtgccaccaaacccgggtgaagaagccgtggaactttcacaggagcacctatacagcctatttcgtagatatggcaagatcgctgaaatcacatctcagccgtgggactccaagatcgtaccgaaattcgcttatgtcgacttctcattcattagagacgccataatggctcggaattgccttcatggctttgtggtgtccgaggaactcggcggcggcaagctaggcaccaagttccgcatttcgtatgagcaacgggccaatcctcacaagatatgggactggatcacgaaccacccgcgcatcgtcatccctgtcctcgtagcgcttctcacgggtgttactgttgtcgtttttgatcccatccgctctttctttgttgaggcccacgtttccaagaaatttcgtctatccaacagcaggttatacaggtggctccgaaaacagacttctcacgtatttacatttaagcgggaaagggcggagcaggtcggcctaaatgccgtatggactcaccgcaaggacttgattgagcagatacagacttggcttgtcgaaactgctgaaacatttattgtggttcaaggtccccgaggatcgggaaagcgagaacttgtcctggaacaggccctcaaggatagacgcaatgtccttgtaattgattgcaagaatatcgttgaaggtcgaggcgaatccggcgttattaagaagatggcctctgaggttgggtaccggcctatcttctcatgggcaaatagcatgagcagtatgattgatcttgctattcaaggcacaactggggtcaaggcaggcttttccgagacgctggattcgcaattggaaaagatcctggaaacaacagctggagctctgcaaacgcttgacttggagggtcgatcaaaacacgacgtagacgcttcagtgccggctgacgcttatttggacgcgcatccggagaggcgagctgtggttgtgatcgacaattttgagccccggagcgataacaatgccatcgtgtacgacaagctcgcagactgggcttccacgttggttcagacaaataccgcacatgtgattttcttgaccagggatgcttcttataccaagacattgaccaaggtcctgcctgaccgtgttttccgccatgctgcactcggcgatctttcttccgatgttgcaaaacgatacgtcctcagccatgtcacggctgatgatcccgaaccagaggcgtctgatgacgagtcagaaaacaaggcggccaaacctcgtcctaagctagctggtttggatgactgtatcgaaaccctcggcggccgtctcacagacctcgagtttcttgcccgacgcataaaggctggcctgtcgcctaaacaagccgtctctgaaatcacagaggagtctgcctccgaaattctgaagatgttcctcatactcggcagagctaccacggacggtgaacactcctggtcgatagaacaagcttggtacctcatcaaggccctctcaaaacgtgaagcattgggatatagtgaagttcttcaatccaacacattcgctctctccctcagctgtcccgacggaaaagccgcgcttgaaggactcgccaattcagacctaattacgctacaaacccgccatggccgaccacagagtatcagcgttgggaagcccgtatatcaagctgcgttccgcttcctgacttcggattctgtcctcactgcggaaatggaccttgcggtgctcaccgaacttgcaaagatagaggccaggaacattgagaaggcggaagctgaactttcagtccttgcgtcgtggcccaaacagcctgccgaaactacggatcgagttgcttatctgctggctaagctcgagacggcccagaaaaaggtcagggatctcgaaaaagagatgtcacccatcaagaaggtgcttgcgacgtcttaa

SEQ ID NO: 10013 - protein, 837 aa, Muscodor strobelii
  misc_feature: SGI Peptide ID NO. 563158
  misc_feature (25)..(834): NCBI GI: 255948628 Blast Desc: Pc22g11340 [Penicillium chrysogenum Wisconsin 54-1255] gi|211592098|emb|CAP98422.1| Pc22g11340 [Penicillium chrysogenum Wisconsin 54-1255]
  misc_feature (14)..(834): NCBI GI: 70991266 Blast Desc: RNA12 protein [Aspergillus fumigatus Af293] gi|66848114|gb|EAL88444.1| RNA12 protein, [Aspergillus fumigatus Af293] gi|159130955|gb|EDP56068.1| RNA12 protein, [Aspergillus
  misc_feature (43)..(834): NCBI GI: 238490029 Blast Desc: RNA12 protein, [Aspergillus flavus NRRL3357] gi|220698640|gb|EED54980.1| RNA12 protein, [Aspergillus flavus NRRL3357]
  misc_feature (43)..(834): NCBI GI: 169764044 Blast Desc: [Aspergillus oryzae RIB40] gi|121928160|sp|Q2UBI2.1|YME2_ASPOR RecName: Full=Mitochondrial escape protein 2; Flags: Precursor gi|83770950|dbj|BAE61083.1|
  misc_feature (43)..(834): NCBI GI: 115385855 Blast Desc: conserved [Aspergillus terreus NIH2624] gi|114187921|gb|EAU29621.1| conserved [Aspergillus terreus NIH2624]
  misc_feature (26)..(834): NCBI GI: 145238834 Blast Desc: An07g09890 [Aspergillus niger] gi|193806653|sp|A2QPL8.1|YME2_ASPNC RecName: Full=Mitochondrial escape protein 2; Flags: Precursor gi|134076564|emb|CAK39755.1|
  misc_feature (52)..(834): NCBI GI: 121702327 Blast Desc: ACLA_027240 [Aspergillus clavatus NRRL 1] gi|119397571|gb|EAW08002.1| ACLA_027240 [Aspergillus clavatus NRRL 1]
  misc_feature (31)..(836): NCBI GI: 259484582 Blast Desc: TPA: RNA12 protein, (AFU_orthologue; AFUA_1G07350) [Aspergillus nidulans FGSC A4]
  misc_feature (31)..(834): NCBI GI: 67537934 Blast Desc: AN5137.2 [Aspergillus nidulans FGSC A4] gi|40743128|gb|EAA62318.1| AN5137.2 [Aspergillus nidulans FGSC A4]
  misc_feature (97)..(820): NCBI GI: 225683014 Blast Desc: conserved [Paracoccidioides brasiliensis Pb03]
  misc_feature: Useful for introducing or modulating the production of volatile compounds
MAARHMSGRIRPLTRCPRLTPRQLGTPLWQTTRWNSTETGGKKSGHIEAASNESILWFDRLYPLKLSGLLRLPWLNPESNISELTRRFERSSLGIMDPMNLVKRALKPDLPIDVTEIVPRIKDGGAFVKFTRPAGISPREIEEAVTKELANNPVKPIFSPFRAVQAGLVQGIPWLEDLHRFPKTRLRIEFVPPNPGEEAVELSQEHLYSLFRRYGKIAEITSQPWDSKIVPKFAYVDFSFIRDAIMARNCLHGFVVSEELGGGKLGTKFRISYEQRANPHKIWDWITNHPRIVIPVLVALLTGVTVVVFDPIRSFFVEAHVSKKFRLSNSRLYRWLRKQTSHVFTFKRERAEQVGLNAVWTHRKDLIEQIQTWLVETAETFIVVQGPRGSGKRELVLEQALKDRRNVLVIDCKNIVEGRGESGVIKKMASEVGYRPIFSWANSMSSMIDLAIQGTTGVKAGFSETLDSQLEKILETTAGALQTLDLEGRSKHDVDASVPADAYLDAHPERRAVVVIDNFEPRSDNNAIVYDKLADWASTLVQTNTAHVIFLTRDASYTKTLTKVLPDRVFRHAALGDLSSDVAKRYVLSHVTADDPEPEASDDESENKAAKPRPKLAGLDDCIETLGGRLTDLEFLARRIKAGLSPKQAVSEITEESASEILKMFLILGRATTDGEHSWSIEQAWYLIKALSKREALGYSEVLQSNTFALSLSCPDGKAALEGLANSDLITLQTRHGRPQSISVGKPVYQAAFRFLTSDSVLTAEMDLAVLTELAKIEARNIEKAEAELSVLASWPKQPAETTDRVAYLLAKLETAQKKVRDLEKEMSPIKKVLATS

SEQ ID NO: 10014 - DNA, 2765 bp, Muscodor strobelii
  misc_feature: SGI EST ID NO. CUFF.23671.0
  misc_feature: Variant of the nucleotide sequence at SEQ ID NO 10012
gtcagccctaatatcacctccgtcctatgtgtctttggtcagaaatggctgcaagacatatgtcgggccgcataaggcctttgacaagatgtcctcgtctcacgcctcgtcaattgggcacaccactgtggcagacaacaagatggaactcgacggagacgggtgggaagaaaagcggccacatagaggcagcttctaatgagtcgatactttggtttgaccgactgtacccactcaagctttccggtcttctgcgactaccatggctcaaccccgagagcaacatatccgaattgaccaggagattcgaaaggtcaagcctggggatcatggacccgatgaacctagtcaaacgagccctaaaacccgaccttcccatcgacgtgaccgagattgtccctagaatcaaagacggaggcgcatttgttaaattcacacgtcccgccggtatctcgccccgtgagatagaagaggctgttactaaggagctcgccaacaatcccgtcaagcccatattcagcccgtttcgcgcagttcaggctggcctggtgcaaggcattccttggcttgaggatctgcatagatttcccaagaccagactgcgcatcgagttcgtgccaccaaacccgggtgaagaagccgtggaactttcacaggagcacctatacagcctatttcgtagatatggcaagatcgctgaaatcacatctcagccgtgggactccaagatcgtaccgaaattcgcttatgtcgacttctcattcattagagacgccataatggctcggaattgccttcatggctttgtggtgtccgaggaactcggcggcggcaagctaggcaccaagttccgcatttcgtatgagcaacgggccaatcctcacaagatatgggactggatcacgaaccacccgcgcatcgtcatccctgtcctcgtagcgcttctcacgggtgttactgttgtcgtttttgatcccatccgctctttctttgttgaggcccacgtttccaagaaatttcgtctatccaacagcaggttatacaggtggctccgaaaacagacttctcacgtatttacatttaagcgggaaagggcggagcaggtcggcctaaatgccgtatggactcaccgcaaggacttgattgagcagatacagacttggcttgtcgaaactgctgaaacatttattgtggttcaaggtccccgaggatcgggaaagcgagaacttgtcctggaacaggccctcaaggatagacgcaatgtccttgtaattgattgcaagaatatcgttgaaggtcgaggcgaatccggcgttattaagaagatggcctctgaggttgggtaccggcctatcttctcatgggcaaatagcatgagcagtatgattgatcttgctattcaaggcacaactggggtcaaggcaggcttttccgagacgctggattcgcaattggaaaagatcctggaaacaacagctggagctctgcaaacgcttgacttggagggtcgatcaaaacacgacgtagacgcttcagtgccggctgacgcttatttggacgcgcatccggagaggcgagctgtggttgtgatcgacaattttgagccccggagcgataacaatgccatcgtgtacgacaagctcgcagactgggcttccacgttggttcagacaaataccgcacatgtgattttcttgaccagggatgcttcttataccaagacattgaccaaggtcctgcctgaccgtgttttccgccatgctgcactcggcgatctttcttccgatgttgcaaaacgatacgtcctcagccatgtcacggctgatgatcccgaaccagaggcgtctgatgacgagtcagaaaacaaggcggccaaacctcgtcctaagctagctggtttggatgactgtatcgaaaccctcggcggccgtctcacagacctcgagtttcttgcccgacgcataaaggctggcctgtcgcctaaacaagccgtctctgaaatcacagaggagtctgcctccgaaattctgaagatgttcctcatactcggcagagctaccacggacggtgaacactcctggtcgatagaacaagcttggtacctcatcaaggccctctcaaaacgtgaagcattgggatatagtgaagttcttcaatccaacacattcgctctctccctcagctgtcccgacggaaaagccgcgcttgaaggactcgccaattcagacctaattacgctacaaacccgccatggccgaccacagagtatcagcgttgggaagcccgtatatcaagctgcgttccgcttcctgacttcggattctgtcctcactgcggaaatggaccttgcggtgctcaccgaacttgcaaagatagaggccaggaacattgagaaggcggaagctgaactttcagtccttgcgtcgtggcccaaacagcctgccgaaactacggatcgagttgcttatctgctggctaagctcgagacggcccagaaaaaggtcagggatctcgaaaaagagatgtcacccatcaagaaggtgcttgcgacgtcttaactctatcggatgaatgggctgacggtggtgttgtaaatacactcataacgggctacggagaacggctggtggaagggctggcttgtagggcataacgttacctagatacccatctccttattgttattaatattgatgtataactatcactacttggaaaactcctcttccatgacgtgatagatgccgtaacaactaataaatcgc

SEQ ID NO: 10015 - DNA, 1236 bp, Muscodor strobelii
  misc_feature: SGI cDNA ID NO. 563159
  misc_feature: Elevated expression when VOC is produced
  misc_feature: Encodes the peptide sequence at SEQ ID NO 10016
atgattcaaccagatgaaagattcgtgtcggagggtcaatgctacttgggtccaaacgaaaaccccaaaacagaggcccattgcaatgtctgggactgggatcagctccgaatgatcaaaataaaaggcaccgcacaaatcttcccgcctgatgaagacctggaagtaccaatattggcaagttttgtcgattatttggcacctcaagttcaggccgtttcggttgacaatgacggtctcattacccaagtctgcacggatcctgaagaggatgatactgaatttgttggatatcttcctttctcaatggcagaatcactacacggttgtcaaatagttcggcactctcaactgaaagagctcgaccgacttggaccaggtgtcgatcgttcatcatactgtgatcaatcgcagcatgttcaagacgtcgctttcaaattcaatccactcggcaaagaggtacgcatacagatggcttgggacgaactacaagcttataggagtctgccgccgcatccaaatctcgtcccacttgatcgtgtagttctcgaagacaaagagttacgaataatcggatttacaacaaaattcattccaggcgggacgtttgaggacttaacgaaacctttccgcgttcaacacttgaaagatcttatccaacttgttgatttcctaaatctagacctcggaatcatgcatcaggacattgcacctcgcaatctcttttcggatcctgaaacagagaagatccttctgtttgatttcgactgggtttctcatggcgaaaagggtttacttgagggtcgtgacgatgtcattggtgttgcgctgacattatatgagctgatcacgggcgacgaccagttcatgcatatcccacactgggaacgaaacgtcgagatgatacaaaatgtatcagattggccctgcaagcgcgaacttgacgccgatgtgtcgacgtttcgccagattctaaatgattgggtggctaagagacaagtgggcaacgacatggaaagatacctcaatgcgcctaaccgccttacttggccagatttaccggctgctcctgattatgaagtgccttatgagtctggaacaacacagaacggagatacacgttggagaacgggctctcgactaagacgcactgctatgagaaaggaacagtatgtcttccgatgggagcgaccgccatcgagcagaacaccaaagataggagggagtttatcatga

SEQ ID NO: 10016 - protein, 411 aa, Muscodor strobelii
  misc_feature: SGI Peptide ID NO. 563159
  misc_feature (1)..(403): NCBI GI: 255941746 Blast Desc: Pc16g13430 [Penicillium chrysogenum Wisconsin 54-1255] gi|211586265|emb|CAP94013.1| Pc16g13430 [Penicillium chrysogenum Wisconsin 54-1255]
  misc_feature (1)..(405): NCBI GI: 255940220 Blast Desc: Pc16g05370 [Penicillium chrysogenum Wisconsin 54-1255] gi|211585502|emb|CAP93207.1| Pc16g05370 [Penicillium chrysogenum Wisconsin 54-1255]
  misc_feature (1)..(405): NCBI GI: 154312063 Blast Desc: BC1G_06065 [Botryotinia fuckeliana B05.10] gi|150850715|gb|EDN25908.1| BC1G_06065 [Botryotinia fuckeliana B05.10]
  misc_feature (34)..(338): NCBI GI: 238496241 Blast Desc: conserved [Aspergillus flavus NRRL3357] gi|220694236|gb|EED50580.1| conserved [Aspergillus flavus NRRL3357]
  misc_feature (34)..(338): NCBI GI: 169775137 Blast Desc: [Aspergillus oryzae RIB40] gi|83769899|dbj|BAE60034.1| protein product [Aspergillus oryzae]
  misc_feature (1)..(347): NCBI GI: 156060073 Blast Desc: SS1G_02174 [Sclerotinia sclerotiorum 1980] gi|154699583|gb|EDN99321.1| SS1G_02174 [Sclerotinia sclerotiorum 1980]
  misc_feature (176)..(384): NCBI GI: 242822775 Blast Desc: TSTA_003600 [Talaromyces stipitatus ATCC 10500] gi|218712877|gb|EED12302.1| TSTA_003600 [Talaromyces stipitatus ATCC 10500]
  misc_feature (1)..(399): NCBI GI: 256726562 Blast Desc: NECHADRAFT_39507 [Nectria haematococca mpVI 77-13-4]
  misc_feature (51)..(401): NCBI GI: 256724465 Blast Desc: NECHADRAFT_54750 [Nectria haematococca mpVI 77-13-4]
  misc_feature (63)..(401): NCBI GI: 116195608 Blast Desc: CHGG_04402 [Chaetomium globosum CBS 148.51] gi|88180315|gb|EAQ87783.1| CHGG_04402 [Chaetomium globosum CBS 148.51]
  misc_feature: Useful for introducing or modulating the production of volatile compounds
MIQPDERFVSEGQCYLGPNENPKTEAHCNVWDWDQLRMIKIKGTAQIFPPDEDLEVPILASFVDYLAPQVQAVSVDNDGLITQVCTDPEEDDTEFVGYLPFSMAESLHGCQIVRHSQLKELDRLGPGVDRSSYCDQSQHVQDVAFKFNPLGKEVRIQMAWDELQAYRSLPPHPNLVPLDRVVLEDKELRIIGFTTKFIPGGTFEDLTKPFRVQHLKDLIQLVDFLNLDLGIMHQDIAPRNLFSDPETEKILLFDFDWVSHGEKGLLEGRDDVIGVALTLYELITGDDQFMHIPHWERNVEMIQNVSDWPCKRELDADVSTFRQILNDWVAKRQVGNDMERYLNAPNRLTWPDLPAAPDYEVPYESGTTQNGDTRWRTGSRLRRTAMRKEQYVFRWERPPSSRTPKIGGSLS

SEQ ID NO: 10017 - DNA, 1483 bp, Muscodor strobelii
  misc_feature: SGI EST ID NO. CUFF.23683.0
  misc_feature: Variant of the nucleotide sequence at SEQ ID NO 10015
caacaactcctcatgatgatatcaaatactgctcgcttcgcgagttacttttcctttgcttctcattcataaccaacatcgaaagagcagacattctacattcgcgatgattcaaccagatgaaagattcgtgtcggagggtcaatgctacttgggtccaaacgaaaaccccaaaacagaggcccattgcaatgtctgggactgggatcagctccgaatgatcaaaataaaaggcaccgcacaaatcttcccgcctgatgaagacctggaagtaccaatattggcaagttttgtcgattatttggcacctcaagttcaggccgtttcggttgacaatgacggtctcattacccaagtctgcacggatcctgaagaggatgatactgaatttgttggatatcttcctttctcaatggcagaatcactacacggttgtcaaatagttcggcactctcaactgaaagagctcgaccgacttggaccaggtgtcgatcgttcatcatactgtgatcaatcgcagcatgttcaagacgtcgctttcaaattcaatccactcggcaaagaggtacgcatacagatggcttgggacgaactacaagcttataggagtctgccgccgcatccaaatctcgtcccacttgatcgtgtagttctcgaagacaaagagttacgaataatcggatttacaacaaaattcattccaggcgggacgtttgaggacttaacgaaacctttccgcgttcaacacttgaaagatcttatccaacttgttgatttcctaaatctagacctcggaatcatgcatcaggacattgcacctcgcaatctcttttcggatcctgaaacagagaagatccttctgtttgatttcgactgggtttctcatggcgaaaagggtttacttgagggtcgtgacgatgtcattggtgttgcgctgacattatatgagctgatcacgggcgacgaccagttcatgcatatcccacactgggaacgaaacgtcgagatgatacaaaatgtatcagattggccctgcaagcgcgaacttgacgccgatgtgtcgacgtttcgccagattctaaatgattgggtggctaagagacaagtgggcaacgacatggaaagatacctcaatgcgcctaaccgccttacttggccagatttaccggctgctcctgattatgaagtgccttatgagtctggaacaacacagaacggagatacacgttggagaacgggctctcgactaagacgcactgctatgagaaaggaacagtatgtcttccgatgggagcgaccgccatcgagcagaacaccaaagataggagggagtttatcatgatagacaaatggtcaacggcgcgtgttgacaaataagcaacataaaaaaggcgcaattcgtattatgttccaagtttgccatcaaagaacaacatttacgttgatacaatagtaatagattttcagtgattgaaacttgaca

SEQ ID NO: 10018 - DNA, 933 bp, Muscodor strobelii
  misc_feature: SGI cDNA ID NO. 563160
  misc_feature: Elevated expression when VOC is produced
  misc_feature: Encodes the peptide sequence at SEQ ID NO 10019
atgccgcataggtattgcgaagagcttcgcgaaagtgagcacaagtctagccgcgcggatgcagacccgaatatgttgatttcaaggattggtagacactttgttgacggttacccttcgctagcggcgttcgttgcgagtgacagagatggaagcgcaaccatcttcaagcgcttcaatcgacttgcggcaagaaatctcctcattattcaaagtgagctcgcagaattagaggccaagctagatgcttttgatgaagaagacggaggagcacgtgataccttacaatctttgcgcaactggagcgactacaaacgccgaaaacaaggaagcccagaacgtatggagctagtcagtgacattaagaaagccctgagagaatacagagaagctctcctattcgagtcgacgttagccgcaatcccgggtccggaccgaaagactttaaaagccttcaggatcaaattcttccacggcaagccggaagaaagtagagattggccaatgttaggtggaagtagctcaaccctatacgatgacccagacgacctccttgttttccatgtccctgagcagcgagatcggctcacgatgttcattcaagataattttggatacttatttaaggatgactctatatcaaagttccatcaaagcacgtcaaatgtagactacgcgtcaggacgcaaaattgcatccttcatagcttggcttagcactatactcgctgcaatcctcctaatcggcgctatcgtggtcttgtataacgtcacatcaaataatctcaagctggctctaattgcaatattcaccatcctcttcgctgcgtgcgtcggtcttctgacaaacgcgaaaagatccgagatcttcggctcaacagccgcatatgccgctgtgctggttgttttcgtgagcggaaatctaggtacataa

SEQ ID NO: 10019 - protein, 310 aa, Muscodor strobelii
  misc_feature: SGI Peptide ID NO. 563160
  misc_feature (32)..(310): NCBI GI: 46126473 Blast Desc: FG07614.1 [Gibberella zeae PH-1]
  misc_feature (33)..(310): NCBI GI: 256724957 Blast Desc: NECHADRAFT_91425 [Nectria haematococca mpVI 77-13-4]
  misc_feature (35)..(295): NCBI GI: 169609999 Blast Desc: SNOG_08091 [Phaeosphaeria nodorum SN15] gi|111063247|gb|EAT84367.1| SNOG_08091 [Phaeosphaeria nodorum SN15]
  misc_feature (32)..(304): NCBI GI: 256726540 Blast Desc: NECHADRAFT_79592 [Nectria haematococca mpVI 77-13-4]
  misc_feature (36)..(288): NCBI GI: 169616612 Blast Desc: SNOG_11479 [Phaeosphaeria nodorum SN15] gi|111060067|gb|EAT81187.1| SNOG_11479 [Phaeosphaeria nodorum SN15]
  misc_feature (33)..(305): NCBI GI: 156063086 Blast Desc: SS1G_01659 [Sclerotinia sclerotiorum 1980] gi|154696995|gb|EDN96733.1| SS1G_01659 [Sclerotinia sclerotiorum 1980]
  misc_feature (36)..(310): NCBI GI: 115491261 Blast Desc: [Aspergillus terreus NIH2624] gi|114197118|gb|EAU38818.1| [Aspergillus terreus NIH2624]
  misc_feature (37)..(289): NCBI GI: 256734893 Blast Desc: NECHADRAFT_75615 [Nectria haematococca mpVI 77-13-4]
  misc_feature (36)..(301): NCBI GI: 189196947 Blast Desc: conserved [Pyrenophora tritici-repentis Pt-1C-BFP] gi|187980759|gb|EDU47385.1| conserved [Pyrenophora tritici-repentis Pt-1C-BFP]
  misc_feature (37)..(295): NCBI GI: 256731937 Blast Desc: NECHADRAFT_80821 [Nectria haematococca mpVI 77-13-4]
  misc_feature: Useful for introducing or modulating the production of volatile compounds
MPHRYCEELRESEHKSSRADADPNMLISRIGRHFVDGYPSLAAFVASDRDGSATIFKRFNRLAARNLLIIQSELAELEAKLDAFDEEDGGARDTLQSLRNWSDYKRRKQGSPERMELVSDIKKALREYREALLFESTLAAIPGPDRKTLKAFRIKFFHGKPEESRDWPMLGGSSSTLYDDPDDLLVFHVPEQRDRLTMFIQDNFGYLFKDDSISKFHQSTSNVDYASGRKIASFIAWLSTILAAILLIGAIVVLYNVTSNNLKLALIAIFTILFAACVGLLTNAKRSEIFGSTAAYAAVLVVFVSGNLGT

SEQ ID NO: 10020 - DNA, 1669 bp, Muscodor strobelii
  misc_feature: SGI EST ID NO. CUFF.23708.0
  misc_feature: Variant of the nucleotide sequence at SEQ ID NO 10018
caatcatgcagtgagagatggcgaggtgaactgcaaggcattttcggccatattggtgcagctgacccgacaaaatttggcatacagcccattagatgtgcgaaccctattctgagtccctcatcaactgtaccgattaaattccaactctttcgcagctcgttttactttccacctatgtcacacaacactcggcccagacactttgttgacggttacccttcgctagcggcgttcgttgcgagtgacagagatggaagcgcaaccatcttcaagcgcttcaatcgacttgcggcaagaaatctcctcattattcaaagtgagctcgcagaattagaggccaagctagatgcttttgatgaagaagacggaggagcacgtgataccttacaatctttgcgcaactggagcgactacaaacgccgaaaacaaggaagcccagaacgtatggagctagtcagtgacattaagaaagccctgagagaatacagagaagctctcctattcgagtcgacgttagccgcaatcccgggtccggaccgaaagactttaaaagccttcaggatcaaattcttccacggcaagccggaagaaagtagagattggccaatgttaggtggaagtagctcaaccctatacgatgacccagacgacctccttgttttccatgtccctgagcagcgagatcggctcacgatgttcattcaagataattttggatacttatttaaggatgactctatatcaaagttccatcaaagcacgtcaaatgtagactacgcgtcaggacgcaaaattgcatccttcatagcttggcttagcactatactcgctgcaatcctcctaatcggcgctatcgtggtcttgtataacgtcacatcaaataatctcaagctggctctaattgcaatattcaccatcctcttcgctgcgtgcgtcggtcttctgacaaacgcgaaaagatccgagatcttcggctcaacagccgcatatgccgctgtgctggttgttttcgtgagcggaaatctaggtacataagggcaaagcatggtgaaggggtctctgaggacacaggctattgtattgagttcgagcggcattgtccaggcattttcagtgtcgcaagttttggcatcaccagaatggtatgcagaagttaacccgtatactgggaacgtacctaattgtcagtttgtatatggggcaaggaaatcgacaatcgcgacgtcgagaaacgaagtttgaacagaatacaggtcacagaggtacgaaccatccagagtcacatacagaatttcgaagataaaaggagatgagtgcgtaatgaaaatgttataacgcctcgatgttatgaccttgatgaagagggcgtctaaactgtaactgagtgacctcttattctaaaagctgccgagggcatttaagtctgtctctgattcaataccggctacatcacccgagtcactcattgatacacaagaaatgcagcaagtataaatctatagagagactcttccgacccggcttagaaccggatgaaagaagaatggacgtagtcacaacaatccattggcaggtccaatggattcgcccatcatattcacggataaccagcggctgtcgtacggatgaataatagtgctgtctccatttttctcaagcaagcaag

SEQ ID NO: 10021 - DNA, 1134 bp, Muscodor strobelii
  misc_feature: SGI cDNA ID NO. 563161
  misc_feature: Elevated expression when VOC is produced
  misc_feature: Encodes the peptide sequence at SEQ ID NO 10022
atgccgcataggtattgcgaagagcttcgcgaaagtgagcacaagtctagccgcgcggatgcagacccgaatatgttgatttcaaggattggtagccaatcatgcagtgagagatggcgaggtgaactgcaaggcattttcggccatattggtgcagctgacccgacaaaatttggcatacagcccattagatgtgcgaaccctattctgagtccctcatcaactgtaccgattaaattccaactctttcgcagctcgttttactttccacctatgtcacacaacactcggcccagacactttgttgacggttacccttcgctagcggcgttcgttgcgagtgacagagatggaagcgcaaccatcttcaagcgcttcaatcgacttgcggcaagaaatctcctcattattcaaagtgagctcgcagaattagaggccaagctagatgcttttgatgaagaagacggaggagcacgtgataccttacaatctttgcgcaactggagcgactacaaacgccgaaaacaaggaagcccagaacgtatggagctagtcagtgacattaagaaagccctgagagaatacagagaagctctcctattcgagtcgacgttagccgcaatcccgggtccggaccgaaagactttaaaagccttcaggatcaaattcttccacggcaagccggaagaaagtagagattggccaatgttaggtggaagtagctcaaccctatacgatgacccagacgacctccttgttttccatgtccctgagcagcgagatcggctcacgatgttcattcaagataattttggatacttatttaaggatgactctatatcaaagttccatcaaagcacgtcaaatgtagactacgcgtcaggacgcaaaattgcatccttcatagcttggcttagcactatactcgctgcaatcctcctaatcggcgctatcgtggtcttgtataacgtcacatcaaataatctcaagctggctctaattgcaatattcaccatcctcttcgctgcgtgcgtcggtcttctgacaaacgcgaaaagatccgagatcttcggctcaacagccgcatatgccgctgtgctggttgttttcgtgagcggaaatctaggtacataa

SEQ ID NO: 10022 - protein, 377 aa, Muscodor strobelii
  misc_feature: SGI Peptide ID NO. 563161
  misc_feature (95)..(377): NCBI GI: 46126473 Blast Desc: FG07614.1 [Gibberella zeae PH-1]
  misc_feature (97)..(377): NCBI GI: 256724957 Blast Desc: NECHADRAFT_91425 [Nectria haematococca mpVI 77-13-4]
  misc_feature (102)..(362): NCBI GI: 169609999 Blast Desc: SNOG_08091 [Phaeosphaeria nodorum SN15] gi|111063247|gb|EAT84367.1| SNOG_08091 [Phaeosphaeria nodorum SN15]
  misc_feature (99)..(371): NCBI GI: 256726540 Blast Desc: NECHADRAFT_79592 [Nectria haematococca mpVI 77-13-4]
  misc_feature (103)..(355): NCBI GI: 169616612 Blast Desc: SNOG_11479 [Phaeosphaeria nodorum SN15] gi|111060067|gb|EAT81187.1| SNOG_11479 [Phaeosphaeria nodorum SN15]
  misc_feature (100)..(372): NCBI GI: 156063086 Blast Desc: SS1G_01659 [Sclerotinia sclerotiorum 1980] gi|154696995|gb|EDN96733.1| SS1G_01659 [Sclerotinia sclerotiorum 1980]
  misc_feature (103)..(377): NCBI GI: 115491261 Blast Desc: [Aspergillus terreus NIH2624] gi|114197118|gb|EAU38818.1| [Aspergillus terreus NIH2624]
  misc_feature (104)..(356): NCBI GI: 256734893 Blast Desc: NECHADRAFT_75615 [Nectria haematococca mpVI 77-13-4]
  misc_feature (103)..(368): NCBI GI: 189196947 Blast Desc: conserved [Pyrenophora tritici-repentis Pt-1C-BFP] gi|187980759|gb|EDU47385.1| conserved [Pyrenophora tritici-repentis Pt-1C-BFP]
  misc_feature (93)..(362): NCBI GI: 256731937 Blast Desc: NECHADRAFT_80821 [Nectria haematococca mpVI 77-13-4]
  misc_feature: Useful for introducing or modulating the production of volatile compounds
MPHRYCEELRESEHKSSRADADPNMLISRIGSQSCSERWRGELQGIFGHIGAADPTKFGIQPIRCANPILSPSSTVPIKFQLFRSSFYFPPMSHNTRPRHFVDGYPSLAAFVASDRDGSATIFKRFNRLAARNLLIIQSELAELEAKLDAFDEEDGGARDTLQSLRNWSDYKRRKQGSPERMELVSDIKKALREYREALLFESTLAAIPGPDRKTLKAFRIKFFHGKPEESRDWPMLGGSSSTLYDDPDDLLVFHVPEQRDRLTMFIQDNFGYLFKDDSISKFHQSTSNVDYASGRKIASFIAWLSTILAAILLIGAIVVLYNVTSNNLKLALIAIFTILFAACVGLLTNAKRSEIFGSTAAYAAVLVVFVSGNLGT

SEQ ID NO: 10023 - DNA, 1669 bp, Muscodor strobelii; identical to SEQ ID NO: 10020
  misc_feature: SGI EST ID NO. CUFF.23708.0
  misc_feature: Variant of the nucleotide sequence at SEQ ID NO 10021

SEQ ID NO: 10024 - DNA, 1482 bp, Muscodor strobelii
  misc_feature: SGI cDNA ID NO. 563162
  misc_feature: Elevated expression when VOC is produced
  misc_feature: Encodes the peptide sequence at SEQ ID NO 10025
atgaaagtccgaaggcgatacaaacttccgcttataatcgagactcttgcgggtaactccgagatcatggcgctccctgacagcggttcggatgaaaacatcatctctttggacctagtacgcagaataggattaagcttggcacacattgatcaaggaggcactaccttcacattggcaaacggcaagaccgttcaatcaatgggacatgttacaactaagcttacatttgcaagcaatctagctacctctccaagcctcgctattgattgtctgttccatgttttcagcacgctggctgtcccgctcatcgttggaatgggatttttggaggagacagaaacgttaacccggcatcgagatcgacttgtcgaggagttggtgccttcaatgcaggctcttagcgtcagcggtattgggaattctcaaagacaaatgctttgtaaattgaatggtcatactacttatgcaacagccgatacaggatctgatcttgatctcgttagcccagcgtttgcgacttcgatggacttccacattatgccagcttttgagaaaattgagttcgcagacggtagctttggcacgacatgcggagtgattgaggcgaagtttacgatgccatgtattgggctggtacaggcgccgaacggtatcgatcgcgatttctacattctagacgacttaacttcgtctgtagtagtcggagttgatacactagaggagctcaagattttcagtcaccatgcagggtctctgacctccgcatacctcagaagtggcttctccgatttgaatatcatccgccatgtaggcaaactcgagagtaactgcaaagaaatttggagagccttcaaggagcgatttggaataaccgtcaaaagtaacacaggcattgaagatctgcgcgagctacaggaagacatcttacttgccgaccagcgtgagaatgcccgccgcgaacagaatataaatcatatctcaacacttgaaggaaccgcaagaggcttagcccaggctgcagaagaccaaaggattagtagttacgagatacaacgccaagaacgcctcttgaggctcaggcagacaccagtcgaaccaaacggcgaatttgtttgtacttttcagggatgtaacgcgcctccattccagactcagtatcttctcaactcgcacgccaatgtacatacttctactcgcccacactattgcccggtcgaaggatgccccagggcagaaggtggaaaaggattcaagcgcaagaatcagatgattcgtcattcgctcgtacacgactcaccgggttatatttgcccattctgtctcgatagagaacataaatatccacgaccggacaatcttcagaggcatgtgcgagtgcatcatattgataaagataaggatgatccagctctcgtagaagtcctgagcaagcgtccagatgggccaaacaggggacgaaggcgaagagaggcgccataa

SEQ ID NO: 10025 - protein, 493 aa, Muscodor strobelii
  misc_feature: SGI Peptide ID NO. 563162
  misc_feature (2)..(483): NCBI GI: 256724849 Blast Desc: NECHADRAFT_76965 [Nectria haematococca mpVI 77-13-4]
  misc_feature (4)..(401): NCBI GI: 46126475 Blast Desc: FG07615.1 [Gibberella zeae PH-1]
  misc_feature (369)..(481): NCBI GI: 171685992 Blast Desc: protein product [Podospora anserina] gi|170942957|emb|CAP68610.1| protein product [Podospora anserina]
  misc_feature (317)..(481): NCBI GI: 46122007 Blast Desc: FG05381.1 [Gibberella zeae PH-1]
  misc_feature (364)..(481): NCBI GI: 256729772 Blast Desc: NECHADRAFT_47170 [Nectria haematococca mpVI 77-13-4]
  misc_feature (369)..(481): NCBI GI: 85083485 Blast Desc: NCU06487 [Neurospora crassa OR74A] gi|28918213|gb|EAA27891.1| [Neurospora crassa OR74A]
  misc_feature (365)..(490): NCBI GI: 115388387 Blast Desc: [Aspergillus terreus NIH2624] gi|114195783|gb|EAU37483.1| [Aspergillus terreus NIH2624]
  misc_feature (368)..(490): NCBI GI: 169766658 Blast Desc: [Aspergillus oryzae RIB40] gi|83765655|dbj|BAE55798.1| protein product [Aspergillus oryzae]
  misc_feature (367)..(490): NCBI GI: 255951352 Blast Desc: Pc22g25580 [Penicillium chrysogenum Wisconsin 54-1255] gi|211593460|emb|CAP99846.1| Pc22g25580 [Penicillium chrysogenum Wisconsin 54-1255]
  misc_feature (369)..(483): NCBI GI: 156051178 Blast Desc: SS1G_06996 [Sclerotinia sclerotiorum 1980] gi|154704774|gb|EDO04513.1| SS1G_06996 [Sclerotinia sclerotiorum 1980]
  misc_feature: Useful for introducing or modulating the production of volatile compounds
MKVRRRYKLPLIIETLAGNSEIMALPDSGSDENIISLDLVRRIGLSLAHIDQGGTTFTLANGKTVQSMGHVTTKLTFASNLATSPSLAIDCLFHVFSTLAVPLIVGMGFLEETETLTRHRDRLVEELVPSMQALSVSGIGNSQRQMLCKLNGHTTYATADTGSDLDLVSPAFATSMDFHIMPAFEKIEFADGSFGTTCGVIEAKFTMPCIGLVQAPNGIDRDFYILDDLTSSVVVGVDTLEELKIFSHHAGSLTSAYLRSGFSDLNIIRHVGKLESNCKEIWRAFKERFGITVKSNTGIEDLRELQEDILLADQRENARREQNINHISTLEGTARGLAQAAEDQRISSYEIQRQERLLRLRQTPVEPNGEFVCTFQGCNAPPFQTQYLLNSHANVHTSTRPHYCPVEGCPRAEGGKGFKRKNQMIRHSLVHDSPGYICPFCLDREHKYPRPDNLQRHVRVHHIDKDKDDPALVEVLSKRPDGPNRGRRRREAP

SEQ ID NO: 10026 - DNA, 2294 bp, Muscodor strobelii
  misc_feature: SGI EST ID NO. CUFF.23722.0
  misc_feature: Variant of the nucleotide sequence at SEQ ID NO 10024
caaaaatacaaacctaccaatccttgaaatcaacatattcgggtctgcatccgcgcggctagacttgtgctcactttcgcgaagctcttcgcaatacctatgcggcatcgtgaaatggagtatgatcctgttttatatgaccatgacgatggctttatactcggatcgcctttactggagcctttccgccctaagttttctgatgacgatcgctcagggcaacagttcaatctgagacatgctggccttgttgatgattggagccaaagcccaggagttctcgagatgaatattgacgacgacgatgatgatacaattttcaaggacagtgatagcgactttaagagaagagcaagcgttactagcagtaaccacttttcgggcgtatctcttgtcgtatcgccgccgaaagcgagaacttcatcattagatcacatcgaccgtgatcgcaacagtttatcttcggacctaccgctacataagcctgagaatcgattgacagtatcaccaatatcgcctgataccctggctatggaactcaggggtctattgacccccccagtgttgaccccattaggctctccaaaaataaacgccctcactgcaggaacctatacacgcaagttgcgaaagatgaaagtccgaaggcgatacaaacttccgcttataatcgagactcttgcgggtaactccgagatcatggcgctccctgacagcggttcggatgaaaacatcatctctttggacctagtacgcagaataggattaagcttggcacacattgatcaaggaggcactaccttcacattggcaaacggcaagaccgttcaatcaatgggacatgttacaactaagcttacatttgcaagcaatctagctacctctccaagcctcgctattgattgtctgttccatgttttcagcacgctggctgtcccgctcatcgttggaatgggatttttggaggagacagaaacgttaacccggcatcgagatcgacttgtcgaggagttggtgccttcaatgcaggctcttagcgtcagcggtattgggaattctcaaagacaaatgctttgtaaattgaatggtcatactacttatgcaacagccgatacaggatctgatcttgatctcgttagcccagcgtttgcgacttcgatggacttccacattatgccagcttttgagaaaattgagttcgcagacggtagctttggcacgacatgcggagtgattgaggcgaagtttacgatgccatgtattgggctggtacaggcgccgaacggtatcgatcgcgatttctacattctagacgacttaacttcgtctgtagtagtcggagttgatacactagaggagctcaagattttcagtcaccatgcagggtctctgacctccgcatacctcagaagtggcttctccgatttgaatatcatccgccatgtaggcaaactcgagagtaactgcaaagaaatttggagagccttcaaggagcgatttggaataaccgtcaaaagcattgaagatctgcgcgagctacaggaagacatcttacttgccgaccagcgtgagaatgcccgccgcgaacagaatataaatcatatctcaacacttgaaggaaccgcaagaggcttagcccaggctgcagaagaccaaaggattagtagttacgagatacaacgccaagaacgcctcttgaggctcaggcagacaccagtcgaaccaaacggcgaatttgtttgtacttttcagggatgtaacgcgcctccattccagactcagtatcttctcaactcgcacgccaatgtacatacttctactcgcccacactattgcccggtcgaaggatgccccagggcagaaggtggaaaaggattcaagcgcaagaatcagatgattcgtcattcgctcgtacacgactcaccgggttatatttgcccattctgtctcgatagagaacataaatatccacgaccggacaatcttcagaggcatgtgcgagtgcatcatattgataaagataaggatgatccagctctcgtagaagtcctgagcaagcgtccagatgggccaaacaggggacgaaggcgaagagaggcgccataaacagctatgagaagctgtctaagccgtacagggatttgacgagattatttatatctgtattcaactgtggtcttttatccatattacctctgtctcgaaatatgtagaaaacatgcgcatcttcgctcgaaagtgtctgtgtgtagtgggtattataaagttgtgaataccaaaataatagaccgaga

SEQ ID NO: 10027 - DNA, 999 bp, Muscodor strobelii
  misc_feature: SGI cDNA ID NO. 563163
  misc_feature: Encodes the peptide sequence at SEQ ID NO 10028
atgtcttcgttcacgcaattttccgccggtcctatcggttttggactcatgggtatgacatggcgcgcccatcagactcccgatgagcaagcctttgcagcaatgaaagccgccattgcgaatggagccacggcatggtctactgccggcttttacggtagccagagtgatcccttgggcggaatcaaactggtgtctcgctacttcgccaaatacccagaagacgcttcaaaagtgaccatctacgtcaagggttgctttgatcctgcaacgacgcaacctgtcaccagccgtgccactacccgtgctagcgtggatgagatcctggctgctttgggtggcaccaagaaactcgacttcttcggtcccgctcgtgttgatccgagcgtaccactagaagagacttttacagagttgaaagccttgatgaatgagggaaagatcggtggagtcttcctatctgaggtcggtgccgagacgatcaagaaggctcatgcaatcttgccgctcagtgctgtggaggttgagttctcgctttggagtacagagattctcaccaatggtgttgctgcaatcactaaggctctgggcattcctatactcgcgtactctcctctaggtcgcggtttccttactggtcagcttaagagggtagaggacatccctgctggcgatattcgcgtgtatctcgatcgcttccagcctgagaacttcgacaagaatctgcatctcgtagacaagctcaacgcgttcgctgagaagaagggcgtgacgactcctcagttggctttgagctggatcttagcaattagcgagtctggggaggctggaaagattgtgccagttccaggtgccacgactgaaacccgtgttcatgagaacacccggaaggtcaccatgtcgcaggatgaaaagaaggaactggacgatattctagcatccataggaatagttggtgggcgctacaaccagatgctcgaggggactctgtggggttga

SEQ ID NO: 10028 - protein, 332 aa, Muscodor strobelii
  misc_feature: SGI Peptide ID NO. 563163
  misc_feature (7)..(313): Pfam Id: PF00248 Pfam Desc: Aldo/keto reductase family
  misc_feature (13)..(332): NCBI GI: 240111301 Blast Desc: pyridoxal reductase, [Coccidioides posadasii C735 delta SOWgp]
  misc_feature (13)..(332): NCBI GI: 238484263 Blast Desc: pyridoxal reductase, [Aspergillus flavus NRRL3357] gi|220701420|gb|EED57758.1| pyridoxal reductase, [Aspergillus flavus NRRL3357]
  misc_feature (13)..(332): NCBI GI: 169767398 Blast Desc: [Aspergillus oryzae RIB40] gi|83766025|dbj|BAE56168.1| protein product [Aspergillus oryzae]
  misc_feature (13)..(331): NCBI GI: 171681437 Blast Desc: protein product [Podospora anserina] gi|170940677|emb|CAP65905.1| protein product [Podospora anserina]
  misc_feature (13)..(321): NCBI GI: 115391179 Blast Desc: [Aspergillus terreus NIH2624] gi|114194018|gb|EAU35718.1| [Aspergillus terreus NIH2624]
  misc_feature (3)..(321): NCBI GI: 50554955 Blast Desc: YALI0F02013p [Yarrowia lipolytica] gi|49650756|emb|CAG77688.1| YALI0F02013p [Yarrowia lipolytica]
  misc_feature (13)..(237): NCBI GI: 119189273 Blast Desc: CIMG_04684 [Coccidioides immitis RS]
  misc_feature (10)..(327): NCBI GI: 115492031 Blast Desc: conserved [Aspergillus terreus NIH2624] gi|114197503|gb|EAU39203.1| conserved [Aspergillus terreus NIH2624]
  misc_feature (7)..(330): NCBI GI: 1749618 Blast Desc: protein product [Schizosaccharomyces pombe] gi|3869092|dbj|BAA34350.1| pyridoxal reductase [Schizosaccharomyces pombe]
  misc_feature (1)..(330): NCBI GI: 19115496 Blast Desc: pyridoxal reductase [Schizosaccharomyces pombe 972h-] gi|24638123|sp|O14295.1|PLR1_SCHPO RecName: Full=Pyridoxal reductase; Short=PL reductase; Short=PL-red pyridoxal reductase
  misc_feature (1)..(330): SWISSPROT Homolog: EC 1.1.1.65 Pyridoxine 4-dehydrogenase
MSSFTQFSAGPIGFGLMGMTWRAHQTPDEQAFAAMKAAIANGATAWSTAGFYGSQSDPLGGIKLVSRYFAKYPEDASKVTIYVKGCFDPATTQPVTSRATTRASVDEILAALGGTKKLDFFGPARVDPSVPLEETFTELKALMNEGKIGGVFLSEVGAETIKKAHAILPLSAVEVEFSLWSTEILTNGVAAITKALGIPILAYSPLGRGFLTGQLKRVEDIPAGDIRVYLDRFQPENFDKNLHLVDKLNAFAEKKGVTTPQLALSWILAISESGEAGKIVPVPGATTETRVHENTRKVTMSQDEKKELDDILASIGIVGGRYNQMLEGTLWG

SEQ ID NO: 10029 - DNA, 2205 bp, Muscodor strobelii
  misc_feature: SGI cDNA ID NO. 563164
  misc_feature: Encodes the peptide sequence at SEQ ID NO 10030
atggcgcctgataggggacaaaacacaggtgatctgcgcgaagtagacaccgggatcgatgacgatgaggtatacccgtcggcacatggcaaagtccttccagaaggccaccacttcacgattcgtggtgttgcagctggtttgctcgtcggtcttataatatgtttttccaacatgtattttgggctacaaaccggctggatcagcacgatgacgatgcccgcaagtcttctaggatttggtatctttcggaccctgtcccgtcacttgagctttccattctcgcctgtcgagaatgtgctcgtgcagtcggtcgccggaggtatggcggttatgccgctgagttgcggctttgtcggagtgttaccggctatggaatacatgcttgattcatccgagcagggtccgatacgtctgagcatgtggaagctgataatctggtctctcggtctttgttacttcggcgttgtcttcgtcgtccctctacgacgccaagtcatcataagagagcagcttaagtttcctagcggctttagcaccgctgtgctgataggtattctgcacggcaagggtcatacccagaacgacaatgctctggattcgtccaaagctgctacatttggtagtcttgctcttgagaacagacctttaatggaagctcaagatgcaaatgatgaggaagaccgtgccgaccctgcttccacgattacgcagggaaagaaaaatgactggggccataatattaagctgttactaattgcctttggtatctctggtatctatacgtttttgcaatatttcttcccaattctacgccaattgcctatttttggcacggtcgctgctgaaacttgggtatggacactcaatccgagttttgcctatgttggccagggtatcataatgggaccttcgacgacaatacacatgctcaccggcgcaatcgttggctggggcatcttgtcacctttagcgaaatatcgcgggtgggctcctggaccacctggtgattgggaaaccgggagtaaaggatggatcgtctgggtttcgctggctatcatgttggcggattctgtcgtcagcttgggatatctagcctttcgtcctctgatacagcatgggccagagctgctcacggcaggcaaacggatatatgatcgggagggcctcaaaggtctttttcggcgccaaccacacggttacgttgctgtgcgtaatgacgagggcgtatcgacccagacctcaacaggaagcagggaggcttatggtagcttaccgagcccaggagttgaacgagataacccgtttgaggcgcaatctattgatgaaccacgagcttgggatcaagatgacgctcctccagagcagctggttggaggtaaaattgtgagcattggactagtggtctcgattcttgtctgcgttattagtatccacatcacatttggtgacctcgtaccactttacgcgacgatcatctccgtgttcatggcaatgcttctcagtattatggcagtcagggcattgggagagacagacttgaaccctgtttcagggattagcaagctggcacaactcttcttcgggctcatcatcccccagtctaacaaagccagcgtgctcatcaatctcattgctggcgcagtgtctgaagcaggagccatgcaagctggtgatctgatgcaggacctgaagactggtcatctgctcggtgcggcgcctaaagcccagttctggggtcagatcattggggccactgttggtgccgtggtcagcgcctttatctacagactctacacgaccgtctacgagattccaagcgacttgttccaagtcccaacagcgtctgtatggatcaagaccgcgagactggtgacaggccaggacctgccatacatggccagagacttcgcgatgggtgcggctgccatttttgcagtgctcactatcttgcgtacatggggtgcggggaagaaatgggtcgattatatccctggcggcattgctgttgctgttggtatgtataacgtgccatcatttaccctggcgaggactattggtggaatcatgaactggtattggagagtccatctggggaaagaggacacacctcttatcgtactagcatcgggctttattttaggcgaaggattcttgagtattgtgactctactattgcaaagtgctcacgttccgcatttgtag

SEQ ID NO: 10030 - protein, 734 aa, Muscodor strobelii
  misc_feature: SGI Peptide ID NO. 563164
  misc_feature (38)..(727): Pfam Id: PF03169 Pfam Desc: OPT oligopeptide transporter protein
  misc_feature (20)..(734): NCBI GI: 238489121 Blast Desc: oligopeptide transporter, OPT family, [Aspergillus flavus NRRL3357] gi|220698186|gb|EED54526.1| oligopeptide transporter, OPT family, [Aspergillus flavus NRRL3357]
  misc_feature (6)..(734): NCBI GI: 240108468 Blast Desc: small oligopeptide transporter, OPT family protein [Coccidioides posadasii C735 delta SOWgp]
  misc_feature (6)..(734): NCBI GI: 119186699 Blast Desc: CIMG_03397 [Coccidioides immitis RS]
  misc_feature (21)..(734): NCBI GI: 119495213 Blast Desc: oligopeptide transporter, OPT family, [Neosartorya fischeri NRRL 181] gi|119412558|gb|EAW22499.1| oligopeptide transporter, OPT family, [Neosartorya fischeri NRRL 181]
  misc_feature (4)..(734): NCBI GI: 238837764 Blast Desc: oligonucleotide transporter [Microsporum canis CBS 113480]
  misc_feature (6)..(734): NCBI GI: 115492063 Blast Desc: ATEG_00573 [Aspergillus terreus NIH2624] gi|114197519|gb|EAU39219.1| ATEG_00573 [Aspergillus terreus NIH2624]
  misc_feature (37)..(734): NCBI GI: 70995954 Blast Desc: oligopeptide transporter, OPT family [Aspergillus fumigatus Af293] gi|20145239|emb|CAD29596.1| oligonucleotide transporter [Aspergillus fumigatus] gi|66850367|gb|EAL90694.1|
  misc_feature (37)..(734): NCBI GI: 145240277 Blast Desc: An08g06700 [Aspergillus niger] gi|134077300|emb|CAK45640.1| protein product [Aspergillus niger]
  misc_feature (4)..(734): NCBI GI: 121701255 Blast Desc: oligopeptide transporter, OPT family, [Aspergillus clavatus NRRL 1] gi|119397035|gb|EAW07466.1| oligopeptide transporter, OPT family, [Aspergillus clavatus NRRL 1]
  misc_feature (11)..(734): NCBI GI: 255937325 Blast Desc: Pc13g12740 [Penicillium chrysogenum Wisconsin 54-1255] gi|211584309|emb|CAP92343.1| Pc13g12740 [Penicillium chrysogenum Wisconsin 54-1255]
MAPDRGQNTGDLREVDTGIDDDEVYPSAHGKVLPEGHHFTIRGVAAGLLVGLIICFSNMYFGLQTGWISTMTMPASLLGFGIFRTLSRHLSFPFSPVENVLVQSVAGGMAVMPLSCGFVGVLPAMEYMLDSSEQGPIRLSMWKLIIWSLGLCYFGVVFVVPLRRQVIIREQLKFPSGFSTAVLIGILHGKGHTQNDNALDSSKAATFGSLALENRPLMEAQDANDEEDRADPASTITQGKKNDWGHNIKLLLIAFGISGIYTFLQYFFPILRQLPIFGTVAAETWVWTLNPSFAYVGQGIIMGPSTTIHMLTGAIVGWGILSPLAKYRGWAPGPPGDWETGSKGWIVWVSLAIMLADSVVSLGYLAFRPLIQHGPELLTAGKRIYDREGLKGLFRRQPHGYVAVRNDEGVSTQTSTGSREAYGSLPSPGVERDNPFEAQSIDEPRAWDQDDAPPEQLVGGKIVSIGLVVSILVCVISIHITFGDLVPLYATIISVFMAMLLSIMAVRALGETDLNPVSGISKLAQLFFGLIIPQSNKASVLINLIAGAVSEAGAMQAGDLMQDLKTGHLLGAAPKAQFWGQIIGATVGAVVSAFIYRLYTTVYEIPSDLFQVPTASVWIKTARLVTGQDLPYMARDFAMGAAAIFAVLTILRTWGAGKKWVDYIPGGIAVAVGMYNVPSFTLARTIGGIMNWYWRVHLGKEDTPLIVLASGFILGEGFLSIVTLLLQSAHVPHL

SEQ ID NO: 10031 - DNA, 3130 bp, Muscodor strobelii
  misc_feature: SGI EST ID NO. CUFF.23728.2
  misc_feature: Variant of the nucleotide sequence at SEQ ID NO 10029
gaaagattgtgccagttccaggtgccacgactgaaacccgtgttcatgagaacacccggaaggtcaccatgtcgcaggatgaaaagaaggaactggacgatattctagcatccataggaatagttggtgggcgctacaaccagatgctcgaggggactctgtggggttgatcgggtcatagtagccaagttatctcatacgcggtagcgccttccatgagaggcattctgatgtcttctttaaagtaagcataagccatatagctgtatcacatcctttcacctttgttgatactgtgatgtgatgaattgaaaataaatggttcctagcaaattacccgggatctccataccctgtgcctctcctgagttcctgatatgtttcgagcaggagtgatggaattggggattggggctgacataggcggtgatgacgcctctggagataatcgaggtcgtttgtaaacgtgtattttcagccatgtcacgttttacacaagggagaaagaccatgtgacgtgacgttggtcatggacaatgagggtcttggcagattccagtgtgtggagccataacgtccgtgtcccgcctcatggtcgtcccgtgatatctccggcttggtcatcatcggaatttatccaccttgatacaagcctctttttccgaatatctgggtttctatctcgataaaagaatactatgtgaacgaagtcatcgagacccgttactttggcgtgtaatccttgcgcgtgcgaccgctggcattatggcgcctgataggggacaaaacacaggtgatctgcgcgaagtagacaccgggatcgatgacgatgaggtatacccgtcggcacatggcaaagtccttccagaaggccaccacttcacgattcgtggtgttgcagctggtttgctcgtcggtcttataatatgtttttccaacatgtattttgggctacaaaccggctggatcagcacgatgacgatgcccgcaagtcttctaggatttggtatctttcggaccctgtcccgtcacttgagctttccattctcgcctgtcgagaatgtgctcgtgcagtcggtcgccggaggtatggcggttatgccgctgagttgcggctttgtcggagtgttaccggctatggaatacatgcttgattcatccgagcagggtccgatacgtctgagcatgtggaagctgataatctggtctctcggtctttgttacttcggcgttgtcttcgtcgtccctctacgacgccaagtcatcataagagagcagcttaagtttcctagcggctttagcaccgctgtgctgataggtattctgcacggcaagggtcatacccagaacgacaatgctctggattcgtccaaagctgctacatttggtagtcttgctcttgagaacagacctttaatggaagctcaagatgcaaatgatgaggaagaccgtgccgaccctgcttccacgattacgcagggaaagaaaaatgactggggccataatattaagctgttactaattgcctttggtatctctggtatctatacgtttttgcaatatttcttcccaattctacgccaattgcctatttttggcacggtcgctgctgaaacttgggtatggacactcaatccgagttttgcctatgttggccagggtatcataatgggaccttcgacgacaatacacatgctcaccggcgcaatcgttggctggggcatcttgtcacctttagcgaaatatcgcgggtgggctcctggaccacctggtgattgggaaaccgggagtaaaggatggatcgtctgggtttcgctggctatcatgttggcggattctgtcgtcagcttgggatatctagcctttcgtcctctgatacagcatgggccagagctgctcacggcaggcaaacggatatatgatcgggagggcctcaaaggtctttttcggcgccaaccacacggttacgttgctgtgcgtaatgacgagggcgtatcgacccagacctcaacaggaagcagggaggcttatggtagcttaccgagcccaggagttgaacgagataacccgtttgaggcgcaatctattgatgaaccacgagcttgggatcaagatgacgctcctccagagcagctggttggaggtaaaattgtgagcattggactagtggtctcgattcttgtctgcgttattagtatccacatcacatttggtgacctcgtaccactttacgcgacgatcatctccgtgttcatggcaatgcttctcagtattatggcagtcagggcattgggagagacagacttgaaccctgtttcagggattagcaagctggcacaactcttcttcgggctcatcatcccccagtctaacaaagccagcgtgctcatcaatctcattgctggcgcagtgtctgaagcaggagccatgcaagctggtgatctgatgcaggacctgaagactggtcatctgctcggtgcggcgcctaaagcccagttctggggtcagatcattggggccactgttggtgccgtggtcagcgcctttatctacagactctacacgaccgtctacgagattccaagcgacttgttccaagtcccaacagcgtctgtatggatcaagaccgcgagactggtgacaggccaggacctgccatacatggccagagacttcgcgatgggtgcggctgccatttttgcagtgctcactatcttgcgtacatggggtgcggggaagaaatgggtcgattatatccctggcggcattgctgttgctgttggtatgtataacgtgccatcatttaccctggcgaggactattggtggaatcatgaactggtattggagagtccatctggggaaagaggacacacctcttatcgtactagcatcgggctttattttaggcgaaggattcttgagtattgtgactctactattgcaaagtgctcacgttccgcatttgtagccatgcgcttgctttgaggagattgtatggagccatactatgaaccttacacaaatcttccataaagcattcagaatatagacatgcaaaatccatagaaatgcaaaaatggagcacccggtagacatggcctatcgtatagacgcaaattgatcacgaa

SEQ ID NO: 10032 - DNA, 852 bp, Muscodor strobelii
  misc_feature: SGI cDNA ID NO. 563165
  misc_feature: Encodes the peptide sequence at SEQ ID NO 10033
atgctgatcaaagagagtcacgctgatgtgcagacaaaggtggatggaaaggaaacttctatgaggatattcactttccaccccactatcccccaatatcccaacgctcgatttccgggcatcgtactatatagcgagatctatcaagtgactggacctgtggcacggttcgcccggcagattgcgggacaaggctacattgttgccgccccttcttcttaccatgacttcatcggaccggaggcgttggcatatgatgagccgggaacaaaccagggcaacgagttgaaaataaagaagacactcccgtcgtacgacgaggacgtccacaagaccattgactacttgcttagcctgccaacgtgcacagggttgatcggcacaacgggtatgtgcctcggtggccatctagctctacgggccagtcttgatccacgaatcagtgcttgcgtcgcctactttgcgacagacgtgcacagccgaacactggggccgtattcagaggccaacacttcggtcgaagccccaggaaacagcaaccacacgatcgacaagctgaacgagatcaagggagaggtcgcaatgattttcggcatcaaggatacacatataccagacgccgggcgagatctcatccgcaagaagctgcgggatgcgggcgttgtgtttagcttccacgagtttgcgtgggcacaacatgctttcatccgcgatgagcttagcaagggccgatatgatccggccatcaccaagatctgctttgaggttctgcttgaattgtttggaagagtgctgaagaacgatttgggggctagagatggagcgccagagaagattgaacatgtatgctaa

SEQ ID NO: 10033 - protein, 283 aa, Muscodor strobelii
  misc_feature: SGI Peptide ID NO. 563165
  misc_feature (27)..(265): Pfam Id: PF01738 Pfam Desc: Dienelactone hydrolase family
  misc_feature (182)..(265): Pfam Id: PF01738 Pfam Desc: Dienelactone hydrolase family
  misc_feature (105)..(153): Pfam Id: PF01738 Pfam Desc: Dienelactone hydrolase family
  misc_feature (1)..(278): NCBI GI: 145605671 Blast Desc: MGG_06957 [Magnaporthe grisea 70-15] gi|145013467|gb|EDJ98108.1| MGG_06957 [Magnaporthe grisea 70-15]
  misc_feature (1)..(283): NCBI GI: 171689932 Blast Desc: protein product [Podospora anserina] gi|170944928|emb|CAP71039.1| protein product [Podospora anserina]
  misc_feature (1)..(283): NCBI GI: 256735360 Blast Desc: [Nectria haematococca mpVI 77-13-4]
  misc_feature (1)..(283): NCBI GI: 46107898 Blast Desc: FG00832.1 [Gibberella zeae PH-1]
  misc_feature (1)..(283): NCBI GI: 212538131 Blast Desc: dienelactone hydrolase family protein [Penicillium marneffei ATCC 18224] gi|210068963|gb|EEA23054.1| dienelactone hydrolase family protein [Penicillium marneffei ATCC 18224]
  misc_feature (1)..(283): NCBI GI: 85110244 Blast Desc: NCU09600 [Neurospora crassa OR74A] gi|28925042|gb|EAA34128.1| NCU09600 [Neurospora crassa OR74A]
  misc_feature (1)..(283): NCBI GI: 242807476 Blast Desc: dienelactone hydrolase family protein [Talaromyces stipitatus ATCC 10500] gi|218715589|gb|EED15011.1| dienelactone hydrolase family protein [Talaromyces stipitatus ATCC 10500]
  misc_feature (1)..(283): NCBI GI: 145238790 Blast Desc: An07g09680 [Aspergillus niger] gi|134076539|emb|CAK39733.1| protein product [Aspergillus niger]
  misc_feature (1)..(283): NCBI GI: 121702371 Blast Desc: dienelactone hydrolase family protein [Aspergillus clavatus NRRL 1] gi|119397593|gb|EAW08024.1| dienelactone hydrolase family protein [Aspergillus clavatus NRRL 1]
  misc_feature (1)..(283): NCBI GI: 119496363 Blast Desc: dienelactone hydrolase family protein [Neosartorya fischeri NRRL 181] gi|119413117|gb|EAW23058.1| dienelactone hydrolase family protein [Neosartorya fischeri NRRL 181]
  misc_feature (1)..(283): SWISSPROT Homolog: EC 3.1.1.45 Carboxymethylenebutenolidase
MLIKESHADVQTKVDGKETSMRIFTFHPTIPQYPNARFPGIVLYSEIYQVTGPVARFARQIAGQGYIVAAPSSYHDFIGPEALAYDEPGTNQGNELKIKKTLPSYDEDVHKTIDYLLSLPTCTGLIGTTGMCLGGHLALRASLDPRISACVAYFATDVHSRTLGPYSEANTSVEAPGNSNHTIDKLNEIKGEVAMIFGIKDTHIPDAGRDLIRKKLRDAGVVFSFHEFAWAQHAFIRDELSKGRYDPAITKICFEVLLELFGRVLKNDLGARDGAPEKIEHVC

SEQ ID NO: 10034 - DNA, 2204 bp, Muscodor strobelii
  misc_feature: SGI EST ID NO. CUFF.24990.4
  misc_feature: Variant of the nucleotide sequence at SEQ ID NO 10032
gtttcaatctctcccaacaccacatttgaaaactccaagacagattaagtgttcaaaatgctgatcaaagagagtcacgctgatgtgcagacaaaggtggatggaaaggaaacttctatgagtaattccactattctatgtgctgtctgagcagtatagaagaagctaattaggagtatagggatattcactttccaccccactatcccccaatatcccaacgcgtaaggaggccgcggatgagttgaaaaacgagcaagctactgacatacgagctcatagtcgatttccgggcatcgtactatatagcgagatctatcaagtgactggacctgtggcacggttcgcccggcagattgcgggacaaggctacattgttgccgccccttcttcttaccatgacttcatcggaccggaggcgttggcatatgatgagccgggaacaaaccagggcaacgagttgaaaataaagaagacactcccgtcgtacgacgaggacgtccacaagaccattgactacttgcttagcctgccaacgtgcacagggttgatcggcacaacgggtatgtgcctcggtggccatctagctctacgggccagtcttgatccacgaatcagtgcttgcgtcgcctactttgcgacagacgtgcacagccgaacactggggccgtattcagaggccaacacttcggtcgaagccccaggaaacagcaaccacacgatcgacaagctgaacgagatcaagggagaggtcgcaatgattttcggcatcaaggatacacatataccagacgccgggcgagatctcatccgcaagaagctgcgggatgcgggcgttgtgtttagcttccacgagtttgcgtgggcacaacatgctttcatccgcgatgagcttagcaagggccgatatgatccggccatcaccaagatctgctttgaggttctgcttgaattgtttggaagagtgctgaagaacgatttgggggctagagatggagcgccagagaagattgaacatgtatgctaaatgtcattctctttggaattagtagagaggccgcagagccacgactattgattttcaagactactgattccaaaactattggacaaaacagacacatgacacctcttgagccttacgcctataagcatgaaacagttaacggtcagttcatgcgctttcttgccagttacctactaggttgcacttggcagagaacagaccgtagagcattgttcacagcctcgtctccaatctgcgaggcaaccaggcagaattgaagttacaaacagaattggtcgggtgtaacggctctgcctcgtgcttgacccctgactggctgactggcggtgtaatgctgttgatgattaccgcgctaccgcgcttatcacatggcatttagttccgtgctgtgcatccagtaatgattgaatcttcttcaatggcaatgtaattggaatctagatagtatttcgagaatgacaatactctgatctggcagccaatttcgtgaaaacataaatgctaactaaagtctgttgcagtttggcagcctgaactgaactaggctcgctaggcatctgtgacgtttgcgctgtggaatttggcggggctgtctcaaagacatgacttggttagggtgaaactctggcacagccgaaccatcacttaggcctttgttcgcagagtaacaagagtttgcaaacgatacaataaggttaagcatctagtctgctggaattgggtgtttgagtgcatctcgacataatccgattcatccctagatggctgtagatatccagactgcctaatgcgtgcgtgccttcaactttttttcttgccaccgggctcgtctgctgtatcgaggtctgcccagcaacgacatagacttgcatgtacctcgatacatgtaccgagttgatgtaattgtgggctcctgaggtcgcctcccagcaactaggctgaggtgcttgcactctctcgcccagaaaattttgcatctgaagctatgaccaatggtagctcgtggatctcgatgggcgacaagggtgtggaagcgcatgggggctgggagaaccaccccgtcgtgacgactacgcttgtacccgggtacattagtggggtattacatcaacagcttcggtggggtagaatgctcgaagaatcaccatgatgatggaagaaggttgtagacgctgta

SEQ ID NO: 10035 - DNA, 864 bp, Muscodor strobelii
  misc_feature: SGI cDNA ID NO. 563166
  misc_feature: Encodes the peptide sequence at SEQ ID NO 10036
atgctgatcaaagagagtcacgctgatgtgcagacaaaggtggatggaaaggaaacttctatgaggatattcactttccaccccactatcccccaatatcccaacgctcgatttccgggcatcgtactatatagcgagatctatcaagtgactggacctgtggcacggttcgcccggcagattgcgggacaaggctacattgttgccgccccttcttcttaccatgacttcatcggaccggaggcgttggcatatgatgagccgggaacaaaccagggcaacgagttgaaaataaagaaggcaaggctgctcacactcccgtcgtacgacgaggacgtccacaagaccattgactacttgcttagcctgccaacgtgcacagggttgatcggcacaacgggtatgtgcctcggtggccatctagctctacgggccagtcttgatccacgaatcagtgcttgcgtcgcctactttgcgacagacgtgcacagccgaacactggggccgtattcagaggccaacacttcggtcgaagccccaggaaacagcaaccacacgatcgacaagctgaacgagatcaagggagaggtcgcaatgattttcggcatcaaggatacacatataccagacgccgggcgagatctcatccgcaagaagctgcgggatgcgggcgttgtgtttagcttccacgagtttgcgtgggcacaacatgctttcatccgcgatgagcttagcaagggccgatatgatccggccatcaccaagatctgctttgaggttctgcttgaattgtttggaagagtgctgaagaacgatttgggggctagagatggagcgccagagaagattgaacatgtatgctaa

SEQ ID NO: 10036 - protein, 287 aa, Muscodor strobelii
  misc_feature: SGI Peptide ID NO. 563166
  misc_feature (27)..(269): Pfam Id: PF01738 Pfam Desc: Dienelactone hydrolase family
  misc_feature (186)..(269): Pfam Id: PF01738 Pfam Desc: Dienelactone hydrolase family
  misc_feature (109)..(157): Pfam Id: PF01738 Pfam Desc: Dienelactone hydrolase family
  misc_feature (1)..(282): NCBI GI: 145605671 Blast Desc: MGG_06957 [Magnaporthe grisea 70-15] gi|145013467|gb|EDJ98108.1| MGG_06957 [Magnaporthe grisea 70-15]
  misc_feature (1)..(287): NCBI GI: 171689932 Blast Desc: protein product [Podospora anserina] gi|170944928|emb|CAP71039.1| protein product [Podospora anserina]
  misc_feature (1)..(287): NCBI GI: 256735360 Blast Desc: [Nectria haematococca mpVI 77-13-4]
  misc_feature (1)..(287): NCBI GI: 46107898 Blast Desc: FG00832.1 [Gibberella zeae PH-1]
  misc_feature (1)..(287): NCBI GI: 212538131 Blast Desc: dienelactone hydrolase family protein [Penicillium marneffei ATCC 18224] gi|210068963|gb|EEA23054.1| dienelactone hydrolase family protein [Penicillium marneffei ATCC 18224]
  misc_feature (1)..(287): NCBI GI: 85110244 Blast Desc: NCU09600 [Neurospora crassa OR74A] gi|28925042|gb|EAA34128.1| NCU09600 [Neurospora crassa OR74A]
  misc_feature (1)..(287): NCBI GI: 242807476 Blast Desc: dienelactone hydrolase family protein [Talaromyces stipitatus ATCC 10500] gi|218715589|gb|EED15011.1| dienelactone hydrolase family protein [Talaromyces stipitatus ATCC 10500]
  misc_feature (1)..(287): NCBI GI: 145238790 Blast Desc: An07g09680 [Aspergillus niger] gi|134076539|emb|CAK39733.1| protein product [Aspergillus niger]
  misc_feature (1)..(287): NCBI GI: 121702371 Blast Desc: dienelactone hydrolase family protein [Aspergillus clavatus NRRL 1] gi|119397593|gb|EAW08024.1| dienelactone hydrolase family protein [Aspergillus clavatus NRRL 1]
  misc_feature (1)..(287): NCBI GI: 119496363 Blast Desc: dienelactone hydrolase family protein [Neosartorya fischeri NRRL 181] gi|119413117|gb|EAW23058.1| dienelactone hydrolase family protein [Neosartorya fischeri NRRL 181]
  misc_feature (1)..(287): SWISSPROT Homolog: EC 3.1.1.45 Carboxymethylenebutenolidase
MLIKESHADVQTKVDGKETSMRIFTFHPTIPQYPNARFPGIVLYSEIYQVTGPVARFARQIAGQGYIVAAPSSYHDFIGPEALAYDEPGTNQGNELKIKKARLLTLPSYDEDVHKTIDYLLSLPTCTGLIGTTGMCLGGHLALRASLDPRISACVAYFATDVHSRTLGPYSEANTSVEAPGNSNHTIDKLNEIKGEVAMIFGIKDTHIPDAGRDLIRKKLRDAGVVFSFHEFAWAQHAFIRDELSKGRYDPAITKICFEVLLELFGRVLKNDLGARDGAPEKIEHVC

SEQ ID NO: 10037 - DNA, 2204 bp, Muscodor strobelii; identical to SEQ ID NO: 10034
  misc_feature: SGI EST ID NO. CUFF.24990.4
  misc_feature: Variant of the nucleotide sequence at SEQ ID NO 10035

SEQ ID NO: 10038 - DNA, 1962 bp, Muscodor strobelii
  misc_feature: SGI cDNA ID NO. 563167
  misc_feature: Reduced expression when VOC is produced
  misc_feature: Encodes the peptide sequence at SEQ ID NO 10039
atggtcgccgccgtcggtattgacttgggtaccacctactcgtgtgtcggcgtcttccgagacgaccgcatcgagatcatcgccaacgaccagggcaaccgcaccacgccttccttcgttgccttcaccgacaccgagcgtctgatcggtgatgcggccaagaaccaggtcgccatgaaccccaacaacacagtcttcgacgccaagcgcctcatcggccgcaagttcagcgatgctgaggtccaggccgacatgaagcacttccccttcaagatcatcgagaagggtggcaagcccattgtcgaggtcgagtacaagggcgagaccaagaccttcactcccgaggagatctcctccatggttctcatcaagatgcgcgagactgctgagtcctaccttggtggtaccgtcaataacgccgtcgttaccgtccctgcctacttcaacgactctcagcgccaggctaccaaggatgctggtctcattgctggcctcaacgtcctccgtatcatcaacgagcccactgccgccgccatcgcttacggtctcgacaagaaggtcgagggcgagcgcaatgtcctgatcttcgatctgggtggtggcactttcgatgtctctcttcttaccattgaggagggtatcttcgaggtcaagtccactgccggtgacactcacttgggtggtgaggacttcgacaaccgtctggtcaaccactttgtcaacgagttcaagcgtaaacacaagaaggatctgtcctctaacgcccgtgctctccgccgtctccgcactgcttgcgagcgtgccaagcgtactctgtcttcgtctgctcagacttcgatcgagatcgactccctgtatgagggcatcgacttctacacgtctattacccgtgctagatttgaggagctctgccaggatcttttccgatctactatccagcccgtcgaccgcgtccttgccgatgctaagatcgacaagtctcaggtccacgagatcgtcctcgtcggtggctctacccgtatcccccgtgttcagaagctcatcaccgactacttcaacggaaaggagcccaacaagtccatcaaccccgacgaggctgttgcctacggtgccgctgtccaggctgctatcctttctggcgacaccagctccaagagcaccaacgagatcttgctgctcgacgtcgccccgctgtctctcggtatcgagactgccggtggtatgatgaccaagcttatcccccgcaacaccactatccccaccaagaagtccgaggtcttctccaccttctccgacaaccagcctggtgtccttattcaggtctacgagggtgagcgtcaacgcacaaaggacaacaacctcatgggcaagttcgagcttactggcatcccacctgccccccgcggtgttcctcagattgaggttaccttcgacctcgatgccaatggtatcatgaacgtctctgccgttgagaagggcaccggcaagtccaacaagattgtcatcaccaacgacaagggtcgtttgtccaaggaagagattgagcgcatgttgtctgaagccgagaagtacaaggaggaggacgaggctgaaggacgccgtatcggtgccaagaacggtctcgagtcgtacgcctactccctgcgcaacactcttggtgactccaaggtcgatgagaagcttgacgctgccgacaaggagaagctcaagactgagatcgacactgtcgtcacttggctcgacgagaaccagcaggctgagcgtgaggagtatgaggagaagcagaaggaactcgaggccattgccaacccaatcatgatgaagttctacggtggtgccggtggcgctggcggtatgcccggtggtatgcctggtggcatgcccggcggtgctggcggcttccctggcggtgctcctggcgccggtggtgatgatggccctaccgtcgaggaggttgactaa

SEQ ID NO: 10039 - protein, 653 aa, Muscodor strobelii
  misc_feature: SGI Peptide ID NO. 563167
  misc_feature (4)..(611): Pfam Id: PF00012 Pfam Desc: Hsp70 protein
  misc_feature (1)..(653): NCBI GI: 38325813 Blast Desc: heat shock protein 70-2 [Nicotiana tabacum]
  misc_feature (1)..(653): NCBI GI: 167843281 Blast Desc: heat shock protein 70 kDa [Hypocrea lixii]
  misc_feature (1)..(610): NCBI GI: 85110248 Blast Desc: heat shock 70 kDa protein [Neurospora crassa OR74A] gi|30581061|sp|Q01233.2|HSP70_NEUCR RecName: Full=Heat shock 70 kDa protein; AltName: Full=HSP70 gi|28881112|emb|CAD70284.1| heat
  misc_feature (1)..(653): NCBI GI: 171689934 Blast Desc: protein product [Podospora anserina] gi|170944929|emb|CAP71040.1| protein product [Podospora anserina]
  misc_feature (1)..(610): NCBI GI: 256734647 Blast Desc: [Nectria haematococca mpVI 77-13-4]
  misc_feature (1)..(610): NCBI GI: 116200213 Blast Desc: heat shock 70 kDa protein [Chaetomium globosum CBS 148.51] gi|88179541|gb|EAQ87009.1| heat shock 70 kDa protein [Chaetomium globosum CBS 148.51]
  misc_feature (1)..(610): NCBI GI: 607818 Blast Desc: 70 kDa heat shock protein [Neurospora crassa]
  misc_feature (4)..(610): NCBI GI: 183583720 Blast Desc: heat shock protein 70 [Beauveria bassiana]
  misc_feature (1)..(610): NCBI GI: 46107910 Blast Desc: HS70_NEUCR Heat shock 70 kDa protein (HSP70) [Gibberella zeae PH-1]
  misc_feature (1)..(610): NCBI GI: 119196239 Blast Desc: heat shock 70 kDa protein [Coccidioides immitis RS] gi|240110689|gb|EER28847.1| heat shock 70 kDa protein, [Coccidioides posadasii C735 delta SOWgp]
  misc_feature (46)..(581): SWISSPROT Homolog: EC 3.6.1.3 Adenosinetriphosphatase
  misc_feature: Useful for introducing or modulating the production of volatile compounds
MVAAVGIDLGTTYSCVGVFRDDRIEIIANDQGNRTTPSFVAFTDTERLIGDAAKNQVAMNPNNTVFDAKRLIGRKFSDAEVQADMKHFPFKIIEKGGKPIVEVEYKGETKTFTPEEISSMVLIKMRETAESYLGGTVNNAVVTVPAYFNDSQRQATKDAGLIAGLNVLRIINEPTAAAIAYGLDKKVEGERNVLIFDLGGGTFDVSLLTIEEGIFEVKSTAGDTHLGGEDFDNRLVNHFVNEFKRKHKKDLSSNARALRRLRTACERAKRTLSSSAQTSIEIDSLYEGIDFYTSITRARFEELCQDLFRSTIQPVDRVLADAKIDKSQVHEIVLVGGSTRIPRVQKLITDYFNGKEPNKSINPDEAVAYGAAVQAAILSGDTSSKSTNEILLLDVAPLSLGIETAGGMMTKLIPRNTTIPTKKSEVFSTFSDNQPGVLIQVYEGERQRTKDNNLMGKFELTGIPPAPRGVPQIEVTFDLDANGIMNVSAVEKGTGKSNKIVITNDKGRLSKEEIERMLSEAEKYKEEDEAEGRRIGAKNGLESYAYSLRNTLGDSKVDEKLDAADKEKLKTEIDTVVTWLDENQQAEREEYEEKQKELEAIANPIMMKFYGGAGGAGGMPGGMPGGMPGGAGGFPGGAPGAGGDDGPTVEEVD

SEQ ID NO: 10040 - DNA, 2621 bp, Muscodor strobelii
  misc_feature: SGI EST ID NO. CUFF.29736.0
  misc_feature: Variant of the nucleotide sequence at SEQ ID NO 10038
tctgcctgaaggtgcaagtgcggcctggcagtactcctcagaaacttccagaagttgctaccatttcgggttgctggaggggcagagtgtataagacctgcaccaacttttttcaacacaaccatctcttcctccccattcttcctccatcaacacacacaacacgcactctcatacatctctctcccctctcaataacagacacaacttttgatacccctcccccatataaccactctgtctgtattctcctccacacatctctcacataacacacacaccacacacattgcccatcatggtcgccgccgtcggtattgacttgggtaccacctactcgtgtgtcggcgtcttccgagacgaccgcatcgagatcatcgccaacgaccagggcaaccgcaccacgccttccttcgttgccttcaccgacaccgagcgtctgatcggtgatgcggccaagaaccaggtcgccatgaaccccaacaacacagtcttcgacgccaagcgcctcatcggccgcaagttcagcgatgctgaggtccaggccgacatgaagcacttccccttcaagatcatcgagaagggtggcaagcccattgtcgaggtcgagtacaagggcgagaccaagaccttcactcccgaggagatctcctccatggttctcatcaagatgcgcgagactgctgagtcctaccttggtggtaccgtcaataacgccgtcgttaccgtccctgcctacttcaacgactctcagcgccaggctaccaaggatgctggtctcattgctggcctcaacgtcctccgtatcatcaacgagcccactgccgccgccatcgcttacggtctcgacaagaaggtcgagggcgagcgcaatgtcctgatcttcgatctgggtggtggcactttcgatgtctctcttcttaccattgaggagggtatcttcgaggtcaagtccactgccggtgacactcacttgggtggtgaggacttcgacaaccgtctggtcaaccactttgtcaacgagttcaagcgtaaacacaagaaggatctgtcctctaacgcccgtgctctccgccgtctccgcactgcttgcgagcgtgccaagcgtactctgtcttcgtctgctcagacttcgatcgagatcgactccctgtatgagggcatcgacttctacacgtctattacccgtgctagatttgaggagctctgccaggatcttttccgatctactatccagcccgtcgaccgcgtccttgccgatgctaagatcgacaagtctcaggtccacgagatcgtcctcgtcggtggctctacccgtatcccccgtgttcagaagctcatcaccgactacttcaacggaaaggagcccaacaagtccatcaaccccgacgaggctgttgcctacggtgccgctgtccaggctgctatcctttctggcgacaccagctccaagagcaccaacgagatcttgctgctcgacgtcgccccgctgtctctcggtatcgagactgccggtggtatgatgaccaagcttatcccccgcaacaccactatccccaccaagaagtccgaggtcttctccaccttctccgacaaccagcctggtgtccttattcaggtctacgagggtgagcgtcaacgcacaaaggacaacaacctcatgggcaagttcgagcttactggcatcccacctgccccccgcggtgttcctcagattgaggttaccttcgacctcgatgccaatggtatcatgaacgtctctgccgttgagaagggcaccggcaagtccaacaagattgtcatcaccaacgacaagggtcgtttgtccaaggaagagattgagcgcatgttgtctgaagccgagaagtacaaggaggaggacgaggctgaaggacgccgtatcggtgccaagaacggtctcgagtcgtacgcctactccctgcgcaacactcttggtgactccaaggtcgatgagaagcttgacgctgccgacaaggagaagctcaagactgagatcgacactgtcgtcacttggctcgacgagaaccagcaggctgagcgtgaggagtatgaggagaagcagaaggaactcgaggccattgccaacccaatcatgatgaagttctacggtggtgccggtggcgctggcggtatgcccggtggtatgcctggtggcatgcccggcggtgctggcggcttccctggcggtgctcctggcgccggtggtgatgatggccctaccgtcgaggaggttgactaaatcattgcatgtggagcatcggtttgattttcttcggcgtttctggtgtcatgaggatatcatgacaaggcggtatgggtaatgcgttcgcctagagttttcgcggtaatgatacaggcacaaaagcagcaagtcacgaactgtatggatactcctttagtatggggtaattctcaatgatcaatgaaaatcatgttaacaaaaatctcacatgtcctgatgcgctttgtgatattgtcaattgcactttgtgatctcacatttcattcaacaatacgcatagcccattgatgtatcgcagttctcaaaagaagtagcatagacattatatgtcactcagtttgtacattgcgcagtcatg

SEQ ID NO: 10041 - DNA, 810 bp, Muscodor strobelii
  misc_feature: SGI cDNA ID NO. 563168
  misc_feature: Encodes the peptide sequence at SEQ ID NO 10042
atgggctggctatgggcctcaccaccaccaccgtctggcggtaacaatcaaaagccaggcgaccagcccgccacagcacccaaggctcctgagcctcaatacagcgacccggaaatagccaagttcatggctcaaatacaagcagaattcggcgacagcagcaaacccagcgagacaaaaccaactcgagcacccgctcccaaacccaaaccaacagaaacagaaaagcccagctctacaccctctacatctaaagcttcctcctcctggtccttctggggctcatcaacacccaaaccctccccattccaatccgatcccacgccatacgtcaagccacccaccaccgcacaacccccctccgcagacggcaaactcgaccctctctccgagtccctcctccccacaaccatgtcctgccggcaagccttcgaccacgccttccactgcaactccctgggcgggcaatggacgtccgtctaccgctcaggcgggatccgatcctgttccgagcaatgggaagacttctggttctgcatgcggacccgtgcctactcaggcgagatgaaagagaacgccatccgggactactaccggaagaaggaactggcgaagtacggcgagggcatgcccagctctaccgatatctgggaggccaggacggaaagattggagggtgcgttccagggccagtttgaggtaccggatatgtctgattcggagtggaggaaacaggatcttgagaggaggaggaagattaggcaggctatggagagggaggagagggaacgggaggggaatgggtcgtag

SEQ ID NO: 10042 - protein, 269 aa, Muscodor strobelii
  misc_feature: SGI Peptide ID NO. 563168
  misc_feature (129)..(267): NCBI GI: 116200215 Blast Desc: CHGG_08263 [Chaetomium globosum CBS 148.51] gi|88179542|gb|EAQ87010.1| CHGG_08263 [Chaetomium globosum CBS 148.51]
  misc_feature (1)..(224): NCBI GI: 256735365 Blast Desc: NECHADRAFT_75122 [Nectria haematococca mpVI 77-13-4]
  misc_feature (1)..(231): NCBI GI: 46107908 Blast Desc: FG00837.1 [Gibberella zeae PH-1]
  misc_feature (1)..(260): NCBI GI: 171689880 Blast Desc: protein product [Podospora anserina] gi|170944902|emb|CAP71013.1| protein product [Podospora anserina]
  misc_feature (1)..(257): NCBI GI: 39978159 Blast Desc: MGG_06964 [Magnaporthe grisea 70-15] gi|145013460|gb|EDJ98101.1| MGG_06964 [Magnaporthe grisea 70-15]
  misc_feature (36)..(262): NCBI GI: 85109976 Blast Desc: NCU09599 [Neurospora crassa OR74A] gi|28881114|emb|CAD70286.1| conserved [Neurospora crassa] gi|28924843|gb|EAA33941.1| [Neurospora crassa OR74A]
  misc_feature (102)..(232): NCBI GI: 261192960 Blast Desc: conserved [Ajellomyces dermatitidis SLH14081] gi|239589021|gb|EEQ71664.1| conserved [Ajellomyces dermatitidis SLH14081]
  misc_feature (110)..(232): NCBI GI: 239613604 Blast Desc: conserved [Ajellomyces dermatitidis ER-3]
  misc_feature (1)..(232): NCBI GI: 67537932 Blast Desc: AN5136.2 [Aspergillus nidulans FGSC A4] gi|40743127|gb|EAA62317.1| AN5136.2 [Aspergillus nidulans FGSC A4] gi|259484581|tpe|CBF80927.1| TPA: [Aspergillus nidulans FGSC
  misc_feature (131)..(234): NCBI GI: 225555500 Blast Desc: conserved [Ajellomyces capsulatus G186AR]
MGWLWASPPPPSGGNNQKPGDQPATAPKAPEPQYSDPEIAKFMAQIQAEFGDSSKPSETKPTRAPAPKPKPTETEKPSSTPSTSKASSSWSFWGSSTPKPSPFQSDPTPYVKPPTTAQPPSADGKLDPLSESLLPTTMSCRQAFDHAFHCNSLGGQWTSVYRSGGIRSCSEQWEDFWFCMRTRAYSGEMKENAIRDYYRKKELAKYGEGMPSSTDIWEARTERLEGAFQGQFEVPDMSDSEWRKQDLERRRKIRQAMEREEREREGNGS

SEQ ID NO: 10043 - DNA, 1575 bp, Muscodor strobelii
  misc_feature: SGI cDNA ID NO. 563169
  misc_feature: Encodes the peptide sequence at SEQ ID NO 10044
atggaaaaactaaggacgaagatatcatacgacatcgaaaaagatcttgcctacccacccatccaagcgggcgattcgtggacagcaggagatcccataatcccttacgacgaggactcgatcaaagcaatcatttcactcctacaaaggcagtggtttgagcgtctctggatcgtgcaagagattcggctcgccaacgaccaggctgttatacaagctggccacaagttcattacgtgggacgcatttatctcctcctgctactatctgcgctcgaaattccagaactttcagggtaatcaggatttggcttcagaattccaaaaaagctacctccgcatccaacctcttgggcttggcaagcctcaagtcttcgaagacttccagcgcttgacctgggacaccagaaacgcaaaatgcacagacccgagagatcgagtctacgggttgctcagcgtggttcataaatcatctgctattgatctgcgcccggattataggaaaccggtcggtgaagtttatcaagacgttgtacttaacatattggagcggtcaaagagtttgcgtcttcttacacgctgcgaattagatgagtcttctaagaatggcatcccgagttgggcacctgattttgctgtcccgtgtcgctaccagttgccacttcgcgatatggacgccgctggggtgtctatcactcatgcacgatatgttgggaatggtattctcagtgttaaaggcgtacgtgttgcgacagtctcccagacatactccctggttgacgtcgcggactctgaatacaccgccatcaaaaccattcagtatctggtcaatgaaagtctcatgagctcggaaaagttgtatcctggaagagacaaggaacatgtcttgagcgcaatctgtcggacattcaaccggaatcttttcctggatcactggcagcctccaaaaggaacataccctaccttccctcaaggccggaaggctctcaatgatatcctagcttggaaagaaggcgagaactttgcggaaatgcatccctatacccagcgatacctccgatacttccgtccccttgcagccggccgatctttcttcatcacacacgacgggaatacagggctagcacctcagtctgtcgctattggagatacaatcgttgtaatactcggtgttgattctgcgatggccttacgtaatgctgaaaatggctcattcaaggttgtcggcgaagcatatctggatggtttcacatcaagtgaagcgctgtttgggccattgaaagacggatgggtcaggatgtccaggttcgacgaagaaactaaggcttattggggtgcgtatcttaataccattacaaatgcgattcagattgcagacccgagactgggagctctccctaggggatggaagattcggaagcatgcagaggatagagtgtggaactggttcgtgaaggagggcgaagaggaagtcgagaaacaatcagagtttcagagatggaggagtgatccgagactgacggcagaccatttaattaagaggggagcggcgattaaagagtttagacttgtgtaa

SEQ ID NO: 10044 - protein, 524 aa, Muscodor strobelii
  misc_feature: SGI Peptide ID NO. 563169
  misc_feature (34)..(524): NCBI GI: 256727220 Blast Desc: NECHADRAFT_32743 [Nectria haematococca mpVI 77-13-4]
  misc_feature (1)..(462): NCBI GI: 261353850 Blast Desc: conserved [Verticillium albo-atrum VaMs.102]
  misc_feature (1)..(524): NCBI GI: 154311024 Blast Desc: BC1G_06630 [Botryotinia fuckeliana B05.10] gi|150851034|gb|EDN26227.1| BC1G_06630 [Botryotinia fuckeliana B05.10]
  misc_feature (27)..(524): NCBI GI: 145609067 Blast Desc: MGG_09107 [Magnaporthe grisea 70-15] gi|145016510|gb|EDK00940.1| MGG_09107 [Magnaporthe grisea 70-15]
  misc_feature (35)..(524): NCBI GI: 171678935 Blast Desc: protein product [Podospora anserina] gi|170937538|emb|CAP62196.1| protein product [Podospora anserina]
  misc_feature (7)..(524): NCBI GI: 169603560 Blast Desc: SNOG_04789 [Phaeosphaeria nodorum SN15] gi|111066060|gb|EAT87180.1| SNOG_04789 [Phaeosphaeria nodorum SN15]
  misc_feature (34)..(524): NCBI GI: 115492481 Blast Desc: [Aspergillus terreus NIH2624] gi|114197728|gb|EAU39428.1| [Aspergillus terreus NIH2624]
  misc_feature (26)..(524): NCBI GI: 256719970 Blast Desc: NECHADRAFT_98482 [Nectria haematococca mpVI 77-13-4]
  misc_feature (36)..(524): NCBI GI: 39974569 Blast Desc: MGG_00569 [Magnaporthe grisea 70-15] gi|145018530|gb|EDK02809.1| MGG_00569 [Magnaporthe grisea 70-15]
  misc_feature (36)..(426): NCBI GI: 256730222 Blast Desc: NECHADRAFT_82497 [Nectria haematococca mpVI 77-13-4]
MEKLRTKISYDIEKDLAYPPIQAGDSWTAGDPIIPYDEDSIKAIISLLQRQWFERLWIVQEIRLANDQAVIQAGHKFITWDAFISSCYYLRSKFQNFQGNQDLASEFQKSYLRIQPLGLGKPQVFEDFQRLTWDTRNAKCTDPRDRVYGLLSVVHKSSAIDLRPDYRKPVGEVYQDVVLNILERSKSLRLLTRCELDESSKNGIPSWAPDFAVPCRYQLPLRDMDAAGVSITHARYVGNGILSVKGVRVATVSQTYSLVDVADSEYTAIKTIQYLVNESLMSSEKLYPGRDKEHVLSAICRTFNRNLFLDHWQPPKGTYPTFPQGRKALNDILAWKEGENFAEMHPYTQRYLRYFRPLAAGRSFFITHDGNTGLAPQSVAIGDTIVVILGVDSAMALRNAENGSFKVVGEAYLDGFTSSEALFGPLKDGWVRMSRFDEETKAYWGAYLNTITNAIQIADPRLGALPRGWKIRKHAEDRVWNWFVKEGEEEVEKQSEFQRWRSDPRLTADHLIKRGAAIKEFRLV

SEQ ID NO: 10045 - DNA, 1308 bp, Muscodor strobelii
  misc_feature: SGI EST ID NO. CUFF.23731.0
  misc_feature: Variant of the nucleotide sequence at SEQ ID NO 10043
aagacttccagcgcttgacctgggacaccagaaacgcaaaatgcacagacccgagagatcgagtctacgggttgctcagcgtggttcataaatcatctgctattgatctgcgcccggattataggaaaccggtcggtgaagtttatcaagacgttgtacttaacatattggagcggtcaaagagtttgcgtcttcttacacgctgcgaattagatgagtcttctaagaatggcatcccgagttgggcacctgattttgctgtcccgtgtcgctaccagttgccacttcgcgatatggacgccgctggggtgtctatcactcatgcacgatatgttgggaatggtattctcagtgttaaaggcgtacgtgttgcgacagtctcccagacatactccctggttgacgtcgcggactctgaatacaccgccatcaaaaccattcagtatctggtcaatgaaagtctcatgagctcggaaaagttgtatcctggaagagacaaggaacatgtcttgagcgcaatctgtcggacattcaaccggaatcttttcctggatcactggcagcctccaaaaggaacataccctaccttccctcaaggccggaaggctctcaatgatatcctagcttggaaagaaggcgagaactttgcggaaatgcatccctatacccagcgatacctccgatacttccgtccccttgcagccggccgatctttcttcatcacacacgacgggaatacagggctagcacctcagtctgtcgctattggagatacaatcgttgtaatactcggtgttgattctgcgatggccttacgtaatgctgaaaatggctcattcaaggttgtcggcgaagcatatctggatggtttcacatcaagtgaagcgctgtttgggccattgaaagacggatgggtcaggatgtccaggttcgacgaagaaactaaggcttattggggtgcgtatcttaataccattacaaatgcgattcagattgcagacccgagactgggagctctccctaggggatggaagattcggaagcatgcagaggatagagtgtggaactggttcgtgaaggagggcgaagaggaagtcgagaaacaatcagagtttcagagatggaggagtgatccgagactgacggcagaccatttaattaagaggggagcggcgattaaagagtttagacttgtgtaagaagttcacgagtcatcttgcaaagctcttaagtacggtttttcctgctctgaaagagacgaatctatattagtcgatgtggtgccgaatctgctataggtcaaatata

SEQ ID NO: 10046 - DNA, 1563 bp, Muscodor strobelii
  misc_feature: SGI cDNA ID NO. 563170
  misc_feature: Encodes the peptide sequence at SEQ ID NO 10047
atgttcggcatcaggcctctacaggtgctagacctgcccaacgaagtacttatgcaaatattcgagctagcaggcaacgacgactcttctctcccggtcacttggcggcggcgaaatgacaacatcaaaaacgctcgtctgacatgccgcaaattctacatgactagttctcatctcctggtcacgtctatccacgtgagcatggatcgggaatcgtgttcccgttttcaagcaatgtcgcaacacccgatcttccaaaaaagcatacgcaaagtcataatagacgttggtctccgctactctaaaggtattgcagaaaatattcgccgctttgcgggtgcctgtgataagattatctctgatgctctatacacacctgcatggagacggggtgaagatggagatgcctccgaacaagcggcgcgagccaggctcgagccactgagccgccgctggcgagaattcagttacgagggtcatgcgtatatggacacagactctctggctctggtgttaggccacatggaatatagctggcgatacgacgaccaacaacgactgctcaatagcgatcagttctccgtggctctgcgcagcgctcttcgcaacatggcctgtgtcaaggatctcgagctcaattccaaacacttcagcacacgtcgaaaacggcaggaacgcgcggatcttttctctcataatagcgaccctcttgagatcgtaagaatcttgttgaaattgaacctctgtgagaagacaccctgcgacgttaattttacatttggcatcctttccactctatcaatcaccaattcttatccgaaaagtctaaaaatcgacctcaacggcgcgttctatgatagtacattgagagtaggccaggctcttacttgtgataataaaagtgagacggcaaagaggttgaataccgtgtccatcaaaattagtcacccggattccattccccagccagcgcggagcatcatatacgagagagtttatgaactcttagacactatgagccttgagaggatcgaattggagttgaacgaagtcgataaagattttgcatttgatcattggggcagaagagttcgttgggatatacaatggggtgctctgctgaacagtcaggaccgatccaaattaagagagctctttttggacgggggacatattcatgaagatgaactccaccgtctcatttcgtcgttcaactcaatatgctcacgcgacaacagtaatgatggtatcatcctctgcatgagtcacatcacgctgggcagcggttcatgggcttctgtgttggattcattacgcggcaaagtgagtccaaggtcggagctgtacggcctccgaggcggagagtgcgagggaatgtcttatcataaacgcagtaaattattcggtattggcaaatggcttggttctgacatacagccgtcttacgaacctaatgaagcatcaaagtatattcgagagtggtggacaagcggtgttaccaaccccatacacagtacccaatgggatgaagacgaaaacgacccttgggactctggctggtag

SEQ ID NO: 10047 - protein, 520 aa, Muscodor strobelii
  misc_feature: SGI Peptide ID NO. 563170
  misc_feature (4)..(492): NCBI GI: 225563287 Blast Desc: conserved [Ajellomyces capsulatus G186AR]
  misc_feature (4)..(492): NCBI GI: 240275876 Blast Desc: conserved [Ajellomyces capsulatus H143]
  misc_feature (3)..(493): NCBI GI: 115388918 Blast Desc: [Aspergillus terreus NIH2624] gi|114194360|gb|EAU36060.1| [Aspergillus terreus NIH2624]
  misc_feature (4)..(210): NCBI GI: 242784140 Blast Desc: TSTA_031520 [Talaromyces stipitatus ATCC 10500] gi|218720474|gb|EED19893.1| TSTA_031520 [Talaromyces stipitatus ATCC 10500]
  misc_feature (7)..(210): NCBI GI: 116199771 Blast Desc: [Chaetomium globosum CBS 148.51] gi|88179320|gb|EAQ86788.1| [Chaetomium globosum CBS 148.51]
  misc_feature (9)..(94): NCBI GI: 242803083 Blast Desc: TSTA_019310 [Talaromyces stipitatus ATCC 10500] gi|218717447|gb|EED16868.1| TSTA_019310 [Talaromyces stipitatus ATCC 10500]
  misc_feature (7)..(204): NCBI GI: 171680560 Blast Desc: protein product [Podospora anserina] gi|170939907|emb|CAP65133.1| protein product [Podospora anserina]
  misc_feature (9)..(113): NCBI GI: 242821283 Blast Desc: TSTA_000680 [Talaromyces stipitatus ATCC 10500] gi|218712569|gb|EED11994.1| TSTA_000680 [Talaromyces stipitatus ATCC 10500]
  misc_feature (5)..(98): NCBI GI: 145609525 Blast Desc: [Magnaporthe grisea 70-15] gi|145016894|gb|EDK01324.1| [Magnaporthe grisea 70-15]
  misc_feature (9)..(116): NCBI GI: 212546629 Blast Desc: PMAA_013460 [Penicillium marneffei ATCC 18224] gi|210064988|gb|EEA19083.1| PMAA_013460 [Penicillium marneffei ATCC 18224]
MFGIRPLQVLDLPNEVLMQIFELAGNDDSSLPVTWRRRNDNIKNARLTCRKFYMTSSHLLVTSIHVSMDRESCSRFQAMSQHPIFQKSIRKVIIDVGLRYSKGIAENIRRFAGACDKIISDALYTPAWRRGEDGDASEQAARARLEPLSRRWREFSYEGHAYMDTDSLALVLGHMEYSWRYDDQQRLLNSDQFSVALRSALRNMACVKDLELNSKHFSTRRKRQERADLFSHNSDPLEIVRILLKLNLCEKTPCDVNFTFGILSTLSITNSYPKSLKIDLNGAFYDSTLRVGQALTCDNKSETAKRLNTVSIKISHPDSIPQPARSIIYERVYELLDTMSLERIELELNEVDKDFAFDHWGRRVRWDIQWGALLNSQDRSKLRELFLDGGHIHEDELHRLISSFNSICSRDNSNDGIILCMSHITLGSGSWASVLDSLRGKVSPRSELYGLRGGECEGMSYHKRSKLFGIGKWLGSDIQPSYEPNEASKYIREWWTSGVTNPIHSTQWDEDENDPWDSGW

SEQ ID NO: 10048 - DNA, 984 bp, Muscodor strobelii
  misc_feature: SGI cDNA ID NO. 563171
  misc_feature: Encodes the peptide sequence at SEQ ID NO 10049
atgtcatccccatttccagacctcccaatctcagggatagaatttccacgttcccctatagtaatcgcagccttccaatacacgcaagaacacaccacagaagcagtctacaatcattgcgtacgcagcgcctattgggcgctcctcctcgccaagaaactcaagcccctagcagatcgaaagccgaatttggagacagtcgtattggcttgtattatgcacgatatggggtgggcgacggataagagtatgcttagtaacttcaagaggtttgaagtcgatgctgcggatattgcgagacggtttgttgaggggtataagggggaggggaaagaagggggtaatgagtgggatgaggagagggtgcagactgtttggaattgtattgctctccacacaacaggttcaatcgccccatttgctgcagtagaagtcgcagcagcacatctcggcgtcatcgcagacttcgtcgggccaatgttcccctcgaacccatgggctgatcctgcgaccactgtccctgacgcaggtccagggtctgtgatcactgttgatgaattcaaggaagtagccagagcgtttccatacgcaggtttcgatgagaaattctgcagagagatactttgcggcatgtgtcgcgataaaccaacatcgacttttgataactttgtcgggatttttggtcgggagtttgggaccgatggcaagggagggggcaaagaggagtatttcgaggcttggaagaaggtcaatagttcggatgcgtggacaggcgggtttgcgtatcttgagagtttgttggcagaggatggccatttgattcctgcaggcccaaatgtgatgatgtttcttgtcggccaaagcatacatctcccacgcatcaacttcccaccctcgctccgcagcaaaacatcccaagactcctactcccagttccccgaccccaaaccccaagacatagcggaatccaaaccggaacgctag

SEQ ID NO: 10049 - protein, 327 aa, Muscodor strobelii
  misc_feature: SGI Peptide ID NO. 563171
  misc_feature (36)..(160): Pfam Id: PF01966 Pfam Desc: HD domain
  misc_feature (36)..(137): Pfam Id: PF01966 Pfam Desc: HD domain
  misc_feature (11)..(225): NCBI GI: 242795716 Blast Desc: conserved [Talaromyces stipitatus ATCC 10500] gi|218719237|gb|EED18657.1| conserved [Talaromyces stipitatus ATCC 10500]
  misc_feature (4)..(231): NCBI GI: 116200323 Blast Desc: CHGG_08317 [Chaetomium globosum CBS 148.51] gi|88179596|gb|EAQ87064.1| CHGG_08317 [Chaetomium globosum CBS 148.51]
  misc_feature (2)..(220): NCBI GI: 171681192 Blast Desc: protein product [Podospora anserina] gi|170940554|emb|CAP65782.1| protein product [Podospora anserina]
  misc_feature (6)..(243): NCBI GI: 256721693 Blast Desc: NECHADRAFT_44823 [Nectria haematococca mpVI 77-13-4]
  misc_feature (10)..(231): NCBI GI: 260460254 Blast Desc: conserved [Mesorhizobium opportunistum WSM2075] gi|259033899|gb|EEW35158.1| conserved [Mesorhizobium opportunistum WSM2075]
  misc_feature (4)..(223): NCBI GI: 171693093 Blast Desc: protein product [Podospora anserina] gi|170946495|emb|CAP73296.1| protein product [Podospora anserina]
  misc_feature (10)..(231): NCBI GI: 116202473 Blast Desc: CHGG_09121 [Chaetomium globosum CBS 148.51] gi|88177639|gb|EAQ85107.1| CHGG_09121 [Chaetomium globosum CBS 148.51]
  misc_feature (13)..(165): NCBI GI: 29827052 Blast Desc: SAV_511 [Streptomyces avermitilis MA-4680] gi|29604150|dbj|BAC68221.1| [Streptomyces avermitilis MA-4680]
  misc_feature (10)..(228): NCBI GI: 13471098 Blast Desc: mlr0982 [Mesorhizobium loti MAFF303099] gi|14021842|dbj|BAB48453.1| mlr0982 [Mesorhizobium loti MAFF303099]
  misc_feature (10)..(223): NCBI GI: 261409068 Blast Desc: metal dependent phosphohydrolase [Geobacillus sp. Y412MC10] gi|261285531|gb|ACX67502.1| metal dependent phosphohydrolase [Geobacillus sp. Y412MC10]
MSSPFPDLPISGIEFPRSPIVIAAFQYTQEHTTEAVYNHCVRSAYWALLLAKKLKPLADRKPNLETVVLACIMHDMGWATDKSMLSNFKRFEVDAADIARRFVEGYKGEGKEGGNEWDEERVQTVWNCIALHTTGSIAPFAAVEVAAAHLGVIADFVGPMFPSNPWADPATTVPDAGPGSVITVDEFKEVARAFPYAGFDEKFCREILCGMCRDKPTSTFDNFVGIFGREFGTDGKGGGKEEYFEAWKKVNSSDAWTGGFAYLESLLAEDGHLIPAGPNVMMFLVGQSIHLPRINFPPSLRSKTSQDSYSQFPDPKPQDIAESKPER

SEQ ID NO: 10050 - DNA, 1288 bp, Muscodor strobelii
  misc_feature: SGI EST ID NO. CUFF.23749.0
  misc_feature: Variant of the nucleotide sequence at SEQ ID NO 10048
atcaaatggtgaataaatcgtcaatcccagcaggtttgttcaaagacccagttttcgcgatggcttcgaggttcctgctccgacgcacagcggagaagtgaacattatgtcttctacgcctttcaaaacgccaaagggctgaaagcaagcatggcaaaagtacatctttcgaatattcaccgaatcgaatcaagacctcatagttatataagagacgatgcgtgttccaagatgaacgtctccccgtcatcacaattcactccgaatcacacatctaaaaccaacaaactcaccacaccacgatgtcatccccatttccagacctcccaatctcagggatagaatttccacgttcccctatagtaatcgcagccttccaatacacgcaagaacacaccacagaagcagtctacaatcattgcgtacgcagcgcctattgggcgctcctcctcgccaagaaactcaagcccctagcagatcgaaagccgaatttggagacagtcgtattggcttgtattatgcacgatatggggtgggcgacggataagagtatgcttagtaacttcaagaggtttgaagtcgatgctgcggatattgcgagacggtttgttgaggggtataagggggaggggaaagaagggggtaatgagtgggatgaggagagggtgcagactgtttggaattgtattgctctccacacaacaggttcaatcgccccatttgctgcagtagaagtcgcagcagcacatctcggcgtcatcgcagacttcgtcgggccaatgttcccctcgaacccatgggctgatcctgcgaccactgtccctgacgcaggtccagggtctgtgatcactgttgatgaattcaaggaagtagccagagcgtttccatacgcaggtttcgatgagaaattctgcagagagatactttgcggcatgtgtcgcgataaaccaacatcgacttttgataactttgtcgggatttttggtcgggagtttgggaccgatggcaagggagggggcaaagaggagtatttcgaggcttggaagaaggtcaatagttcggatgcgtggacaggcgggtttgcgtatcttgagagtttgttggcagaggatggtaagtgatccggagcttattcataaggagagaagcggcaacttatatgttttggggattttttgaaactaggagattgataagatgcttgaggctgtcgactacgggatgccatgaatgacaagagtagtctgttacgaagataaatagatgatactatacagcgaagtcttag

SEQ ID NO: 10051 - DNA, 1095 bp, Muscodor strobelii
  misc_feature: SGI cDNA ID NO. 563172
  misc_feature: Encodes the peptide sequence at SEQ ID NO 10052
atgacacctcagtatgtcctgttgtacgtatgcgatgccccgaacagcgattttgcttcaccacttcgtctgcaatcgtccgagtacggtattcaacatagcctcactcacgcagatcgcgagatcaacttcggttcttatgacattttagacaaggaaagacgcaaagaactcatgtttgatgacgagcaactctctagatccaagatgtacttctttgtcatcgagcttctgcgcatctcccaagatatgataaacgagaccacaaatgacttgcagatgatggcagatatggcttgctctgagaagccgcaaaccgacggagatgggacgcatatcctgaataagaactgggctcttcttatatcttttcagagaaactgcgctgaagagctactcgacaaaatgattcaaaagtcaaaggaaatcaagagtcttagagacggtatttataacgcccagtctgtttttgaggcaaagaaaagcgcccgaatgaaccaatatcttatggtcttcacaattgtgacaatattgtaccttccgccttcatttgtcgctacatttttcggaatgcacttgtttgatggccgtaatggccctactgtatggacgcagatcaccttttggaaagtcttaggtggtgttagcgcatcaacgtatgcggtagcagccattttactattgagcgttcgaaagaaacgtcaactacgagatcgacttgaacgtcacttccttcagccaatctgggaggtagctatcgacttggctgaaggatgtattcttgcctggaagaagttaagcacgtggccaatgtggaagtcgtcgagcacccaatacgcgaaacccaaacagcacgaagctgtaggcaacaaatccatcaaggcttctaagcaatccgaacatactatggtagccgaaccgaaggattctgaaggagctagtgcctcttcgacaaaagcaaataatcagctagtcaacaaggagaaggctgccgaagagggtcttggtcttcactgcaccctagataccactacatccaaggccgcaaaccaagatatgcaagataaaggcaaaggcaaagaacgagccccataa

SEQ ID NO: 10052 - protein, 364 aa, Muscodor strobelii
  misc_feature: SGI Peptide ID NO. 563172
  misc_feature (130)..(191): Pfam Id: PF01544 Pfam Desc: CorA-like Mg2+ transporter protein
  misc_feature (35)..(190): NCBI GI: 119501615 Blast Desc: NFIA_044860 [Neosartorya fischeri NRRL 181] gi|119415730|gb|EAW25667.1| NFIA_044860 [Neosartorya fischeri NRRL 181]
  misc_feature (58)..(186): NCBI GI: 171676599 Blast Desc: protein product [Podospora anserina] gi|170936366|emb|CAP61024.1| protein product [Podospora anserina]
  misc_feature (42)..(185): NCBI GI: 46134027 Blast Desc: FG09153.1 [Gibberella zeae PH-1]
  misc_feature (77)..(242): NCBI GI: 116194133 Blast Desc: [Chaetomium globosum CBS 148.51] gi|88182697|gb|EAQ90165.1| [Chaetomium globosum CBS 148.51]
  misc_feature (42)..(195): NCBI GI: 116197541 Blast Desc: [Chaetomium globosum CBS 148.51] gi|88178205|gb|EAQ85673.1| [Chaetomium globosum CBS 148.51]
  misc_feature (63)..(236): NCBI GI: 116198769 Blast Desc: [Chaetomium globosum CBS 148.51] gi|88178819|gb|EAQ86287.1| [Chaetomium globosum CBS 148.51]
  misc_feature (40)..(223): NCBI GI: 154291860 Blast Desc: BC1G_14946 [Botryotinia fuckeliana B05.10] gi|150846554|gb|EDN21747.1| BC1G_14946 [Botryotinia fuckeliana B05.10]
  misc_feature (49)..(191): NCBI GI: 156037913 Blast Desc: SS1G_11712 [Sclerotinia sclerotiorum 1980] gi|154697449|gb|EDN97187.1| SS1G_11712 [Sclerotinia sclerotiorum 1980]
  misc_feature (49)..(191): NCBI GI: 154310061 Blast Desc: BC1G_06951 [Botryotinia fuckeliana B05.10] gi|150851739|gb|EDN26932.1| BC1G_06951 [Botryotinia fuckeliana B05.10]
  misc_feature (48)..(195): NCBI GI: 239606331 Blast Desc: conserved [Ajellomyces dermatitidis ER-3]
MTPQYVLLYVCDAPNSDFASPLRLQSSEYGIQHSLTHADREINFGSYDILDKERRKELMFDDEQLSRSKMYFFVIELLRISQDMINETTNDLQMMADMACSEKPQTDGDGTHILNKNWALLISFQRNCAEELLDKMIQKSKEIKSLRDGIYNAQSVFEAKKSARMNQYLMVFTIVTILYLPPSFVATFFGMHLFDGRNGPTVWTQITFWKVLGGVSASTYAVAAILLLSVRKKRQLRDRLERHFLQPIWEVAIDLAEGCILAWKKLSTWPMWKSSSTQYAKPKQHEAVGNKSIKASKQSEHTMVAEPKDSEGASASSTKANNQLVNKEKAAEEGLGLHCTLDTTTSKAANQDMQDKGKGKERAP

SEQ ID NO: 10053 - DNA, 310 bp, Muscodor strobelii
  misc_feature: SGI EST ID NO. CUFF.23767.0
  misc_feature: Variant of the nucleotide sequence at SEQ ID NO 10051
cgagaccacaaatgacttgcagatgatggcagatatggcttgctctgagaagccgcaaaccgacggagatgggacgcatatcctgaataagaactgggctcttcttatatcttttcagagaaactgcgctgaagagctactcgacaaaatgattcaaaagtcaaaggaaatcaagagtcttagagacggtatttataacgcccagtctgtttttgaggcaaagaaaagcgcccgaatgaaccaatatcttatggtcttcacaattgtgacaatattgtaccttccgccttcatttgtcgctacatttttc

SEQ ID NO: 10054 - DNA, 1020 bp, Muscodor strobelii
  misc_feature: SGI cDNA ID NO. 563173
  misc_feature: Encodes the peptide sequence at SEQ ID NO 10055
atgttgtgggagaacgctagagagagcggcatgttcatgtggctcactgacattagtgcagtgagggcgcaattcgagatcgtggctcgtaacgagtacacgaaaagcgaaatcaaaaatccagtcgattgtagtttattctactttgccttgaagaaaaaagctgttcttcagggactgtggcgaatggctacgtggaataaggagcagggtgctacacaacgactcttagcgaataattttgaggatccaaagtggaagacaacggcattaaagaatgcgtatgctttactaagtaaacgacgatttgaatatgctgccgccttcttcctcctagccgaccacttgcaagacgcagtcaatgtctgcctgaatcagattaaagatcttcagcttgctattgccatcacgcgcgtctacgagggtgataacggccctgtacttaaaaagttactcgaaaatgacgtctcagctgttgctgcgcgtgaggggaacagatggcttgcctcttgggctttttggatgcttaagcggagggatatggctgttcgcgctcttattacaccagtcttcacactgttagaaacaccagcctcacccgatatcaaagccaagcttttcctcacagacgacccggctctcatcgtcttgtattcgcaactgcggcagaagacactccagacgctgcgtggcgctactaaagtcacgccacgcgtggaatgggattttgtcgtgcataatgcgaggctttacgatcgtatgggttgtgatttattaggtctagatctcgttcgcaattgggaattcctccgtctcccaccgaccaaaccacaaggtcttgagagcgagattgtagacccgaggaagttacttcgtcgtaggagctcgcttgttgtgcaggatatgccgttgagtcctgttgtggcggagatgaagactgggagtcatggggttaaacctccgcccagtgtgtttgaggagcctgatgcgaattcgctgttggattcttttgggttctag

SEQ ID NO: 10055 - protein, 339 aa, Muscodor strobelii
  misc_feature: SGI Peptide ID NO. 563173
  misc_feature (1)..(339): NCBI GI: 261352947 Blast Desc: regulator of V-ATPase in vacuolar membrane protein [Verticillium albo-atrum VaMs.102]
  misc_feature (1)..(339): NCBI GI: 256728986 Blast Desc: NECHADRAFT_93426 [Nectria haematococca mpVI 77-13-4]
  misc_feature (1)..(339): NCBI GI: 116204857 Blast Desc: CHGG_10312 [Chaetomium globosum CBS 148.51] gi|88176440|gb|EAQ83908.1| CHGG_10312 [Chaetomium globosum CBS 148.51]
  misc_feature (3)..(339): NCBI GI: 145610545 Blast Desc: MGG_11430 [Magnaporthe grisea 70-15] gi|145017908|gb|EDK02187.1| MGG_11430 [Magnaporthe grisea 70-15]
  misc_feature (1)..(339): NCBI GI: 46138411 Blast Desc: FG10720.1 [Gibberella zeae PH-1]
  misc_feature (1)..(339): NCBI GI: 171689010 Blast Desc: protein product [Podospora anserina] gi|170944467|emb|CAP70578.1| protein product [Podospora anserina]
  misc_feature (1)..(312): NCBI GI: 156034466 Blast Desc: SS1G_13536 [Sclerotinia sclerotiorum 1980] gi|154698939|gb|EDN98677.1| SS1G_13536 [Sclerotinia sclerotiorum 1980]
  misc_feature (1)..(339): NCBI GI: 258563408 Blast Desc: conserved [Uncinocarpus reesii 1704] gi|237907956|gb|EEP82357.1| conserved [Uncinocarpus reesii 1704]
  misc_feature (1)..(339): NCBI GI: 240108469 Blast Desc: WD domain, G-beta repeat containing protein [Coccidioides posadasii C735 delta SOWgp]
  misc_feature (1)..(339): NCBI GI: 119495198 Blast Desc: WD repeat protein [Neosartorya fischeri NRRL 181] gi|119412551|gb|EAW22492.1| WD repeat protein [Neosartorya fischeri NRRL 181]
MLWENARESGMFMWLTDISAVRAQFEIVARNEYTKSEIKNPVDCSLFYFALKKKAVLQGLWRMATWNKEQGATQRLLANNFEDPKWKTTALKNAYALLSKRRFEYAAAFFLLADHLQDAVNVCLNQIKDLQLAIAITRVYEGDNGPVLKKLLENDVSAVAAREGNRWLASWAFWMLKRRDMAVRALITPVFTLLETPASPDIKAKLFLTDDPALIVLYSQLRQKTLQTLRGATKVTPRVEWDFVVHNARLYDRMGCDLLGLDLVRNWEFLRLPPTKPQGLESEIVDPRKLLRRRSSLVVQDMPLSPVVAEMKTGSHGVKPPPSVFEEPDANSLLDSFGF

SEQ ID NO: 10056 - DNA, 4415 bp, Muscodor strobelii
  misc_feature: SGI EST ID NO. CUFF.23774.0
  misc_feature: Variant of the nucleotide sequence at SEQ ID NO 10054
gccgaacctttacgtgcaactcgagactacctactttcctgagcattcggaacacgacatactcagtattggacgctgaagctgttccaggtacttacaaggtgtctaaccacgaggtactttacggagaagcgcagccttgcgacgacgacgaatttacgatctcgactgtccgattgtcgcgattcgtgaaagacacggagctgcgtgcctggtcaacgaacttcacgcaagctccgctcggcgcaagcttcgttcttgtcgaaacgccgttccgcgtacccaaacccttcttctcttcctggtatcgcccctcgagacgctctgcgatgctactcccgcccgaaacgcgccgatagtatgaagggaatccttccgggcaagcccgaagctagccttcaagccctctctaccggctactgggacaataggcgcatcgtcgtctacatcaccggcaacgccctgtccattctctccgggcccgacgctgtcatccagaccatctacgatgatgacgactccagtctcgaggcggtcgcattcgacgagtcctcgggcaagatagccgcctgcacgcactccgccgtcagggtctatcgaccgctggagcatgcaggcgactcactgaagtgggcgctgcaagcctccttcgagctcgagacggcctcgacacccgccactctctcctggggtagctcccaggacctccttgtcgcccgatcctccctcaccctctacgataccacctccacgatccccaactgctattggaaacaggagctggcgagcaccgtccgagctgcaagtctctcttacgattcatcctacatcgcctctgtggggtaccatgaccggctggtcaaggtttggcgcagactgaactttggttccgaggaggtccgcttcgacttcggctacctgcgccatccccaagccgtcactagcatacagtggcgcaagcccttccatgtcgaccagaccattgagaatgtgctctacactttttgcgccgacaaccacatgcgcgtctggaccggcgcagatggtcatggctgccagaccctccgtctctggggcaagctcgatctcgccggcgcaatagcgcaagagcccagccagaatacttttagcatgaggtgggctttcataatcagccagagagatctcgcaaatgccacggaaaaagccgtccaggaccgtggagatggtcagcagaaagaagatgtcgccctacagtatctcctgtccatcgctaatcgggacacggaaatctgtgtggtatttgatggatatggaagcatgtccgcctgggccctagagggcatcagcggcaagtcgagcggtgctaacagcatcgataatgtcgccttagtcaaatcgaaagacttcgaattcctcaccccttccgccgatgtgtcccatgtcgaaatactaagctattgtaataaatgctccggcaacctccacgtcctgatccatcatttcgacggcaaggtcgaggtcctagagagcaatgtcgcagatcttttagacccgacacctaaaactggccggctggctcacagagctacgtggtctggacattcaggaccgatcaagaaaatggtgagaaatttcagcggacgcgctgtagtatcgaggacggagaagggcgagagcattatctggaatcacaagcgtggacggcttctaagacataacgttctctccgaagaacggcatatccaccggatttgcctccttggaggtggccgattcgtggctttcctacatcacgacagcctttcggtatgggactgcaacactcctgttcacaagctacttggagaatgcgaatacagcatctcgggcaaacctctctgtattcttgttctcccgccacggcacgcccacgatcgtacaatcgttcacgtcgcaacgatcacgtcggaacagcgaggcatggtatgggaagtgcatctacctgtgggcacaactcagtccaatggacacaaacagaacggttatgcaaaccccatacgagagttctgtaccttcaagttggaaggtgctggcgaccttgcatacgttctgccggtcgaccctgctggaggctcccctcttgaatcgccatttctagatgtttttgcccgcgataccgccgtctcatatacacacgatgggcgcatcgagttctgggccgcaaaagtcgacgcgaagagaagtcgcgttgaatggctgtccacatcttcgatggaaactggcattcccgagccggccctcgtaagcggcagtacgatgaagaaagccgcactggtaaaccagagtcgatcgcaagtaacgatctgggatatacgaggtgcaagactggagtatgaacaagattttgaaagccataacacggtgcaagatcttgattggacttcaacgcctgatatgcaatccctacttgcggtgggatttccttatcgagttgtgatactggcacagttgcgtttcgattatctcaataagggcccagcgtgggcgcctatacgagaaataagtatccgagactacacgccgcatccgataggcgattcgacatggctaagtgacggcaatctcgtgattggcgctggcaatcagttgttcctatatgataggatcttcgacacgaccaactcgcaggtggcagatctgcggacaagtcgtagcaaagatggatcgagagacttattcgaagtagtccaaagattgaacgggccgttgcccgtatttcatccgcaattccttagtcaatatctcctagcaggaaaacacgcagtcgtaaaacgaatactcctagctcttaatcacacattaaaatatcacgtcgaaggcgatgagatcgatgactacttgggtctagatcttgccgaattctatctgtccaatgccattgccaatggcaatgacccatcctatcttgtcagccgcatgtcatttgatgaaaacgacgagcatttctcggaagaagttgctaccaatatctgcgaaaaacttcagactataatcctaccacaactctcgagtcacgagcaaatacaattagttgacattgtcgaatgtgccggcgtggtggaaaaacaacgccgatctttagatgaaaatggagcccgctttatggttttctatcggcaacacgctctgcgcaaaggacgcacgaacgagatccacatgtcttggcgggagattaattgggcttaccattctatcagtcaagacatcttggtggacttcgtatctcgccaatgtcatggctccatgttgtgggagaacgctagagagagcggcatgttcatgtggctcactgacattagtgcagtgagggcgcaattcgagatcgtggctcgtaacgagtacacgaaaagcgaaatcaaaaatccagtcgattgtagtttattctactttgccttgaagaaaaaagctgttcttcagggactgtggcgaatggctacgtggaataaggagcagggtgctacacaacgactcttagcgaataattttgaggatccaaagtggaagacaacggcattaaagaatgcgtatgctttactaagtaaacgacgatttgaatatgctgccgccttcttcctcctagccgaccacttgcaagacgcagtcaatgtctgcctgaatcagattaaagatcttcagcttgctattgccatcacgcgcgtctacgagggtgataacggccctgtacttaaaaagttactcgaaaatgacgtctcagctgttgctgcgcgtgaggggaacagatggcttgcctcttgggctttttggatgcttaagcggagggatatggctgttcgcgctcttattacaccagtcttcacactgttagaaacaccagcctcacccgatatcaaagccaagcttttcctcacagacgacccggctctcatcgtcttgtattcgcaactgcggcagaagacactccagacgctgcgtggcgctactaaagtcacgccacgcgtggaatgggattttgtcgtgcataatgcgaggctttacgatcgtatgggttgtgatttattaggtctagatctcgttcgcaattgggaattcctccgtctcccaccgaccaaaccacaaggtcttgagagcgagattgtagacccgaggaagttacttcgtcgtaggagctcgcttgttgtgcaggatatgccgttgagtcctgttgtggcggagatgaagactgggagtcatggggttaaacctccgcccagtgtgtttgaggagcctgatgcgaattcgctgttggattcttttgggttctagcgtgatgtaggaaaggaaaggagaaaggggtcatggagaggtgtggtaggggcaggggttagtgggtagtgggtagttgtattgtataataatatctacctcttgatgtgataaccgatgttgtgcgcgaa

SEQ ID NO: 10057 - DNA, 2934 bp, Muscodor strobelii
  misc_feature: SGI cDNA ID NO. 563174
  misc_feature: Reduced expression when VOC is produced
  misc_feature: Encodes the peptide sequence at SEQ ID NO 10058
atggtgcatcccaagtcagctgtcgcaatcggccagacgagccagggtcctctaaagctaaagtggtcagttgatggccgaacctttacgtgcaactcgagactacctactttcctgagcattcggaacacgacatactcagtattggacgctgaagctgttccaggtacttacaaggtgtctaaccacgaggtactttacggagaagcgcagccttgcgacgacgacgaatttacgatctcgactgtccgattgtcgcgattcgtgaaagacacggagctgcgtgcctggtcaacgaacttcacgcaagctccgctcggcgcaagcttcgttcttgtcgaaacgccgttccgcgtacccaaacccttcttctcttcctgtatgaagggaatccttccgggcaagcccgaagctagccttcaagccctctctaccggctactgggacaataggcgcatcgtcgtctacatcaccggcaacgccctgtccattctctccgggcccgacgctgtcatccagaccatctacgatgatgacgactccagtctcgaggcggtcgcattcgacgagtcctcgggcaagatagccgcctgcacgcactccgccgtcagggtctatcgaccgctggagcatgcaggcgactcactgaagtgggcgctgcaagcctccttcgagctcgagacggcctcgacacccgccactctctcctggggtagctcccaggacctccttgtcgcccgatcctccctcaccctctacgataccacctccacgatccccaactgctattggaaacaggagctggcgagcaccgtccgagctgcaagtctctcttacgattcatcctacatcgcctctgtggggtaccatgaccggctggtcaaggtttggcgcagactgaactttggttccgaggaggtccgcttcgacttcggctacctgcgccatccccaagccgtcactagcatacagtggcgcaagcccttccatgtcgaccagaccattgagaatgtgctctacactttttgcgccgacaaccacatgcgcgtctggaccggcgcagatggtcatggctgccagaccctccgtctctggggcaagctcgatctcgccggcgcaatagcgcaagagcccagccagaatacttttagcatgaggtgggctttcataatcagccagagagatctcgcaaatgccacggaaaaagccgtccaggaccgtggagatggtcagcagaaagaagatgtcgccctacagtatctcctgtccatcgctaatcgggacacggaaatctgtgtggtatttgatggatatggaagcatgtccgcctgggccctagagggcatcagcggcaagtcgagcggtgctaacagcatcgataatgtcgccttagtcaaatcgaaagacttcgaattcctcaccccttccgccgatgtgtcccatgtcgaaatactaagctattgtaataaatgctccggcaacctccacgtcctgatccatcatttcgacggcaaggtcgaggtcctagagagcaatgtcgcagatcttttagacccgacacctaaaactggccggctggctcacagagctacgtggtctggacattcaggaccgatcaagaaaatggtgagaaatttcagcggacgcgctgtagtatcgaggacggagaagggcgagagcattatctggaatcacaagcgtggacggcttctaagacataacgttctctccgaagaacggcatatccaccggatttgcctccttggaggtggccgattcgtggctttcctacatcacgacagcctttcggtatgggactgcaacactcctgttcacaagctacttggagaatgcgaatacagcatctcgggcaaacctctctgtattcttgttctcccgccacggcacgcccacgatcgtacaatcgttcacgtcgcaacgatcacgtcggaacagcgaggcatggtatgggaagtgcatctacctgtgggcacaactcagtccaatggacacaaacagaacggttatgcaaaccccatacgagagttctgtaccttcaagttggaaggtgctggcgaccttgcatacgttctgccggtcgaccctgctggaggctcccctcttgaatcgccatttctagatgtttttgcccgcgataccgccgtctcatatacacacgatgggcgcatcgagttctgggccgcaaaagtcgacgcgaagagaagtcgcgttgaatggctgtccacatcttcgatggaaactggcattcccgagccggccctcgtaagcggcagtacgatgaagaaagccgcactggtaaaccagagtcgatcgcaagtaacgatctgggatatacgaggtgcaagactggagtatgaacaagattttgaaagccataacacggtgcaagatcttgattggacttcaacgcctgatatgcaatccctacttgcggtgggatttccttatcgagttgtgatactggcacagttgcgtttcgattatctcaataagggcccagcgtgggcgcctatacgagaaataagtatccgagactacacgccgcatccgataggcgattcgacatggctaagtgacggcaatctcgtgattggcgctggcaatcagttgttcctatatgataggatcttcgacacgaccaactcgcaggtggcagatctgcggacaagtcgtagcaaagatggatcgagagacttattcgaagtagtccaaagattgaacgggccgttgcccgtatttcatccgcaattccttagtcaatatctcctagcaggaaaacacgcagtcgtaaaacgaatactcctagctcttaatcacacattaaaatatcacgtcgaaggcgatgagatcgatgactacttgggtctagatcttgccgaattctatctgtccaatgccccgcatgtcatttga

SEQ ID NO: 10058 - protein, 977 aa, Muscodor strobelii
  misc_feature: SGI Peptide ID NO. 563174
  misc_feature (128)..(969): NCBI GI: 164428098 Blast Desc: NCU01658 [Neurospora crassa OR74A] gi|157072011|gb|EAA27044.2| NCU01658 [Neurospora crassa OR74A]
  misc_feature (156)..(969): NCBI GI: 16944675 Blast Desc: conserved [Neurospora crassa]
  misc_feature (128)..(970): NCBI GI: 261352947 Blast Desc: regulator of V-ATPase in vacuolar membrane protein [Verticillium albo-atrum VaMs.102]
  misc_feature (126)..(976): NCBI GI: 256728986 Blast Desc: NECHADRAFT_93426 [Nectria haematococca mpVI 77-13-4]
  misc_feature (128)..(977): NCBI GI: 46138411 Blast Desc: FG10720.1 [Gibberella zeae PH-1]
  misc_feature (125)..(969): NCBI GI: 116204857 Blast Desc: CHGG_10312 [Chaetomium globosum CBS 148.51] gi|88176440|gb|EAQ83908.1| CHGG_10312 [Chaetomium globosum CBS 148.51]
  misc_feature (128)..(972): NCBI GI: 169763226 Blast Desc: [Aspergillus oryzae RIB40] gi|83770541|dbj|BAE60674.1| protein product [Aspergillus oryzae]
  misc_feature (128)..(972): NCBI GI: 238489111 Blast Desc: WD repeat protein [Aspergillus flavus NRRL3357] gi|220698181|gb|EED54521.1| WD repeat protein [Aspergillus flavus NRRL3357]
  misc_feature (128)..(969): NCBI GI: 261200831 Blast Desc: WD repeat protein [Ajellomyces dermatitidis SLH14081] gi|239593888|gb|EEQ76469.1| WD repeat protein [Ajellomyces dermatitidis SLH14081]
  misc_feature (128)..(969): NCBI GI: 239607242 Blast Desc: WD repeat protein [Ajellomyces dermatitidis ER-3]
  misc_feature: Useful for introducing or modulating the production of volatile compounds
MVHPKSAVAIGQTSQGPLKLKWSVDGRTFTCNSRLPTFLSIRNTTYSVLDAEAVPGTYKVSNHEVLYGEAQPCDDDEFTISTVRLSRFVKDTELRAWSTNFTQAPLGASFVLVETPFRVPKPFFSSCMKGILPGKPEASLQALSTGYWDNRRIVVYITGNALSILSGPDAVIQTIYDDDDSSLEAVAFDESSGKIAACTHSAVRVYRPLEHAGDSLKWALQASFELETASTPATLSWGSSQDLLVARSSLTLYDTTSTIPNCYWKQELASTVRAASLSYDSSYIASVGYHDRLVKVWRRLNFGSEEVRFDFGYLRHPQAVTSIQWRKPFHVDQTIENVLYTFCADNHMRVWTGADGHGCQTLRLWGKLDLAGAIAQEPSQNTFSMRWAFIISQRDLANATEKAVQDRGDGQQKEDVALQYLLSIANRDTEICVVFDGYGSMSAWALEGISGKSSGANSIDNVALVKSKDFEFLTPSADVSHVEILSYCNKCSGNLHVLIHHFDGKVEVLESNVADLLDPTPKTGRLAHRATWSGHSGPIKKMVRNFSGRAVVSRTEKGESIIWNHKRGRLLRHNVLSEERHIHRICLLGGGRFVAFLHHDSLSVWDCNTPVHKLLGECEYSISGKPLCILVLPPRHAHDRTIVHVATITSEQRGMVWEVHLPVGTTQSNGHKQNGYANPIREFCTFKLEGAGDLAYVLPVDPAGGSPLESPFLDVFARDTAVSYTHDGRIEFWAAKVDAKRSRVEWLSTSSMETGIPEPALVSGSTMKKAALVNQSRSQVTIWDIRGARLEYEQDFESHNTVQDLDWTSTPDMQSLLAVGFPYRVVILAQLRFDYLNKGPAWAPIREISIRDYTPHPIGDSTWLSDGNLVIGAGNQLFLYDRIFDTTNSQVADLRTSRSKDGSRDLFEVVQRLNGPLPVFHPQFLSQYLLAGKHAVVKRILLALNHTLKYHVEGDEIDDYLGLDLAEFYLSNAPHVI

SEQ ID NO: 10059 - DNA, 4415 bp, Muscodor strobelii; identical to SEQ ID NO: 10056
  misc_feature: SGI EST ID NO. CUFF.23774.0
  misc_feature: Variant of the nucleotide sequence at SEQ ID NO 10057

SEQ ID NO: 10060 - DNA, 933 bp, Muscodor strobelii
  misc_feature: SGI cDNA ID NO. 563175
  misc_feature: Encodes the peptide sequence at SEQ ID NO 10061
atgaccaataagacaacctcgacatgtgacactacgtcagggccctatgcctatatgtactgcgattacagcttccccggtctagacaagtacaccagtgacgatcaaatcgagctggcgtacggtgtcgccgagaatgtggtgaatgatgacccagctcatttcgcatcctcttcgggaccaaatttgagctttgcgtctgtaaaactgttgtcgaccaccttcgacaatcctgaaaagggaccaccggtcgaggtattcgccgtcaaatgggggtggtgtgagctgaacttccggaacgtcacgtcaactgctggccaattgcccacgcaaactgtggttccagtgtggttgaagtcttccttgaattcttcccacagtctgtatggctggacgtcacccgaaaccggaaagaactatagcgttactcgtgatgtcggtgccagcttttctaaattcgtcgccctggccttcgaacagcacgtccccggtgcctattccggtcagcagctcattcatcttgattaccttctctacaactcaaatctagtgactctagcgaacaatttcgctgaagcgatgacgaaccaaattcgcagcccgagcgacaatttaaacgcaacgatgcaccaagggcatgcttaccaccaggagacatattatcatattcgatggggatggattgctttaccgctactggagactgtcattgcaacattattactcgtggtgtcaatacgcttaactagaacacagcctttgttcaaaggttcggcaatagcgttgttgttccataaactggacgggtggtctgagacagagttgtatgtggatgggcatagcatagttgacgagctgaaaaagtgcgcgaaaaggatgaaggcgcagttgattgaaaaggaccaagccaggttgaaatttactcgtggatag

SEQ ID NO: 10061 - protein, 310 aa, Muscodor strobelii
  misc_feature: SGI Peptide ID NO. 563175
  misc_feature (76)..(299): NCBI GI: 256726548 Blast Desc: NECHADRAFT_79608 [Nectria haematococca mpVI 77-13-4]
  misc_feature (171)..(310): NCBI GI: 171693341 Blast Desc: protein product [Podospora anserina] gi|170946619|emb|CAP73421.1| protein product [Podospora anserina]
  misc_feature (217)..(307): NCBI GI: 261361233 Blast Desc: [Verticillium albo-atrum VaMs.102]
  misc_feature (127)..(297): NCBI GI: 169612752 Blast Desc: SNOG_09502 [Phaeosphaeria nodorum SN15] gi|111061647|gb|EAT82767.1| SNOG_09502 [Phaeosphaeria nodorum SN15]
  misc_feature (172)..(309): NCBI GI: 169785503 Blast Desc: [Aspergillus oryzae RIB40] gi|83775960|dbj|BAE66079.1| protein product [Aspergillus oryzae]
  misc_feature (164)..(307): NCBI GI: 255941378 Blast Desc: Pc16g11550 [Penicillium chrysogenum Wisconsin 54-1255] gi|211586081|emb|CAP93825.1| Pc16g11550 [Penicillium chrysogenum Wisconsin 54-1255]
  misc_feature (183)..(304): NCBI GI: 164425452 Blast Desc: NCU05801 [Neurospora crassa OR74A] gi|157070931|gb|EAA30825.2| NCU05801 [Neurospora crassa OR74A]
  misc_feature (135)..(299): NCBI GI: 145613824 Blast Desc: MGG_01338 [Magnaporthe grisea 70-15] gi|145020842|gb|EDK04971.1| MGG_01338 [Magnaporthe grisea 70-15]
  misc_feature (181)..(307): NCBI GI: 238500646 Blast Desc: conserved [Aspergillus flavus NRRL3357] gi|220691794|gb|EED48141.1| conserved [Aspergillus flavus NRRL3357]
  misc_feature (181)..(307): NCBI GI: 169782207 Blast Desc: [Aspergillus oryzae RIB40] gi|83774309|dbj|BAE64433.1| protein product [Aspergillus oryzae]
MTNKTTSTCDTTSGPYAYMYCDYSFPGLDKYTSDDQIELAYGVAENVVNDDPAHFASSSGPNLSFASVKLLSTTFDNPEKGPPVEVFAVKWGWCELNFRNVTSTAGQLPTQTVVPVWLKSSLNSSHSLYGWTSPETGKNYSVTRDVGASFSKFVALAFEQHVPGAYSGQQLIHLDYLLYNSNLVTLANNFAEAMTNQIRSPSDNLNATMHQGHAYHQETYYHIRWGWIALPLLETVIATLLLVVSIRLTRTQPLFKGSAIALLFHKLDGWSETELYVDGHSIVDELKKCAKRMKAQLIEKDQARLKFTRG

SEQ ID NO: 10062 - DNA, 1884 bp, Muscodor strobelii
  misc_feature: SGI cDNA ID NO. 563176
  misc_feature: Encodes the peptide sequence at SEQ ID NO 10063
atggataattcctccatccaccttagccgtctcctccgcggtgacaatatcactagaagtgattactcagacgatgacatcagcattgtctggcagatcatccagcgcgccgaggccatcctaagcgaagatctcaccccgggctctcgccttcctacacatgccctcttcctcgcttatgacgaagttatccgcgagcgtgacctcgacccccatgaacgtcacattagcaagctggtctttatgataggcggcatcaagacggaccagactcttcgcgaaaagttccaggatgctatgcgacgcctggacatcacagtcattctagacgaaggagcagagcaatccgtgcacgagacgattgatgataacgatactgattcgcttgattattcggaacatgattccgacgtccatcccgacgtccattccgagacccatgacgaggattatgatgatgaggattttgatgacgagccccagaatgataaagagaaacttctcgccgctcttgcagccggttactccaactttcgcactaaaaatcaggctgtcaacatgcttcgaacttttcagcacaagtcagccgttgaatctaatttccggcgtcaagcggacgcttttgcaggcgcagtgaccaatttcagagccaaggaccatctcaatacctggagatctgaagctgctgctgctgagcgacaggacgctgttattgctgaacagctagccgagagagcccgtgacgaagctcaacgagtccgtgacgaggaggaggacttcgaagatgacccttacctggcccgcatagctcagaagacgcacgagaacctaacaatgtctcgagcacttgcaaaatggtcgaaccgtgctgaggaggaagctgagacacagctggcacgtcgtcacatactgcgaatgcgatatttcggcatcttagaggattacaccaagatgcagatcgccaaagtcgaacagttcaaagaagacacacaaatcgaacgagcccgtcgcgctttatcgacatggcgtgatcggtccgccgctcaagagcagcaggcatgggagaaccagatggaggttgaaaagacgcataaccatcacgaactcgaagcagccctttccaaatggcgggggaaagcccatcaagcacgtcagaaggaatcgacccttgtggattatgccggtggatgcgagttctaccaaaagacgactcgtgcgctcccagtcatggcgaagaaggccgaggaagcgcagaagaaagagcagctcttggcattgtacgcatatcgcgcagattattactacaagacgacacacgccatctcgaactggcgcaagaaggcccaggaggtcgctcagaaaaatcagctacaggagcactatgccgagagagccgattattattacaaaacgaccaatgccattgcagattggcgaccggcagccaagagggttcgcaaggagagactcaaagaggcgcatttggagacgcgtcgaatggtgaagaagggcatgggggcgcgctgcgtgacacagtggcaggacaagctggaggagagcagtaagcatatgcaggagttggaacagagattgcaagtcgctctggaggagaaggagtatcgacagaagtccaatgccctgagcgcatggcgtctacgagcgcgggagaaggacgctgctgcggcagccagcgaggcatatgcgaagcaaaaggctttggaacagttgcgacagcggccagaaatggaccgcagagaggcgcgatcagtcattggaaactggcggaataacactccagcacgcccaaacttgttcttgagtactagggaaccctcgactacacctttggcgccccggaagaacctgagagtttcatgggcctaa

SEQ ID NO: 10063 - protein, 627 aa, Muscodor strobelii
  misc_feature: SGI Peptide ID NO. 563176
  misc_feature (17)..(309): NCBI GI: 116200193 Blast Desc: CHGG_08252 [Chaetomium globosum CBS 148.51] gi|88179531|gb|EAQ86999.1| CHGG_08252 [Chaetomium globosum CBS 148.51]
  misc_feature (22)..(110): NCBI GI: 261352948 Blast Desc: conserved [Verticillium albo-atrum VaMs.102]
  misc_feature (22)..(174): NCBI GI: 156034462 Blast Desc: SS1G_13534 [Sclerotinia sclerotiorum 1980] gi|154698937|gb|EDN98675.1| SS1G_13534 [Sclerotinia sclerotiorum 1980]
  misc_feature (23)..(126): NCBI GI: 119495196 Blast Desc: NFIA_011800 [Neosartorya fischeri NRRL 181] gi|119412550|gb|EAW22491.1| conserved [Neosartorya fischeri NRRL 181]
  misc_feature (23)..(150): NCBI GI: 121701243 Blast Desc: conserved [Aspergillus clavatus NRRL 1] gi|119397029|gb|EAW07460.1| conserved [Aspergillus clavatus NRRL 1]
MDNSSIHLSRLLRGDNITRSDYSDDDISIVWQIIQRAEAILSEDLTPGSRLPTHALFLAYDEVIRERDLDPHERHISKLVFMIGGIKTDQTLREKFQDAMRRLDITVILDEGAEQSVHETIDDNDTDSLDYSEHDSDVHPDVHSETHDEDYDDEDFDDEPQNDKEKLLAALAAGYSNFRTKNQAVNMLRTFQHKSAVESNFRRQADAFAGAVTNFRAKDHLNTWRSEAAAAERQDAVIAEQLAERARDEAQRVRDEEEDFEDDPYLARIAQKTHENLTMSRALAKWSNRAEEEAETQLARRHILRMRYFGILEDYTKMQIAKVEQFKEDTQIERARRALSTWRDRSAAQEQQAWENQMEVEKTHNHHELEAALSKWRGKAHQARQKESTLVDYAGGCEFYQKTTRALPVMAKKAEEAQKKEQLLALYAYRADYYYKTTHAISNWRKKAQEVAQKNQLQEHYAERADYYYKTTNAIADWRPAAKRVRKERLKEAHLETRRMVKKGMGARCVTQWQDKLEESSKHMQELEQRLQVALEEKEYRQKSNALSAWRLRAREKDAAAAASEAYAKQKALEQLRQRPEMDRREARSVIGNWRNNTPARPNLFLSTREPSTTPLAPRKNLRVSWA

SEQ ID NO: 10064 - DNA, 2366 bp, Muscodor strobelii
  misc_feature: SGI EST ID NO. CUFF.23791.0
  misc_feature: Variant of the nucleotide sequence at SEQ ID NO 10062
atcagaaacatcagaaacttgaattgaaactgcaatcttgcatcgcgcaaagcacttaccatcgaacaaacaccagaatccaattctacacactcagaaccacaagcaccttcttcatcatgagaatcgcattcccgcgcttctacctacagacctcggacctgcaggcctcggggagtgtggccgccgactagaagtcaccaccacccacccaggacctgaccgataaatcatgggatttctccgtcacggagtcctttcccatcgaacttaccgttaccgaatccattaaccaatcgtttgacgaagtcattgacgaatcgctgcttcctcctagtgaacacgacgaaatggataattcctccatccaccttagccgtctcctccgcggtgacaatatcactagaagtgattactcagacgatgacatcagcattgtctggcagatcatccagcgcgccgaggccatcctaagcgaagatctcaccccgggctctcgccttcctacacatgccctcttcctcgcttatgacgaagttatccgcgagcgtgacctcgacccccatgaacgtcacattagcaagctggtctttatgataggcggcatcaagacggaccagactcttcgcgaaaagttccaggatgctatgcgacgcctggacatcacagtcattctagacgaaggagcagagcaatccgtgcacgagacgattgatgataacgatactgattcgcttgattattcggaacatgattccgacgtccatcccgacgtccattccgagacccatgacgaggattatgatgatgaggattttgatgacgagccccagaatgataaagagaaacttctcgccgctcttgcagccggttactccaactttcgcactaaaaatcaggctgtcaacatgcttcgaacttttcagcacaagtcagccgttgaatctaatttccggcgtcaagcggacgcttttgcaggcgcagtgaccaatttcagagccaaggaccatctcaatacctggagatctgaagctgctgctgctgagcgacaggacgctgttattgctgaacagctagccgagagagcccgtgacgaagctcaacgagtccgtgacgaggaggaggacttcgaagatgacccttacctggcccgcatagctcagaagacgcacgagaacctaacaatgtctcgagcacttgcaaaatggtcgaaccgtgctgaggaggaagctgagacacagctggcacgtcgtcacatactgcgaatgcgatatttcggcatcttagaggattacaccaagatgcagatcgccaaagtcgaacagttcaaagaagacacacaaatcgaacgagcccgtcgcgctttatcgacatggcgtgatcggtccgccgctcaagagcagcaggcatgggagaaccagatggaggttgaaaagacgcataaccatcacgaactcgaagcagccctttccaaatggcgggggaaagcccatcaagcacgtcagaaggaatcgacccttgtggattatgccggtggatgcgagttctaccaaaagacgactcgtgcgctcccagtcatggcgaagaaggccgaggaagcgcagaagaaagagcagctcttggcattgtacgcatatcgcgcagattattactacaagacgacacacgccatctcgaactggcgcaagaaggcccaggaggtcgctcagaaaaatcagctacaggagcactatgccgagagagccgattattattacaaaacgaccaatgccattgcagattggcgaccggcagccaagagggttcgcaaggagagactcaaagaggcgcatttggagacgcgtcgaatggtgaagaagggcatgggggcgcgctgcgtgacacagtggcaggacaagctggaggagagcagtaagcatatgcaggagttggaacagagattgcaagtcgctctggaggagaaggagtatcgacagaagtccaatgccctgagcgcatggcgtctacgagcgcgggagaaggacgctgctgcggcagccagcgaggcatatgcgaagcaaaaggctttggaacagttgcgacagcggccagaaatggaccgcagagaggcgcgatcagtcattggaaactggcggaataacactccagcacgcccaaacttgttcttgagtactagggaaccctcgactacacctttggcgccccggaagaacctgagagtttcatgggcctaaggccaaagatagcatagatagcatacaattgatcgagtttttgtatttgaatctcgaattcaatgtgatatgaccgtgaccatagcataatgactaataaatcaaacagccttcccgtcaacggcatcttcg

SEQ ID NO: 10065 - DNA, 216 bp, Muscodor strobelii
  misc_feature: SGI cDNA ID NO. 563177
  misc_feature: Elevated expression when VOC is produced
  misc_feature: Encodes the peptide sequence at SEQ ID NO 10066
atgcaaccacgaaccagaccaatccaaaaattcgccacagccgtatcaaaatgctccgcagaggcctcaatatacggaaaatgcatagtagcagactacaactcagtccacaaagacaaatgcgccgccgaattcatgaaactcaaagattgctatttggtacgtaggcaagcccccttcccacctacgtcacacctacaactaacctctgcgtaa

SEQ ID NO: 10066 - protein, 71 aa, Muscodor strobelii
  misc_feature: SGI Peptide ID NO. 563177
  misc_feature (1)..(70): NCBI GI: 169617325 Blast Desc: SNOG_11840 [Phaeosphaeria nodorum SN15] gi|111059764|gb|EAT80884.1| SNOG_11840 [Phaeosphaeria nodorum SN15]
  misc_feature (1)..(59): NCBI GI: 85077365 Blast Desc: NCU03574 [Neurospora crassa OR74A] gi|28917054|gb|EAA26777.1| [Neurospora crassa OR74A]
  misc_feature (2)..(53): NCBI GI: 46138413 Blast Desc: FG10721.1 [Gibberella zeae PH-1]
  misc_feature (1)..(54): NCBI GI: 261352949 Blast Desc: conidiophore development protein hymA [Verticillium albo-atrum VaMs.102]
  misc_feature (1)..(54): NCBI GI: 154276486 Blast Desc: [Ajellomyces capsulatus NAm1] gi|150414161|gb|EDN09526.1| [Ajellomyces capsulatus NAm1]
  misc_feature (1)..(59): NCBI GI: 240278747 Blast Desc: conserved [Ajellomyces capsulatus H143]
  misc_feature (1)..(53): NCBI GI: 238842368 Blast Desc: conserved [Microsporum canis CBS 113480]
  misc_feature (1)..(55): NCBI GI: 212531975 Blast Desc: conserved [Penicillium marneffei ATCC 18224] gi|210071508|gb|EEA25597.1| conserved [Penicillium marneffei ATCC 18224]
  misc_feature (1)..(59): NCBI GI: 225560326 Blast Desc: HCBG_03897 [Ajellomyces capsulatus G186AR]
  misc_feature (1)..(55): NCBI GI: 226281122 Blast Desc: conserved [Paracoccidioides brasiliensis Pb01] gi|226289078|gb|EEH44590.1| conserved [Paracoccidioides brasiliensis Pb18]
  misc_feature: Useful for introducing or modulating the production of volatile compounds
MQPRTRPIQKFATAVSKCSAEASIYGKCIVADYNSVHKDKCAAEFMKLKDCYLVRRQAPFPPTSHLQLTSA

SEQ ID NO: 10067 - DNA, 722 bp, Muscodor strobelii
  misc_feature: SGI EST ID NO. CUFF.23797.0
  misc_feature: Variant of the nucleotide sequence at SEQ ID NO 10065
cgacgatatccacgaacaagagcatcaccctacgtcttctcaccaagcctcttccacgatagcactcgaatagactctttcataatcgtttgactagatttgagacctatcatccaataggtatatgatctctattgtattgaaatcatcacccccaaaaaccagcaagagaacaacaagatccacgatcatcatcatagctctacagcttctcaacgaataatcctcaaacctgtcaattgagttgactttattgtaatcattcacataggacctcaacatatcatcaagtagtctcacgccgtctcaccaaccaaatatcacaaccaccaaccttcagactcaacctcatctcacctcacaaacacccatcaacacaagaaacaccacaatgcaaccacgaaccagaccaatccaaaaattcgccacagccgtatcaaaatgctccgcagaggcctcaatatacggaaaatgcatagtagcagactacaactcagtccacaaagacaaatgcgccgccgaattcatgaaactcaaagattgctatttgaaacatgctaaagcaagatgatacgcatatatcttgcaaagtcaaaaagcattcattacgacattgaaagacttctacatgtcacttttagagaagctatgcatagagaatacatagtagtataacacattgaattgctggacggcgttaatagccgcggcatgtatcaaca

SEQ ID NO: 10068 - DNA, 3213 bp, Muscodor strobelii
  misc_feature: SGI cDNA ID NO. 563178
  misc_feature: Encodes the peptide sequence at SEQ ID NO 10069
atgtccatcagcttccccaagtctgaagaagaggtcattcagagatggcgggagatcaaagccttcgagcgccaggtcgagctctctgaggggaagcctcgatacaccttcttcgatggccctccctttgctaccggcctgccccactatggccatctcctcgcctcgaccatcaaggacatcattcctcgatattggtccatgaagggccattatgtcgaacgacgcttcggctgggacacacatggcatccccattgagcatgaaatcgataagaagtttggtctctccggcaaggaagccgtgatggagtttggcctgcccaagtacaacgaagaatgtcgatctattgtcatgcggtatcgtgacgaatggcgccacactatcgagcgattgggacgttggattgacttcgacaacgactacaagaccatggacacgacattcatggaaagcgagtggtggatcttcaagaactttttcgacaaaggaatggtttaccagggtcatagagtgatgccgtactccactgcgctgacgacgtctctgagcaatttcgaggcaaatcagaactaccaagacgtcaacgaccctgccgtggttgtcaccttccccctggtatccgaccctaagaccaagctcctcgcttggacgacgacaccgtggactttgccgtcaaacctaggtttggcaactcatcctgatttcgaatacgtcaagattctcgacgagaagtctggcgatcactacattctcttggagaagctactctcaaccctgtacaaggatccaaagaaggctaagttcaagattgttgagaagctgaagggtaaagacatgctaggatggaaatacgagccgctcttcgactattactacgaagagttcaaagatgttgccttcaaggtcttgaatgctacgtacgtcacggacgattctggtaccggtattgtccatcaagctccagcattcggcgaggacgactatgctgttgccatcgaggctggcatcatcgacaaagcgcgcgcacctccagacccggtcaacgaccgcggcatatttaccgacaaggtcaaagattttgagggcaagcacgtcaaggaggcggacagacccatcatcaagcatctcaaagagaaaggccgtctcgttgttgattcgcagctgaagcattcgtatcccatgtgtcctcgatccgatacccctctcatttaccgcgctgtgcctagttggttcatcagaatccctgaaattgtccctcagatgttgaagaacattgagggacagcactggacgccgaatttcgtcaaggcaaatcgctttgccaactggatctctaacgctcgagactggaatgtctctcgaaaccgatactggggtactcctattcccttgtgggtcagcgatgacttgtctgagattgtctgcattggttccattcaggaattgagagatttaagcgggtatgagggcgagcttacagatctccaccgagacaaggtcgatcatattactattcccagcaaaaccggaaagggtgttcttcgtcgtgtagaagaagttttcgactgttggtttgagtccggaagtatgccctatgctagccagcattacccttttgagaataaggagaagtttcacgagggcttccccggcgacttcattgctgaaggtctagatcaaacccgcggctggttctatactatgttggttgttggaactcacttgttcggaacatcatcattcaaaaactgcgttgtgaatggtattgtattagcagaagacggaaagaaaatgtcgaagagactaaagaactatcctgatcctggtatcgtcatggaaaaatacggatcagacgccctccgactctacatgatcaactcgcctgtcgttcgcgccgagccattacgatttaaggaatctggagtcaaggaggtggtccaaaaagtgcttctacccttctggaacagttacaagttcttcgaaggtcaggttgctctgctcaaaaaggtcgaggacaaagactacctatgggaccccaagatggagagttccaacacgaacgtcatggaccgctggattcttgccagctgccaaagcttgctggagtttgttgaccaagagatggctgcataccgcctctacaccgtcgttcccaagttgttagaactcattgataacacgacgaactggttcatccgattcaatcgaagacgactcaagggcgagtatggagttgatgataccatccacgcgctcaacactttgttcgagattctttttaccctctgcaagggtcttgcgccgttcacgccctttattaccgaaactatctattccaaactcttgccacatattcccaaggagctgcagggtgctgacccccgaagtgtgcatttcctaccctaccccgaagtacgaaaagaactattcgaccctgagatcgaacgccgcatgagccgcatgcaaaaagtcattgagcttgcgagagtatctcgtgagcgccggactttgagcttgaagacacccctcaagtcattagtcgtccttcactctgatcctgagtacctgtcggatgtcaagtctttggagaactacatcactgaagagttgaacgtccgagatctggtgttatcatcagacgaggcatcgtataatgtgcagtactccgtggtcgccgactggccggtactcggtaagaaactcaagaaggacttagccagggtgaagaaggctctgccaaatgtcactagcgaacaagtcaaggagttttcgaagacgaagactattgtggtagatggcattacactcgaagaaggcgatttggtagtgaagcgtgatctgaagcagacagaatcgggcaacctcgagactaacacagacaatgacgtcctcactattctcgacgttgagaaatatgccgatctggcggatgaaggtctcgggcgcgaaattatcaatcgcgtccagcgcctgcggaagaaagcagggctgcaggcgacggacgatgtaaaaatggaataccagctactttccgatccagataatattggtttgtctaaggcgttcaatagtcagcagcaggcgttcgtgaaagtattacggcggccattggaagtacaaggtgataaaccgcagcaggatggcattatcgcagaggaggagcaagaagttcaaaaggctacatttttactaagacttttgaaactataa

SEQ ID NO: 10069 - protein, 1070 aa, Muscodor strobelii
  misc_feature: SGI Peptide ID NO. 563178
  misc_feature (691)..(849): Pfam Id: PF08264 Pfam Desc: Anticodon-binding domain
  misc_feature (11)..(637): Pfam Id: PF00133 Pfam Desc: tRNA synthetases class I (I, L, M and V)
  misc_feature (42)..(652): Pfam Id: PF09334 Pfam Desc: tRNA synthetases class I (M)
  misc_feature (1)..(1070): NCBI GI: 85077369 Blast Desc: isoleucyl-tRNA synthetase [Neurospora crassa OR74A] gi|28881130|emb|CAD70301.1| isoleucine--tRNA ligase [Neurospora crassa] gi|28917055|gb|EAA26778.1| isoleucyl-tRNA synthetase
  misc_feature (1)..(1070): NCBI GI: 171689990 Blast Desc: protein product [Podospora anserina] gi|170944950|emb|CAP71061.1| protein product [Podospora anserina]
  misc_feature (1)..(1070): NCBI GI: 46138415 Blast Desc: FG10722.1 [Gibberella zeae PH-1]
  misc_feature (3)..(1070): NCBI GI: 154295520 Blast Desc: BC1G_13385 [Botryotinia fuckeliana B05.10] gi|150844011|gb|EDN19204.1| BC1G_13385 [Botryotinia fuckeliana B05.10]
  misc_feature (1)..(1070): NCBI GI: 116200191 Blast Desc: CHGG_08251 [Chaetomium globosum CBS 148.51] gi|88179530|gb|EAQ86998.1| CHGG_08251 [Chaetomium globosum CBS 148.51]
  misc_feature (1)..(1070): NCBI GI: 145608296 Blast Desc: MGG_03220 [Magnaporthe grisea 70-15] gi|145015788|gb|EDK00278.1| MGG_03220 [Magnaporthe grisea 70-15]
  misc_feature (1)..(1070): NCBI GI: 238489107 Blast Desc: isoleucyl-tRNA synthetase ,cytoplasmic [Aspergillus flavus NRRL3357] gi|220698179|gb|EED54519.1| isoleucyl-tRNA synthetase ,cytoplasmic [Aspergillus flavus NRRL3357]
  misc_feature (1)..(1070): NCBI GI: 145240291 Blast Desc: An08g06770 [Aspergillus niger] gi|134077307|emb|CAK45647.1| protein product [Aspergillus niger]
  misc_feature (1)..(1070): NCBI GI: 119186693 Blast Desc: CIMG_03394 [Coccidioides immitis RS]
  misc_feature (1)..(1070): NCBI GI: 240108471 Blast Desc: Isoleucyl-tRNA synthetase, [Coccidioides posadasii C735 delta SOWgp]
  misc_feature (1)..(1070): SWISSPROT Homolog: EC 6.1.1.5 Isoleucine--tRNA ligase
MSISFPKSEEEVIQRWREIKAFERQVELSEGKPRYTFFDGPPFATGLPHYGHLLASTIKDIIPRYWSMKGHYVERRFGWDTHGIPIEHEIDKKFGLSGKEAVMEFGLPKYNEECRSIVMRYRDEWRHTIERLGRWIDFDNDYKTMDTTFMESEWWIFKNFFDKGMVYQGHRVMPYSTALTTSLSNFEANQNYQDVNDPAVVVTFPLVSDPKTKLLAWTTTPWTLPSNLGLATHPDFEYVKILDEKSGDHYILLEKLLSTLYKDPKKAKFKIVEKLKGKDMLGWKYEPLFDYYYEEFKDVAFKVLNATYVTDDSGTGIVHQAPAFGEDDYAVAIEAGIIDKARAPPDPVNDRGIFTDKVKDFEGKHVKEADRPIIKHLKEKGRLVVDSQLKHSYPMCPRSDTPLIYRAVPSWFIRIPEIVPQMLKNIEGQHWTPNFVKANRFANWISNARDWNVSRNRYWGTPIPLWVSDDLSEIVCIGSIQELRDLSGYEGELTDLHRDKVDHITIPSKTGKGVLRRVEEVFDCWFESGSMPYASQHYPFENKEKFHEGFPGDFIAEGLDQTRGWFYTMLVVGTHLFGTSSFKNCVVNGIVLAEDGKKMSKRLKNYPDPGIVMEKYGSDALRLYMINSPVVRAEPLRFKESGVKEVVQKVLLPFWNSYKFFEGQVALLKKVEDKDYLWDPKMESSNTNVMDRWILASCQSLLEFVDQEMAAYRLYTVVPKLLELIDNTTNWFIRFNRRRLKGEYGVDDTIHALNTLFEILFTLCKGLAPFTPFITETIYSKLLPHIPKELQGADPRSVHFLPYPEVRKELFDPEIERRMSRMQKVIELARVSRERRTLSLKTPLKSLVVLHSDPEYLSDVKSLENYITEELNVRDLVLSSDEASYNVQYSVVADWPVLGKKLKKDLARVKKALPNVTSEQVKEFSKTKTIVVDGITLEEGDLVVKRDLKQTESGNLETNTDNDVLTILDVEKYADLADEGLGREIINRVQRLRKKAGLQATDDVKMEYQLLSDPDNIGLSKAFNSQQQAFVKVLRRPLEVQGDKPQQDGIIAEEEQEVQKATFLLRLLKL

SEQ ID NO: 10070 - DNA, 3517 bp, Muscodor strobelii
  misc_feature: SGI EST ID NO. CUFF.23801.0
  misc_feature: Variant of the nucleotide sequence at SEQ ID NO 10068
ccgccctgaagcaactgttgcgaccccgcgattagaaccgtgacttacaaaaaagttgccccgcggtcgggtttgtttcgagtcaaccaaagtcgagtgttcgtgactcaccccaccaagcttcaaacctcatatctcttcatcccattcaagttcttctgataccacattctcggttgctggcgctagaagtgcagctgatggtattttgtctccacgaacgccattgacagcctccaagatgtccatcagcttccccaagtctgaagaagaggtcattcagagatggcgggagatcaaagccttcgagcgccaggtcgagctctctgaggggaagcctcgatacaccttcttcgatggccctccctttgctaccggcctgccccactatggccatctcctcgcctcgaccatcaaggacatcattcctcgatattggtccatgaagggccattatgtcgaacgacgcttcggctgggacacacatggcatccccattgagcatgaaatcgataagaagtttggtctctccggcaaggaagccgtgatggagtttggcctgcccaagtacaacgaagaatgtcgatctattgtcatgcggtatcgtgacgaatggcgccacactatcgagcgattgggacgttggattgacttcgacaacgactacaagaccatggacacgacattcatggaaagcgagtggtggatcttcaagaactttttcgacaaaggaatggtttaccagggtcatagagtgatgccgtactccactgcgctgacgacgtctctgagcaatttcgaggcaaatcagaactaccaagacgtcaacgaccctgccgtggttgtcaccttccccctggtatccgaccctaagaccaagctcctcgcttggacgacgacaccgtggactttgccgtcaaacctaggtttggcaactcatcctgatttcgaatacgtcaagattctcgacgagaagtctggcgatcactacattctcttggagaagctactctcaaccctgtacaaggatccaaagaaggctaagttcaagattgttgagaagctgaagggtaaagacatgctaggatggaaatacgagccgctcttcgactattactacgaagagttcaaagatgttgccttcaaggtcttgaatgctacgtacgtcacggacgattctggtaccggtattgtccatcaagctccagcattcggcgaggacgactatgctgttgccatcgaggctggcatcatcgacaaagcgcgcgcacctccagacccggtcaacgaccgcggcatatttaccgacaaggtcaaagattttgagggcaagcacgtcaaggaggcggacagacccatcatcaagcatctcaaagagaaaggccgtctcgttgttgattcgcagctgaagcattcgtatcccatgtgtcctcgatccgatacccctctcatttaccgcgctgtgcctagttggttcatcagaatccctgaaattgtccctcagatgttgaagaacattgagggacagcactggacgccgaatttcgtcaaggcaaatcgctttgccaactggatctctaacgctcgagactggaatgtctctcgaaaccgatactggggtactcctattcccttgtgggtcagcgatgacttgtctgagattgtctgcattggttccattcaggaattgagagatttaagcgggtatgagggcgagcttacagatctccaccgagacaaggtcgatcatattactattcccagcaaaaccggaaagggtgttcttcgtcgtgtagaagaagttttcgactgttggtttgagtccggaagtatgccctatgctagccagcattacccttttgagaataaggagaagtttcacgagggcttccccggcgacttcattgctgaaggtctagatcaaacccgcggctggttctatactatgttggttgttggaactcacttgttcggaacatcatcattcaaaaactgcgttgtgaatggtattgtattagcagaagacggaaagaaaatgtcgaagagactaaagaactatcctgatcctggtatcgtcatggaaaaatacggatcagacgccctccgactctacatgatcaactcgcctgtcgttcgcgccgagccattacgatttaaggaatctggagtcaaggaggtggtccaaaaagtgcttctacccttctggaacagttacaagttcttcgaaggtcaggttgctctgctcaaaaaggtcgaggacaaagactacctatgggaccccaagatggagagttccaacacgaacgtcatggaccgctggattcttgccagctgccaaagcttgctggagtttgttgaccaagagatggctgcataccgcctctacaccgtcgttcccaagttgttagaactcattgataacacgacgaactggttcatccgattcaatcgaagacgactcaagggcgagtatggagttgatgataccatccacgcgctcaacactttgttcgagattctttttaccctctgcaagggtcttgcgccgttcacgccctttattaccgaaactatctattccaaactcttgccacatattcccaaggagctgcagggtgctgacccccgaagtgtgcatttcctaccctaccccgaagtacgaaaagaactattcgaccctgagatcgaacgccgcatgagccgcatgcaaaaagtcattgagcttgcgagagtatctcgtgagcgccggactttgagcttgaagacacccctcaagtcattagtcgtccttcactctgatcctgagtacctgtcggatgtcaagtctttggagaactacatcactgaagagttgaacgtccgagatctggtgttatcatcagacgaggcatcgtataatgtgcagtactccgtggtcgccgactggccggtactcggtaagaaactcaagaaggacttagccagggtgaagaaggctctgccaaatgtcactagcgaacaagtcaaggagttttcgaagacgaagactattgtggtagatggcattacactcgaagaaggcgatttggtagtgaagcgtgatctgaagcagacagaatcgggcaacctcgagactaacacagacaatgacgtcctcactattctcgacgttgagaaatatgccgatctggcggatgaaggtctcgggcgcgaaattatcaatcgcgtccagcgcctgcggaagaaagcagggctgcaggcgacggacgatgtaaaaatggaataccagctactttccgatccagataatattggtttgtctaaggcgttcaatagtcagcagcaggcgttcgtgaaagtattacggcggccattggaagtacaaggtgataaaccgcagcaggatggcattatcgcagaggaggagcaagaagttcaaaaggctacatttttactaagacttttgaaactataagtctagatagacatttatagctttaattgtaacaatgaacactgatgcaatgttactgtatca

SEQ ID NO: 10071 - DNA, 1140 bp, Muscodor strobelii
  misc_feature: SGI cDNA ID NO. 563179
  misc_feature: Encodes the peptide sequence at SEQ ID NO 10072
atggcatttcttttcgggagggcgaggacccgaacaaacaccatcgacctgtccaagcaagccaaggaccatgtatccaagttggacggccctggtggccctgcaaaggccgaagaactggccaaggtcctgacccagatgaagctcatcctccaaggagtcccagagtatgaaagcacacccgaacaggtatatggtctcgtcaccggcctgatagaagaggacctgttgttcctcctcgcccagaacctccaccgcctccccttcgaagcccgcaaagacacccaggtcatcttgtcctacgtcttccgcttccgtccgacaacggcctcacccaagaccgatcccgtcgcattaagctacgttgtcaacaatcggccagaagtcttactagagctatgtcgaggctacgaccacaaagagagtgctacacccgccggcacggtgctgcgggaggtgctcaagagcgaggccgctgcagctatcattctttatgacgatggagagcagccaggttcgagtctgaagggtgtcaccgcgattgatagggaaagaccgcagagtgggaacggcgtcttctggaggttcttcgactggatcgacaagagctccttcgaagtcggcgccgatgccttcaccacgtttcgggaacttttaacgaagcataaagagctcgtaccgcgatatttaaacgtaaacttcgagctgttcttcgagaagtacaacagcattctcgtacagtcaagcagctacgtgacgaaacgacagtccattaagttgctcggcgagatattactcgaccgctcaaactataatgtcatgactgcctacgtcgaccgaggcgaccatctcaaaatctgcatgaacctcttgcggagcgatcgcaagatggtgcaatacgagggatttcacgtctttaaggtctttgtggctaatccgcacaagtcgatcgctgtccagaagatcctgcttatgaatcgggacaagcttctaaacttcttgtcgcacttcctggaggatcgcacagacgatgagcagttcctcgatgagagagagtttttgattaaacagattcgcaatatgccgcctcagccgatagctccgatgaggcaccagcctcaagcagcacagcctgtttga

SEQ ID NO: 10072 - protein, 379 aa, Muscodor strobelii
  misc_feature: SGI Peptide ID NO. 563179
  misc_feature (1)..(363): Pfam Id: PF08569 Pfam Desc: Mo25-like
  misc_feature (1)..(370): NCBI GI: 46138417 Blast Desc: FG10723.1 [Gibberella zeae PH-1]
  misc_feature (1)..(368): NCBI GI: 171689988 Blast Desc: protein product [Podospora anserina] gi|170944949|emb|CAP71060.1| protein product [Podospora anserina]
  misc_feature (1)..(361): NCBI GI: 116200197 Blast Desc: CHGG_08254 [Chaetomium globosum CBS 148.51] gi|88179533|gb|EAQ87001.1| CHGG_08254 [Chaetomium globosum CBS 148.51]
  misc_feature (1)..(370): NCBI GI: 85077373 Blast Desc: conidiophore development protein hymA [Neurospora crassa OR74A] gi|28881129|emb|CAD70300.1| protein required for conidiophore development [Neurospora crassa] conidiophore protein
  misc_feature (1)..(368): NCBI GI: 154295494 Blast Desc: BC1G_13372 [Botryotinia fuckeliana B05.10] gi|150843998|gb|EDN19191.1| BC1G_13372 [Botryotinia fuckeliana B05.10]
  misc_feature (35)..(368): NCBI GI: 156034434 Blast Desc: SS1G_13520 [Sclerotinia sclerotiorum 1980] gi|154698923|gb|EDN98661.1| SS1G_13520 [Sclerotinia sclerotiorum 1980]
  misc_feature (37)..(368): NCBI GI: 145608298 Blast Desc: MGG_03219 [Magnaporthe grisea 70-15] gi|145015789|gb|EDK00279.1| MGG_03219 [Magnaporthe grisea 70-15]
  misc_feature (1)..(372): NCBI GI: 240278725 Blast Desc: conidiophore development protein hymA [Ajellomyces capsulatus H143]
  misc_feature (1)..(372): NCBI GI: 225560345 Blast Desc: conidiophore development protein hymA [Ajellomyces capsulatus G186AR]
  misc_feature (1)..(372): NCBI GI: 154276448 Blast Desc: conidiophore development protein hymA [Ajellomyces capsulatus NAm1] gi|150414142|gb|EDN09507.1| conidiophore development protein hymA [Ajellomyces capsulatus NAm1]
MAFLFGRARTRTNTIDLSKQAKDHVSKLDGPGGPAKAEELAKVLTQMKLILQGVPEYESTPEQVYGLVTGLIEEDLLFLLAQNLHRLPFEARKDTQVILSYVFRFRPTTASPKTDPVALSYVVNNRPEVLLELCRGYDHKESATPAGTVLREVLKSEAAAAIILYDDGEQPGSSLKGVTAIDRERPQSGNGVFWRFFDWIDKSSFEVGADAFTTFRELLTKHKELVPRYLNVNFELFFEKYNSILVQSSSYVTKRQSIKLLGEILLDRSNYNVMTAYVDRGDHLKICMNLLRSDRKMVQYEGFHVFKVFVANPHKSIAVQKILLMNRDKLLNFLSHFLEDRTDDEQFLDEREFLIKQIRNMPPQPIAPMRHQPQAAQPV

SEQ ID NO: 10073 - DNA, 2440 bp, Muscodor strobelii
  misc_feature: SGI EST ID NO. CUFF.23871.2
  misc_feature: Variant of the nucleotide sequence at SEQ ID NO 10071
cgagagcccaggtcgaaacactggagctgggcaggaatgacatctcggctttttctcgactctgcagcacattggattgttatgcacttaggtaatttctttatgtgaagtttgtgactgggtagggcaatgacgtgcggtgtctgaattggctttgttagcattatatcggcatgagcgttgccgttcagcaacctcaccccaacgactgccgtagctgagtgatcaacgatcactgcttcaggtatatcagacacccaattgcatttgcgccggcttcaccactgcactctcctctcacttccgaacttgcgacgaacgacataaagagcgtgagccgcgagagcatcgcatccgcgccagcatggcatttcttttcgggagggcgaggacccgaacaaacaccatcgacctgtccaagcaagccaaggaccatgtatccaagttggacggccctggtggccctgcaaaggccgaagaactggccaaggtcctgacccagatgaagctcatcctccaaggagtcccagagtatgaaagcacacccgaacaggtatatggtctcgtcaccggcctgatagaagaggacctgttgttcctcctcgcccagaacctccaccgcctccccttcgaagcccgcaaagacacccaggtcatcttgtcctacgtcttccgcttccgtccgacaacggcctcacccaagaccgatcccgtcgcattaagctacgttgtcaacaatcggccagaagtcttactagagctatgtcgaggctacgaccacaaagagagtgctacacccgccggcacggtgctgcgggaggtgctcaagagcgaggccgctgcagctatcattctttatgacgatggagagcagccaggttcgagtctgaagggtgtcaccgcgattgatagggaaagaccgcagagtgggaacggcgtcttctggaggttcttcgactggatcgacaagagctccttcgaagtcggcgccgatgccttcaccacgtttcgggaacttttaacgaagcataaagagctcgtaccgcgatatttaaacgtaaacttcgagctgttcttcgagaagtacaacagcattctcgtacagtcaagcagctacgtgacgaaacgacagtccattaagttgctcggcgagatattactcgaccgctcaaactataatgtcatgactgcctacgtcgaccgaggcgaccatctcaaaatctgcatgaacctcttgcggagcgatcgcaagatggtgcaatacgagggatttcacgtctttaaggtctttgtggctaatccgcacaagtcgatcgctgtccagaagatcctgcttatgaatcgggacaagcttctaaacttcttgtcgcacttcctggaggatcgcacagacgatgagcagttcctcgatgagagagagtttttgattaaacagattcgcaatatgccgcctcagccgatagctccgatgaggcaccagcctcaagcagcacagcctgtttgagagcacgatttggtacatggacgatgagacttcgtggcattggatgaggaggagagaaacattttgctagacactatgcgagccttgaggcttgatgagtagaattttcggagacaggttttgtcttcgcaacagagatgatgtgcatgtagctaggcgttaaggtattgcagattctggcagacataaatacactcttcgtagccgaacctttccactattataccatgaaactattaaatcattacatacccgatatctcataaatatcaataactacaaatctttacccatccacccctcaaactctcccttatactcatccctccacctactcaacggcggcctgctctgcacagcatcctgcgcactccaaagcatcctcttcttatccatatcctccgtaacatcattatcaggacaaataacccagaaacttccctcccccatcttcttctcgagataatcagcaacttgctcgggccaccacgcaccactcatcttctcccttccactcgctgcacccgcgagttgtgtccatgtccatccgggaacgaggagatgcacgctgatgttctcctcggagcgcatatcgtaggataagtgctcggcgagtgatttcactgccgctttggaggcgttgtatgctgggtttcctggagggtttgtgatgccttgtttggaacctgttattattattgaggatggtgaattggctgaggcggaggacttgattagggggacgagggtggttaggccgtttatgacgccgaagaggtttacgttgaggatcttttggaaggatgaggcgtcaggggcagtgaatgaggtgggtgctgagacaccggcgttgagggagaggaggttgatttttcctggggtgttgttagtctagtgtttaggttacagttgggtataagaggtgaggactgggtg

SEQ ID NO: 10074 - DNA, 315 bp, Muscodor strobelii
  misc_feature: SGI cDNA ID NO. 563180
  misc_feature: Encodes the peptide sequence at SEQ ID NO 10075
atgcgctccgaggagaacatcagcgtgcatctcctcgttcccggatggacatggacacaactcgcgggtgcagcgagtggaagggagaagatgagtggtgcgtggtggcccgagcaagttgctgattatctcgagaagaagatgggggagggaagtttctgggttatttgtcctgataatgatgttacggaggatatggataagaagaggatgctttggagtgcgcaggatgctgtgcagagcaggccgccgttgagtaggtggagggatgagtataagggagagtttgaggggtggatgggtaaagatttgtag

SEQ ID NO: 10075 - protein, 104 aa, Muscodor strobelii
  misc_feature: SGI Peptide ID NO. 563180
  misc_feature (2)..(102): NCBI GI: 18376033 Blast Desc: related to 20beta-hydroxysteroid dehydrogenase [Neurospora crassa]
  misc_feature (4)..(102): NCBI GI: 46115066 Blast Desc: FG03375.1 [Gibberella zeae PH-1]
  misc_feature (1)..(102): NCBI GI: 145613225 Blast Desc: MGG_01793 [Magnaporthe grisea 70-15] gi|145020349|gb|EDK04478.1| MGG_01793 [Magnaporthe grisea 70-15]
  misc_feature (1)..(104): NCBI GI: 154295498 Blast Desc: BC1G_13374 [Botryotinia fuckeliana B05.10] gi|150844000|gb|EDN19193.1| BC1G_13374 [Botryotinia fuckeliana B05.10]
  misc_feature (8)..(104): NCBI GI: 169618275 Blast Desc: SNOG_12329 [Phaeosphaeria nodorum SN15] gi|111059022|gb|EAT80142.1| SNOG_12329 [Phaeosphaeria nodorum SN15]
  misc_feature (3)..(99): NCBI GI: 261354815 Blast Desc: oxidoreductase [Verticillium albo-atrum VaMs.102]
  misc_feature (7)..(100): NCBI GI: 189201593 Blast Desc: short chain dehydrogenase/reductase [Pyrenophora tritici-repentis Pt-1C-BFP] gi|187984232|gb|EDU49720.1| short chain dehydrogenase/reductase [Pyrenophora tritici-repentis
  misc_feature (2)..(103): NCBI GI: 239609653 Blast Desc: short chain dehydrogenase/reductase [Ajellomyces dermatitidis ER-3]
  misc_feature (6)..(100): NCBI GI: 159128634 Blast Desc: short chain dehydrogenase/reductase [Aspergillus fumigatus A1163]
  misc_feature (2)..(93): NCBI GI: 145236164 Blast Desc: protein product [Aspergillus niger] gi|134075181|emb|CAK96494.1| protein product [Aspergillus niger]
MRSEENISVHLLVPGWTWTQLAGAASGREKMSGAWWPEQVADYLEKKMGEGSFWVICPDNDVTEDMDKKRMLWSAQDAVQSRPPLSRWRDEYKGEFEGWMGKDL

SEQ ID NO: 10076 - DNA, 2422 bp, Muscodor strobelii
  misc_feature: SGI EST ID NO. CUFF.23872.3
  misc_feature: Variant of the nucleotide sequence at SEQ ID NO 10074
gttttttgttcatagcctactaagttacatcatacgagcccctcaccccttaagtccgtcttgtccgtgactgaattatatattagcctccctcgtctcaccgaatcgcccaaacaatcgaaacgaattcataaaaaccaagcaatcaaatccctcagatcttatcaaagaagaaaaatggcgaaaatattcgcaaaagacaacacagccgtgatcacaggcggagcctcaggcatcggccttgcgctctcgaagaaatgcgtcggctacggcatgcgtgtgctcatagccgactggaacacggagaatctcgaagctgcaaagaaagagcttggtgactctgtaactattgtgcagatggatgtcagtcaacttgaggactggagaaagatcactgagaagatcgagaaagactttgaaggaaaaatcaacctcctctccctcaacgccggtgtctcagcacccacctcattcactgcccctgacgcctcatccttccaaaagatcctcaacgtaaacctcttcggcgtcataaacggcctaaccaccctcgtccccctaatcaagtcctccgcctcagccaattcaccatcctcaataataataacaggttccaaacaaggcatcacaaaccctccaggaaacccagcatacaacgcctccaaagcggcagtgaaatcactcgccgagcacttatcctacgatatgcgctccgaggagaacatcagcgtgcatctcctcgttcccggatggacatggacacaactcgcgggtgcagcgagtggaagggagaagatgagtggtgcgtggtggcccgagcaagttgctgattatctcgagaagaagatgggggagggaagtttctgggttatttgtcctgataatgatgttacggaggatatggataagaagaggatgctttggagtgcgcaggatgctgtgcagagcaggccgccgttgagtaggtggagggatgagtataagggagagtttgaggggtggatgggtaaagatttgtagttattgatatttatgagatatcgggtatgtaatgatttaatagtttcatggtataatagtggaaaggttcggctacgaagagtgtatttatgtctgccagaatctgcaataccttaacgcctagctacatgcacatcatctctgttgcgaagacaaaacctgtctccgaaaattctactcatcaagcctcaaggctcgcatagtgtctagcaaaatgtttctctcctcctcatccaatgccacgaagtctcatcgtccatgtaccaaatcgtgctctcaaacaggctgtgctgcttgaggctggtgcctcatcggagctatcggctgaggcggcatattgcgaatctgtttaatcaaaaactctctctcatcgaggaactgctcatcgtctgtgcgatcctccaggaagtgcgacaagaagtttagaagcttgtcccgattcataagcaggatcttctggacagcgatcgacttgtgcggattagccacaaagaccttaaagacgtgaaatccctcgtattgcaccatcttgcgatcgctccgcaagaggttcatgcagattttgagatggtcgcctcggtcgacgtaggcagtcatgacattatagtttgagcggtcgagtaatatctcgccgagcaacttaatggactgtcgtttcgtcacgtagctgcttgactgtacgagaatgctgttgtacttctcgaagaacagctcgaagtttacgtttaaatatcgcggtacgagctctttatgcttcgttaaaagttcctatagtcaaggcttgtcagtatttcggggtgtattgtgctggagcgatgtaggggatatgtacccgaaacgtggtgaaggcatcggcgccgacttcgaaggagctcttgtcgatccagtcgaagaacctccagaagacgccgttcccactctgcggtctttccctatcaatcgcggtgacacccttcagactcgaacctggctgctctccatcgtcataaagaatgatagctgcagcggcctcgctcttgagcacctcccgcagcaccgtgccggcgggtgtagcactctctttgtggtcgtagcctcgacatagctctagtaagacttctggccgattgttgacaacgtagcttaatgcgacgggatcggtcttgggtgaggccgttgtcggacggaagcggaagacgtaggacaagatgacctgggtgtctttgcgggcttcgaaggggaggcggtggaggttctgggcgaggaggaacaacaggtcctcttctatcaggccggtgacgagaccatatacctgttcgggtgtgctttcatactcttttgtggttcgggtgtcagcgtgacgtatacagcaacacgcataagacaggtacacataagcctgcatgggcgtaggacatgaggg

SEQ ID NO: 10077 - DNA, 2658 bp, Muscodor strobelii
  misc_feature: SGI cDNA ID NO. 563181
  misc_feature: Encodes the peptide sequence at SEQ ID NO 10078
atgggtgttgttcagcccactgagagtgttgttgagtttcacgagattaggctgcccgagaacatgacaatcaaggacgatccagtcaatgaagccggagctgataatccagagatggttgaatccagtccatccgccacagaatccatggacgaatacttgaagtacgtctttgaggtgacatatgttccaacccgagagcggctgcaagatattcaagaggatctctgccgctacctcggaaaggagactctactccccgagaaccaagattgtcaatcacttccgtattatggctactttagtaatgattgctttcattgggacttctcggcgctacgcaaatgcaagattgaataccggtcgtatacgaacagtccacatgaagcaaacggcactcaaaatcggttttctgtcagcgaatggggtgttaatttggcggatgacgcacttgaatacccatcggttgggagggcgtggcagattgtgccggactggtcatcaatgatcataagctccgaacttttgatgtttctcattagtatcttcggtctgaatagagtacttgagaataccgatactgaagatttcgagcggctctatttcccaatggttgttgatgaaatcagtcccgcatggaccataccaatctggggttccaaccgaatcgaccgacgaggagttaactcagaatactggtctcagcattacttcaaacttagggcgtgtgatcctgaaaatggttctcggggtagacgcgggcgtggcatgcgggagagcggacatgaacgcatttctcttcgacgtgaggcagccaaaatgccgggtcgtgatgggatcgcatcggtccatcatgtcgaatggctactgcatattgctgtggtccacagaagggtacgagggcgtaaaacctacacattaattggatggatagacagagcgctcctcattcggcctgttgagactatcgtaccgacaccacatgactgggaaaggtataaaatcaaatggtgcggaacaagcggcgctggatttgctcagtatttcctcatggtcgccaggggaatagatctctggtattttcgttggacagagactatggatcgccttcgtcgcacaattgcggttcagctcgatgatacttatgacgaggagaaatgggatgctctcatgtttgataaaaattttcagctctcgcgacaatactttacgatgcttcagctacttcgagtctaccgtggttgggtccgggacactgggatcgaattccaagatctaatagaacgtatcatgcagcatatcaagctggatcagggattacagcctaaccacgaagatcttgacatgactttattcgaagagaattgtaagacgattgtagcttatttggagtctgcagtggagcgcctggagaggagatttgcccgacaagtggaagaagtagaaagtttacgagatgggcttttcaatgcgtcatcactccgggaggcgcaaatattcaatgaggcatctcttcgagaaactttgaaggccaagacgttgaacatatacatttctattctgactctcataacggttattttcacaccccttggattcatagctgcattctgggccatcccgtatcagaccaatgatagcaagacgccgagacctaaatcatatataacaacctggctcgcagtgccactgggcacatatgttctatctgggctgctggtgctcctccctcgtctcaccgaatcgcccaaacaatcgaaacgaattcataaaaaccaagcaatcaaatccctcagatcttatcaaagaagaaaaatggcgaaaatattcgcaaaagacaacacagccgtgatcacaggcggagcctcaggcatcggccttgcgctctcgaagaaatgcgtcggctacggcatgcgtgtgctcatagccgactggaacacggagaatctcgaagctgcaaagaaagagcttggtgactctgtaactattgtgcagatggatgtcagtcaacttgaggactggagaaagatcactgagaagatcgagaaagactttgaaggaaaaatcaacctcctctccctcaacgccggtgtctcagcacccacctcattcactgcccctgacgcctcatccttccaaaagatcctcaacgtaaacctcttcggcgtcataaacggcctaaccaccctcgtccccctaatcaagtcctccgcctcagccaattcaccatcctcaataataataacaggttccaaacaaggcatcacaaaccctccaggaaacccagcatacaacgcctccaaagcggcagtgaaatcactcgccgagcacttatcctacgatatgcgctccgaggagaacatcagcgtgcatctcctcgttcccggatggacatggacacaactcgcgggtgcagcgagtggaagggagaagatgagtggtgcgtggtggcccgagcaagttgctgattatctcgagaagaagatgggggagggaagtttctgggttatttgtcctgataatgatgttacggaggatatggataagaagaggatgctttggagtgcgcaggatgctgtgcagagcaggccgccgttgagtaggtggagggatgagtataagggagagtttgaggggtggatgggtaaagatttgtag

SEQ ID NO: 10078 - protein, 885 aa, Muscodor strobelii
  misc_feature: SGI Peptide ID NO. 563181
  misc_feature (614)..(783): Pfam Id: PF00106 Pfam Desc: short chain dehydrogenase
  misc_feature (607)..(883): NCBI GI: 145613225 Blast Desc: MGG_01793 [Magnaporthe grisea 70-15] gi|145020349|gb|EDK04478.1| MGG_01793 [Magnaporthe grisea 70-15]
  misc_feature (610)..(883): NCBI GI: 18376033 Blast Desc: related to 20beta-hydroxysteroid dehydrogenase [Neurospora crassa]
  misc_feature (610)..(885): NCBI GI: 154295498 Blast Desc: BC1G_13374 [Botryotinia fuckeliana B05.10] gi|150844000|gb|EDN19193.1| BC1G_13374 [Botryotinia fuckeliana B05.10]
  misc_feature (609)..(883): NCBI GI: 46115066 Blast Desc: FG03375.1 [Gibberella zeae PH-1]
  misc_feature (606)..(885): NCBI GI: 169618275 Blast Desc: SNOG_12329 [Phaeosphaeria nodorum SN15] gi|111059022|gb|EAT80142.1| SNOG_12329 [Phaeosphaeria nodorum SN15]
  misc_feature (606)..(884): NCBI GI: 240279432 Blast Desc: short chain dehydrogenase/reductase [Ajellomyces capsulatus H143]
  misc_feature (638)..(880): NCBI GI: 261354815 Blast Desc: oxidoreductase [Verticillium albo-atrum VaMs.102]
  misc_feature (606)..(885): NCBI GI: 225680524 Blast Desc: short chain dehydrogenase/reductase [Paracoccidioides brasiliensis Pb03] gi|226292839|gb|EEH48259.1| conserved [Paracoccidioides brasiliensis Pb18]
  misc_feature (606)..(884): NCBI GI: 154279580 Blast Desc: conserved [Ajellomyces capsulatus NAm1] gi|150412546|gb|EDN07933.1| conserved [Ajellomyces capsulatus NAm1]
  misc_feature (606)..(884): NCBI GI: 225562626 Blast Desc: short-chain dehydrogenase/reductase [Ajellomyces capsulatus G186AR]
MGVVQPTESVVEFHEIRLPENMTIKDDPVNEAGADNPEMVESSPSATESMDEYLKYVFEVTYVPTRERLQDIQEDLCRYLGKETLLPENQDCQSLPYYGYFSNDCFHWDFSALRKCKIEYRSYTNSPHEANGTQNRFSVSEWGVNLADDALEYPSVGRAWQIVPDWSSMIISSELLMFLISIFGLNRVLENTDTEDFERLYFPMVVDEISPAWTIPIWGSNRIDRRGVNSEYWSQHYFKLRACDPENGSRGRRGRGMRESGHERISLRREAAKMPGRDGIASVHHVEWLLHIAVVHRRVRGRKTYTLIGWIDRALLIRPVETIVPTPHDWERYKIKWCGTSGAGFAQYFLMVARGIDLWYFRWTETMDRLRRTIAVQLDDTYDEEKWDALMFDKNFQLSRQYFTMLQLLRVYRGWVRDTGIEFQDLIERIMQHIKLDQGLQPNHEDLDMTLFEENCKTIVAYLESAVERLERRFARQVEEVESLRDGLFNASSLREAQIFNEASLRETLKAKTLNIYISILTLITVIFTPLGFIAAFWAIPYQTNDSKTPRPKSYITTWLAVPLGTYVLSGLLVLLPRLTESPKQSKRIHKNQAIKSLRSYQRRKMAKIFAKDNTAVITGGASGIGLALSKKCVGYGMRVLIADWNTENLEAAKKELGDSVTIVQMDVSQLEDWRKITEKIEKDFEGKINLLSLNAGVSAPTSFTAPDASSFQKILNVNLFGVINGLTTLVPLIKSSASANSPSSIIITGSKQGITNPPGNPAYNASKAAVKSLAEHLSYDMRSEENISVHLLVPGWTWTQLAGAASGREKMSGAWWPEQVADYLEKKMGEGSFWVICPDNDVTEDMDKKRMLWSAQDAVQSRPPLSRWRDEYKGEFEGWMGKDL

SEQ ID NO: 10079 - DNA, 1545 bp, Muscodor strobelii
  misc_feature: SGI EST ID NO. CUFF.23807.1
  misc_feature: Variant of the nucleotide sequence at SEQ ID NO 10077
ttacttcaaacttagggcgtgtgatcctgaaaatggttctcggggtagacgcgggcgtggcatgcgggagagcggacatgaacgcatttctcttcgacgtgaggcagccaaaatgccgggtcgtgatgggatcgcatcggtccatcatgtcgaatggctactgcatattgctgtggtccacagaagggtacgagggcgtaaaacctacacattaattggatggatagacagagcgctcctcattcggcctgttgagactatcgtaccgacaccacatgactgggaaaggtataaaatcaaatggtgcggaacaagcggcgctggatttgctcagtatttcctcatggtcgccaggggaatagatctctggtattttcgttggacagagactatggatcgccttcgtcgcacaattgcggttcagctcgatgatacttatgacgaggagaaatgggatgctctcatgtttgataaaaattttcagctctcgcgacaatactttacgatgcttcagctacttcgagtctaccgtggttgggtccgggacactgggatcgaattccaagatctaatagaacgtatcatgcagcatatcaagctggatcagggattacagcctaaccacgaagatcttgacatgactttattcgaagagaattgtaagacgattgtagcttatttggagtctgcagtggagcgcctggagaggagatttgcccgacaagtggaagaagtagaaagtttacgagatgggcttttcaatgcgtcatcactccgggaggcgcaaatattcaatgaggcatctcttcgagaaactttgaaggccaagacgttgaacatatacatttctattctgactctcataacggttattttcacaccccttggattcatagctgcattctgggccatcccgtatcagaccaatgatagcaagacgccgagacctaaatcatatataacaacctggctcgcagtgccactgggcacatatgttctatctgggctgctggtgctgtttgtatatacacaagcttttcgcactgctcgagaacatattcaagctacaagaggctggaattaccctctagagcttttatggacgttggtatcagggccgttctggctctgcagccttctcctacgatctgtacattggtcaaaaggcaaatgggtagacaatgtttggccctttttggggagggaaaggcaaacctcagtggcggaaccttagcaaaccagtgacaacataatctgtatcgtagaagacaactggttgtctaacggcgctggaactttggatttatgaagagtctacattatcaagtccttcattttctaccttttaacatccatagttgaggtaggtttagttatcttgtatttatcgccaataaagcaatatctgagtgcaactgggtccaaaaggggactgcattgcgaccttccaaagtcctaacatgatccctaacgatacagcttgcaaatctaattctggagacgctgtgatcagtaaacgccgactcaatatcgtgactaggcaag

SEQ ID NO: 10080 - DNA, 1584 bp, Muscodor strobelii
  misc_feature: SGI cDNA ID NO. 563182
  misc_feature: Elevated expression when VOC is produced
  misc_feature: Encodes the peptide sequence at SEQ ID NO 10081
atgggcattcatcctgccaacaagagcgctacagagatccgaccgactgataacttatctatcgatgaaaatactactcatgaatcgcctgtcgataacgcgatcacagatcatcatgatccagtcgccacagaaccccggaatgaggatctaaaatacctgttcaatcatactgtcccgactctgaagcgactggatcagtgtcgaaactacctccacaagtactacgcattttgggcccgcattccccccaattttgaagatcagccgattccacgatttggaagcacgggacacgactgctttcattggaaactgacaggactggacgtatccagaatccaatatcgatcgtacacggacgctccacacgaaaatgatggcatcgggaataatttctcccttgacccgtggttgtcatcattccaattgatgagtttagaatcacccacgtcgctgggtgatcatactccggtagtcacttatccatcgcttggcgaagcgtggcgtccacttctagacgagaaaccagagcagaaagaatcatcctccagtgatttgattttcaaccgtgaaacagcagaaatcccaggtcgcgatggaatcaaaccatttcaaacagtggagtggctgctgtctgctacgataatctttaggcacatccgagggtgtgcaacttatacattgatcggttggaaggactatgggcgcgaatcgttccattcgcacaaatactggcatctttttgacggagacataacacccagccctgctgactggaagagatatgaaattaagttttgtggagaaggcggtgttggatatgctcaattcctgatcatggttgcaagagccgtagatttatggtacgtcagctggatagacacgatggactgccttagtcaaacagtcggaattcggcttgacgacactcacaacaagcagaaaatggaaacattcatgtttgataacgattttcagctctcccgtcagtacttcacgatacttcagctgatcagagtctatcgaaattgggttcaggacaccaagcttgactccaaagcactgttcaaaaagataaagagtcgcgcgcaggaaagacacgagagtgtagacatgactgctcttgaagagaattgcgacacaattgcaacccatatggattttacgatcgagcgcctggagcagagatttgctcagcaaatagaggaaatagaaagcttgcgcgatgggctctttaatgcgtcgtctcttcgagaggcagtcaaagctaaaacattgaacatatccatctccatcctcaccgtcgtaactgtcatttttacccctcttggattcatggctacattctgggcgttaccttacgagacggagagagatcgaccgagacccgcatcatatctcatgagttggcttgcaataccgcttggaacgtatctgttgtctggtctgctggtgctgattgtatggttgcgagtcattcctagactcaaaacttggttcgcggccttgtcatcaaagaaacgggcacctcgacaaagaaggagacgctcggatatagaagggatcgcggatcaaatatga

SEQ ID NO: 10081 - protein, 527 aa, Muscodor strobelii
  misc_feature: SGI Peptide ID NO. 563182
  misc_feature (277)..(447): NCBI GI: 46134027 Blast Desc: FG09153.1 [Gibberella zeae PH-1]
  misc_feature (289)..(448): NCBI GI: 119501615 Blast Desc: NFIA_044860 [Neosartorya fischeri NRRL 181] gi|119415730|gb|EAW25667.1| NFIA_044860 [Neosartorya fischeri NRRL 181]
  misc_feature (250)..(448): NCBI GI: 171676599 Blast Desc: protein product [Podospora anserina] gi|170936366|emb|CAP61024.1| protein product [Podospora anserina]
  misc_feature (321)..(519): NCBI GI: 116198769 Blast Desc: [Chaetomium globosum CBS 148.51] gi|88178819|gb|EAQ86287.1| [Chaetomium globosum CBS 148.51]
  misc_feature (190)..(457): NCBI GI: 116197541 Blast Desc: [Chaetomium globosum CBS 148.51] gi|88178205|gb|EAQ85673.1| [Chaetomium globosum CBS 148.51]
  misc_feature (350)..(454): NCBI GI: 154291860 Blast Desc: BC1G_14946 [Botryotinia fuckeliana B05.10] gi|150846554|gb|EDN21747.1| BC1G_14946 [Botryotinia fuckeliana B05.10]
  misc_feature (266)..(455): NCBI GI: 115385843 Blast Desc: [Aspergillus terreus NIH2624] gi|114187915|gb|EAU29615.1| [Aspergillus terreus NIH2624]
  misc_feature (276)..(491): NCBI GI: 212539602 Blast Desc: conserved [Penicillium marneffei ATCC 18224] gi|210067255|gb|EEA21347.1| conserved [Penicillium marneffei ATCC 18224]
  misc_feature (309)..(491): NCBI GI: 71002786 Blast Desc: conserved [Aspergillus fumigatus Af293] gi|66853712|gb|EAL94036.1| conserved [Aspergillus fumigatus Af293]
  misc_feature (309)..(491): NCBI GI: 159130128 Blast Desc: conserved [Aspergillus fumigatus A1163]
  misc_feature: Useful for introducing or modulating the production of volatile compounds
MGIHPANKSATEIRPTDNLSIDENTTHESPVDNAITDHHDPVATEPRNEDLKYLFNHTVPTLKRLDQCRNYLHKYYAFWARIPPNFEDQPIPRFGSTGHDCFHWKLTGLDVSRIQYRSYTDAPHENDGIGNNFSLDPWLSSFQLMSLESPTSLGDHTPVVTYPSLGEAWRPLLDEKPEQKESSSSDLIFNRETAEIPGRDGIKPFQTVEWLLSATIIFRHIRGCATYTLIGWKDYGRESFHSHKYWHLFDGDITPSPADWKRYEIKFCGEGGVGYAQFLIMVARAVDLWYVSWIDTMDCLSQTVGIRLDDTHNKQKMETFMFDNDFQLSRQYFTILQLIRVYRNWVQDTKLDSKALFKKIKSRAQERHESVDMTALEENCDTIATHMDFTIERLEQRFAQQIEEIESLRDGLFNASSLREAVKAKTLNISISILTVVTVIFTPLGFMATFWALPYETERDRPRPASYLMSWLAIPLGTYLLSGLLVLIVWLRVIPRLKTWFAALSSKKRAPRQRRRRSDIEGIADQI

SEQ ID NO: 10082 - DNA, 3106 bp, Muscodor strobelii
  misc_feature: SGI EST ID NO. CUFF.23827.0
  misc_feature: Variant of the nucleotide sequence at SEQ ID NO 10080
ggcgattctataacaacatcgccttcgagtgaaattatacttcgtcatctagcatctattccatgctcatttaccagatacgttgatatacgttcaaatttcgtttttccccaagcgtccaataatactttaacttctctatccccgcctgttctcccatttcttgggatgcaatcatcaaggctagattccgcctccatatatattcccattatctcaaaacaggtacatgagaaaatgggcattcatcctgccaacaagagcgctacagagatccgaccgactgataacttatctatcgatgaaaatactactcatgaatcgcctgtcgataacgcgatcacagatcatcatgatccagtcgccacagaaccccggaatgaggatctaaaatacctgttcaatcatactgtcccgactctgaagcgactggatcagtgtcgaaactacctccacaagtactacgcattttgggcccgcattccccccaattttgaagatcagccgattccacgatttggaagcacgggacacgactgctttcattggaaactgacaggactggacgtatccagaatccaatatcgatcgtacacggacgctccacacgaaaatgatggcatcgggaataatttctcccttgacccgtggttgtcatcattccaattgatgagtttagaatcacccacgtcgctgggtgatcatactccggtagtcacttatccatcgcttggcgaagcgtggcagattacgcgtggtagatcggccgcagctatgagctttaaacatatcatgctactaagtacttttcttgctccctgttttaaaggggccgacattcaccctagagatgattggttctatgagttagtccgtttcatatcctttaccaagtttcggcttacattgtcatcggccttgtgtgaagttgactcgtgccgtttactgtatatccagttaaatctgcgagcatgtattgttacccccagtaggcgtccacttctagacgagaaaccagagcagaaagaatcatcctccagtgatttgattttcaaccgtgaaacagcagaaatcccaggtcgcgatggaatcaaaccatttcaaacagtggagtggctgctgtctgctacgataatctttaggcacatccgagggtgtgcaacttatacattgatcggttggaaggactatgggcgcgaatcgttccattcgcacaaatactggcatctttttgacggagacataacacccagccctgctgactggaagagatatgaaattaagttttgtggagaaggcggtgttggatatgctcaattcctgatcatggttgcaagagccgtagatttatggtacgtcagctggatagacacgatggactgccttagtcaaacagtcggaattcgggtgagaacatatatccagcttagtgtggtcgatgaagtggctgatacatgatttagcttgacgacactcacaacaagcagaaaatggaaacattcatgtttgataacgattttcagctctcccgtcagtacttcacgatacttcagctgatcagagtctatcgaaattgggttcaggacaccaagcttgactccaaagcactgttcaaaaagataaagagtcgcgcgcaggaaagacacgagagtgtagacatgactgctcttgaagagaattgcgacacaattgcaacccatatggattttacgatcgagcgcctggagcagagatttgctcagcaaatagaggaaatagaaagcttgcgcgatgggctctttaatgcgtcgtctcttcgagaggcagtcaaagctaaaacattgaacatatccatctccatcctcaccgtcgtaactgtcatttttacccctcttggattcatggctgtacgcacaatcctaaatattcaacgccagacaagaactcgatgattgatactctatagacattctgggcgttaccttacgagacggagagagatcgaccgagacccgcatcatatctcatgagttggcttgcaataccgcttggaacgtatctgttgtctggtctgctggtgctgattgtatggttgcgagtcattcctagactcaaaacttggttcgcggccttgtcatcaaagaaacgggcacctcgacaaagaaggagacgctcggatatagaagggatcgcggatcaaatatgaaagagggcaaatggagaagaagagaccgaaactccacgacatatcttagagcttaccaatggttaaaatgattcttagcaaaggatacctaatatatgtactgtaaaagtcatcgtgttgatagaaaagtagatggtgaaattctcctggggagcacatttgcgatttgagattttctaatagcagcatcagcttctttacggtttttggttaatgatcgattgtgtcaaggaaagggttgtttcacgattgtgtcatatttttgccgatgacatttgtactattcttattgttcgttgtaccattcccatcaggtacattacttgagtctacatcgtgggaacccccgggtcattcggttgaacgaagcgtcgaaccatttacagcagtggaaaactgtccatgttcaaaagatacatgatgcattcatatgaactgtaacgatgctccagatgttccacgggagcaaacaaccattaggtatagggtttgggtcgtattgacacttcataccagttcatagtagtcacacgacttgtgaggggtactgactacaagaagtaggaaatttgggccatcagctttcttgaataaaggtacggatccgaagcttatgggatcctttctgggcttcatcatgagtatttctcgacttcaaactcgcgggcgatgatctttggttcagttgtcgaagtcattgttccaacgatagcacacgaagtgaaaggtcgtatgaatctgatgccgatatcctatgaaagtcgtgggcttagagcggggttcgtgtcgtacagtataggtctgtgatttgaagagttgcacatctctttctgaactttacttcgggatagaagatgaagaagcttgtaagcaaagaggttctaagataacatgattgagcactaaatgacacaggttttt

SEQ ID NO: 10083 - DNA, 1596 bp, Muscodor strobelii
  misc_feature: SGI cDNA ID NO. 563183
  misc_feature: Reduced expression when VOC is produced
  misc_feature: Encodes the peptide sequence at SEQ ID NO 10084
atgcagcccggctaccgtccctacccgccgcagcagccgcctccgcagcaggtcggcatgatggcacaacaacaacagcaacaacaccaggtccagcagcagcaggcgcaacagcagcagcaacgcactccgcattccagtggccagcgccgaggaggcattggtcccatgatgtcgtccggtccgcatcaccaggttcccttgacccaagcccaggtggctcagcagcagcaacaggcagcgatgcagttcgagatggccaagcgtcggagtcgcaaacccaccgacaagaatcttcccgatggtatcgacgactgcatagtgggtgatatggcccacagatatcgagagctgcgagacttcgagcgaagattggatgcttccatgaccaggaaacgattagatattgtggattcggtcaaccgcagtgtgaagcgatggaagacacttcgcatatggatcaccaacaccgcggacgaccagaactggcaagccagcggcggcctaaacgtggacaccttcgatttcagctcgaacctcgaacccagctacaaagtcaagattgaaggtcgactgcttgatgacgatgacgatctggacaattatgaggccgggaaggatggcggtgaagaggccaaagacgcagataaaatggatgaagacacagagcctcagtcaaagccgacgaagcagcccagatatcgattctcccatttcttcaaggctatgtcggttgacttccccgccaacaaaggaaatgcagagtcgagcgtcgagtggaagaagcctgagcggaccagcggctctgcaaatgcaacaccgcaaggcgtggacttcgacgagcttaccttcaaccatagcggcgatgaaaatctcacaatctccatcaacctaacccgccacgaagaccccgaacgatatgccctaagcccagtgctcgaagacatcgtagatatgcaggagggcactcggcaagaagttgtcatggctgtctgggagtacatcaagttcatgggcttgtgtgaagacgaggaaaagagaaacttcagatgcgacgatgtgttacgtcacgtcttcggcattgaaacaggagctgtccccaagctcgccgattacgtctcgccgcatctacaacccctacctcctgttcaacttccctacacaattcgtctggacgaggagttccataagaacccccagcctactatctacgacgtccgtgttgccgttgacgatccgctacgggagcaaatgagtgctttcttgaccaatcctggctacgcaagcatgctgaaagaagtcgcttccttggacgagcagttggcagtcatagtacaggctatccacgtttccaaggcgaagcatgactttctctcttctctcagcaaagacccggccactttcatacggaattggctgagctcgcagaaacgggatctcgacgtgatcctgggtgaagctatgagaggcagcgacgagcctagcggagacgagtggcgcaagggaggtccagatagtatctggggcacgatgaatgcgcgcgagagcgtcaacgctatgcttgcgagacaacaagctcagccgcctagacagtag

SEQ ID NO: 10084 - protein, 531 aa, Muscodor strobelii
  misc_feature: SGI Peptide ID NO. 563183
  misc_feature (303)..(378): Pfam Id: PF02201 Pfam Desc: SWIB/MDM2 domain
  misc_feature (36)..(525): NCBI GI: 46138419 Blast Desc: FG10724.1 [Gibberella zeae PH-1]
  misc_feature (36)..(525): NCBI GI: 256728984 Blast Desc: SWI/SNF complex protein [Nectria haematococca mpVI 77-13-4]
  misc_feature (57)..(524): NCBI GI: 28881132 Blast Desc: related to SWI/SNF complex 60 KDa subunit [Neurospora crassa]
  misc_feature (57)..(524): NCBI GI: 164427505 Blast Desc: NCU03572 [Neurospora crassa OR74A] gi|157071770|gb|EAA26775.2| conserved [Neurospora crassa OR74A]
  misc_feature (57)..(528): NCBI GI: 171690004 Blast Desc: protein product [Podospora anserina] gi|170944957|emb|CAP71068.1| protein product [Podospora anserina]
  misc_feature (52)..(528): NCBI GI: 145613223 Blast Desc: MGG_01794 [Magnaporthe grisea 70-15] gi|145020348|gb|EDK04477.1| MGG_01794 [Magnaporthe grisea 70-15]
  misc_feature (33)..(522): NCBI GI: 154295496 Blast Desc: BC1G_13373 [Botryotinia fuckeliana B05.10] gi|150843999|gb|EDN19192.1| BC1G_13373 [Botryotinia fuckeliana B05.10]
  misc_feature (33)..(522): NCBI GI: 156034436 Blast Desc: SS1G_13521 [Sclerotinia sclerotiorum 1980] gi|154698924|gb|EDN98662.1| SS1G_13521 [Sclerotinia sclerotiorum 1980]
  misc_feature (37)..(507): NCBI GI: 261352950 Blast Desc: BRM-associated protein [Verticillium albo-atrum VaMs.102]
  misc_feature (38)..(526): NCBI GI: 67527965 Blast Desc: AN4225.2 [Aspergillus nidulans FGSC A4] gi|40740134|gb|EAA59324.1| AN4225.2 [Aspergillus nidulans FGSC A4]
  misc_feature: Useful for introducing or modulating the production of volatile compounds
MQPGYRPYPPQQPPPQQVGMMAQQQQQQHQVQQQQAQQQQQRTPHSSGQRRGGIGPMMSSGPHHQVPLTQAQVAQQQQQAAMQFEMAKRRSRKPTDKNLPDGIDDCIVGDMAHRYRELRDFERRLDASMTRKRLDIVDSVNRSVKRWKTLRIWITNTADDQNWQASGGLNVDTFDFSSNLEPSYKVKIEGRLLDDDDDLDNYEAGKDGGEEAKDADKMDEDTEPQSKPTKQPRYRFSHFFKAMSVDFPANKGNAESSVEWKKPERTSGSANATPQGVDFDELTFNHSGDENLTISINLTRHEDPERYALSPVLEDIVDMQEGTRQEVVMAVWEYIKFMGLCEDEEKRNFRCDDVLRHVFGIETGAVPKLADYVSPHLQPLPPVQLPYTIRLDEEFHKNPQPTIYDVRVAVDDPLREQMSAFLTNPGYASMLKEVASLDEQLAVIVQAIHVSKAKHDFLSSLSKDPATFIRNWLSSQKRDLDVILGEAMRGSDEPSGDEWRKGGPDSIWGTMNARESVNAMLARQQAQPPRQ

SEQ ID NO: 10085 - DNA, 2967 bp, Muscodor strobelii
  misc_feature: SGI EST ID NO. CUFF.24021.2
  misc_feature: Variant of the nucleotide sequence at SEQ ID NO 10083
gcagacgcgacttttaacgacaggcaaatttccggccagagtaatcaatcgggctaagttcagaccagtgttgtaatcgaccccagtccactcgccaacccactccagtcttctgtgacggtttagacagtggacaatcggtgaatccgtgatccgcgcttcaaggttggcgtcgcacgctcctgccaccaaactaggcgcgaaggggggcaatcgagtctcacaaaatcagagaccccaatacaacagcgacgtatcgtgacgaggcagccagactcagtcacaatgcagcccggctaccgtccctacccgccgcagcagccgcctccgcagcaggtcggcatgatggcacaacaacaacagcaacaacaccaggtccagcagcagcaggcgcaacagcagcagcaacgcactccgcattccagtggccagcgccgaggaggcattggtatgtatcctcaatttaaatagattgcagctactctacttgactatatgcacacttggggccgtgccggtctccgtcccgggccttggctgggtccacgatggttcgatggcaagctccatccgatctccatcttcgctccattgctccattcttccttgactccctttcccatgatccccacataactctctgctccaccggcctggatcttcgagtgctcagatcgttttttcctatctgagggcccttgtcgtgtcgtgctcgcgcgcagcttgtcgctggtctgacatgtcccttgtctgtctctgcttgtgaatcatcactgttgctgtcgccagcgtcgcagctgcccgccattgccgaatcacgccacgccacgttttgccctgctgttttaacctcgggcctttcctcttcttatctctactgtctcatcccactgtgggtgccgtcaacgcgcttgcgcttattcagcagcagcgtcctgtcgtctcccaaccatcatctctgacatcctctgatacaggtcccatgatgtcgtccggtccgcatcaccaggttcccttgacccaagcccaggtggctcagcagcagcaacaggcagcgatgcagttcgagatggccaagcgtcggagtcgcaaacccaccgacaagaatcttcccgatggtatcgacgactgcatagtgggtgatatggcccacagatatcgagagctgcgagacttcgagcgaagattggatgcttccatgaccaggaaacgattagatattgtggattcggtcaaccgcagtgtgaagcgatggaagacacttcgcatatggatcaccaacaccgcggacgaccagaactggcaagccagcggcggcctaaacgtggacaccttcgatttcagctcgaacctcgaacccagctacaaagtcaagattgaaggtcgactgcttgatgacgatgacgatctggacaattatgaggccgggaaggatggcggtgaagaggccaaagacgcagataaaatggatgaagacacagagcctcagtcaaagccgacgaagcagcccagatatcgattctcccatttcttcaaggctatgtcggttgacttccccgccaacaaaggaaatgcagagtcgagcgtcgagtggaagaagcctgagcggaccagcggctctgcaaatgcaacaccgcaaggcgtggacttcgacgagcttaccttcaaccatagcggcgatgaaaatctcacaatctccatcaacctaacccgccacgaagaccccgaacgatatgccctaagcccagtgctcgaagacatcgtagatatgcaggagggcactcggcaagaagttgtcatggctgtctgggagtacatcaagttcatgggcttgtgtgaagacgaggaaaagagaaacttcagatgcgacgatgtgttacgtcacgtcttcggcattgaaacaggagctgtccccaagctcgccgattacgtctcgccgcatctacaacccctacctcctgttcaacttccctacacaattcgtctggacgaggagttccataagaacccccagcctactatctacgacgtccgtgttgccgttgacgatccgctacgggagcaaatgagtgctttcttgaccaatcctggctacgcaagcatgctgaaagaagtcgcttccttggacgagcagttggcagtcatagtacaggctatccacgtttccaaggcgaagcatgactttctctcttctctcagcaaagacccggccactttcatacggaattggctgagctcgcagaaacgggatctcgacgtgatcctgggtgaagctatgagaggcagcgacgagcctagcggagacgagtggcgcaagggaggtccagatagtatctggggcacgatgaatgcgcgcgagagcgtcaacgctatgcttgcgagacaacaagctcagccgcctagacagtagctgagattacgattgcgcgatgagcttagtgtgcctgtatcaggatatggcgtgtaatacgtgggttggtgttcagaggtgcggacgttgaaatgagggagagagaacacgggttaaggcgggtgggatgctgttgctgtacttctattgtttctcttacatgatatccttcaagtctgaaaaaagggcagctcggcttgcagctgctggcgtagagggcaaccgtatcacgagtgctgggtatagttactttactcttttgaatagagactaaataggtttactgcaacttcatttgttgagcggtcttctttattaaatcttcaaagccgagcgagtccgcagacctcaagaattgggtcgttgttgtattgtgggcttgcgagaagattaactgcctatgacaactttctagacccagcattattcctccgagaatgttcacaatcgttccgtcgagataggaggaggaaagggacatatggaatattaataatagttggatgcgcgatcgtcatctcgatgacgatagtgtcgagaaagaagttagatatgta

SEQ ID NO: 10086 - DNA, 2397 bp, Muscodor strobelii
  misc_feature: SGI cDNA ID NO. 563184
  misc_feature: Reduced expression when VOC is produced
  misc_feature: Encodes the peptide sequence at SEQ ID NO 10087
atgaacaacgacctcagcctgtcgagggctcttggcggtctgcgtatcgcaaatgcagatccagatgatggcacttcgagcccaccgccgcctgagccccaggcccaccccgatccaaccactaccactcaaactgcagtgcaagatgcccggcccgaaatagagccccagacgaggccaagcagatctcataccaatgagtcgatcagtgcaagcctcgccaaggtggaatccggaacacacagctcaccgagtactatgagaaaccagaactcgcaatactcaagctcctcttcacgacccatgtcgacaacactatacaatgctgtacctactgccccgggctacgaccaagctgcaaactcctatcacctctttagaacagaacccgccccagcgcccacgtaccccgagtccggcaggacagcaccagctatagagtacgcacccgacatcccctcgcgagaatccagccacagagaccggtcctaccaccaaaaccgccaatctacgaccgcgtcccccgtggcacctgagccccgaggccgcggattagagctaccggggtcgctccccggtaccaccggcagcgaggagtggaaagatcgaggcgccgccacgggcatgcgaaaagaagtcgacgctaatggcaggacggtcatgaagccagtgaagaaaggcgttcgcgacttcacctttggccagatcctgggagagggttcctacagcaccgtctttcttgcaacggatcgacagaccttgaaggaatacgcgatcaaagtgctcgaaaagagacacattataaaagagaagaagatcaaatacgtcaatatcgagaaggatacactgaatcgtctaactgagcaccccggcatagttcggctatactatacattccaggatgagaattccctatactatgtgctggatctgtgcagcggcggtgagcttctcggcgtattgaagaaaacaggcacattcgacgtggagtgcacgaggttctttggagctcaaatattagacgccatcgagtatatgcactcgcgtggggtgatacatcgtgacttgaagcccgagaatgtccttttagacgatcagctgcacgtcaaaatcacagatttcggaacggccaggttattgagcgacccaagagcgccacaggcgccaccacgcatcgaagatacagggacaagctccaggggtagaaaccaggacgacagccgcgcagcctcgtttgttggcaccgctgagtatgtcagtccagagctgcttaccaacaagaatgcttgcaaggctagtgatctttgggcttttggatgcatcatctatcagttattggcaggccgaccacccttcaaaggtggttcggagtacctaactttccaaaagatcgtcagccttgaatatgagttccccgccgggtttcctcccgcagcccgagaccttgttgagcgatgcctcgtgctcgacccagctctaaggttaaccattgagcacataaaaaatcatgagttcttcgacaatcagccattcggcaagaacttatggaagacaaaggctcctaggctgcgaccttacatacccccgtctcatgaaccgaagatcattcaactgaatggcatgtccggctcccaacactccaatgcaaatgctcggccacgaactggtggcaacgacatgaatggtggcagccgtacacctggacgcattatcaccgatattcctcccccatcccagcttgacattgaatggtcgccggtattaaccaaaacgaatgagaggattctgcgactgggcgacctcatggtcttgtcatctgcgatatcaaatagtggcaagggcgatgaagcgccccggaagtttgctcgattttttggtgggagcacgacgaagaagaggcagagacttgtcctgatcacctccagtggaaggataatactcgcgccttctggcggcgaagacaagaaagcaaaacaggaaatatcactactcgcgcctgactgctcttggaagacacagaccgatgccaaaggccaggccgtctggtgtgtcgactcggccggctatcattacacattcgaggaagtgaaggcaccatcatctctcgacccgcctggaccatcacctgacgattgggttgagagtcttcaacgagctaaggatctggctgtgtctacaaatctatcaggagcttatgctaccgacaatgggtttggggatgcctcgtccatgtctagccctactagtacatttggccccgagagcagctatggcgtgagtgaccgccatcgcaaccatatggggagaagtcaagcaagcctagaggatacatcgagtaccaaacgccatcgattcagcaaacggcagtctaagcaaggactaggcgctgccttctaa

SEQ ID NO: 10087 - protein, 798 aa, Muscodor strobelii
  misc_feature: SGI Peptide ID NO. 563184
  misc_feature (231)..(506): Pfam Id: PF00069 Pfam Desc: Protein kinase domain
  misc_feature (231)..(382): Pfam Id: PF07714 Pfam Desc: Protein tyrosine kinase
  misc_feature (1)..(798): NCBI GI: 261352951 Blast Desc: serine/threonine-protein kinase ksg1 [Verticillium albo-atrum VaMs.102]
  misc_feature (1)..(798): NCBI GI: 46138421 Blast Desc: FG10725.1 [Gibberella zeae PH-1]
  misc_feature (1)..(798): NCBI GI: 39952305 Blast Desc: MGG_01795 [Magnaporthe grisea 70-15] gi|145020347|gb|EDK04476.1| MGG_01795 [Magnaporthe grisea 70-15]
  misc_feature (130)..(798): NCBI GI: 171690002 Blast Desc: protein product [Podospora anserina] gi|170944956|emb|CAP71067.1| protein product [Podospora anserina]
  misc_feature (153)..(798): NCBI GI: 28881133 Blast Desc: related to 3-phosphoinositide dependent protein kinase-1 (PDK1) [Neurospora crassa]
  misc_feature (152)..(798): NCBI GI: 154295500 Blast Desc: BC1G_13375 [Botryotinia fuckeliana B05.10] gi|150844001|gb|EDN19194.1| BC1G_13375 [Botryotinia fuckeliana B05.10]
  misc_feature (1)..(732): NCBI GI: 164427503 Blast Desc: NCU03571 [Neurospora crassa OR74A] gi|157071769|gb|EAA26774.2| conserved [Neurospora crassa OR74A]
  misc_feature (1)..(798): NCBI GI: 67525305 Blast Desc: AN3110.2 [Aspergillus nidulans FGSC A4] gi|40744505|gb|EAA63681.1| AN3110.2 [Aspergillus nidulans FGSC A4] gi|259485940|tpe|CBF83388.1| TPA: serine/threonine protein
  misc_feature (1)..(798): NCBI GI: 159127369 Blast Desc: serine/threonine protein kinase, [Aspergillus fumigatus A1163]
  misc_feature (1)..(798): NCBI GI: 70999270 Blast Desc: serine/threonine protein kinase [Aspergillus fumigatus Af293] gi|66851991|gb|EAL92316.1| serine/threonine protein kinase, [Aspergillus fumigatus Af293]
  misc_feature (223)..(724): SWISSPROT Homolog: EC 2.7.11.1 Non-specific serine/threonine protein kinase
  misc_feature: Useful for introducing or modulating the production of volatile compounds
MNNDLSLSRALGGLRIANADPDDGTSSPPPPEPQAHPDPTTTTQTAVQDARPEIEPQTRPSRSHTNESISASLAKVESGTHSSPSTMRNQNSQYSSSSSRPMSTTLYNAVPTAPGYDQAANSYHLFRTEPAPAPTYPESGRTAPAIEYAPDIPSRESSHRDRSYHQNRQSTTASPVAPEPRGRGLELPGSLPGTTGSEEWKDRGAATGMRKEVDANGRTVMKPVKKGVRDFTFGQILGEGSYSTVFLATDRQTLKEYAIKVLEKRHIIKEKKIKYVNIEKDTLNRLTEHPGIVRLYYTFQDENSLYYVLDLCSGGELLGVLKKTGTFDVECTRFFGAQILDAIEYMHSRGVIHRDLKPENVLLDDQLHVKITDFGTARLLSDPRAPQAPPRIEDTGTSSRGRNQDDSRAASFVGTAEYVSPELLTNKNACKASDLWAFGCIIYQLLAGRPPFKGGSEYLTFQKIVSLEYEFPAGFPPAARDLVERCLVLDPALRLTIEHIKNHEFFDNQPFGKNLWKTKAPRLRPYIPPSHEPKIIQLNGMSGSQHSNANARPRTGGNDMNGGSRTPGRIITDIPPPSQLDIEWSPVLTKTNERILRLGDLMVLSSAISNSGKGDEAPRKFARFFGGSTTKKRQRLVLITSSGRIILAPSGGEDKKAKQEISLLAPDCSWKTQTDAKGQAVWCVDSAGYHYTFEEVKAPSSLDPPGPSPDDWVESLQRAKDLAVSTNLSGAYATDNGFGDASSMSSPTSTFGPESSYGVSDRHRNHMGRSQASLEDTSSTKRHRFSKRQSKQGLGAAF

SEQ ID NO: 10088 - DNA, 4704 bp, Muscodor strobelii
  misc_feature: SGI EST ID NO. CUFF.24088.1
  misc_feature: Variant of the nucleotide sequence at SEQ ID NO 10086
tataccctatatatagcatgacagttttgatctttacaagacatgtatctaacgtcattcttcaatattgttccgcgatgctatcgtcttctgaggcagggatggaattgttccgcttggccaaatgatcgaaggacaacttccgtatgcacgttctagtcgcatatttcgctattgctgagtggttatagaagatctagatgcaaactgtgctatcaaaaaattccatgaatgaagtatgacacctgagtatgcgttgcgtggatcaattgcagagaacgaatgctaatagtaggccaaacagagaggttggccggagtcgagcctccaatgaggttcaatgattgccaggcaacagtttacaccaaatacgaatccaagtgtcaagatggagacggtgatacaacaaatgcaaaatttcgttcggggcagaaggtagaacagcaaaattgtacgaggagaggatgcatcttacgactgggtgcatatgcaccataaaaatagaaacgattgtaagctccatggctgcggatgaaatcttatgttgtctcttccatcaatgtggccaacgaacgcatccaaaaccggggggcctgtcaaatatccagtgattaacaatgaatacgtccaagtgaatgaggcgcttcacgatgtgcacgtggaagcgcagacaacagacagcatgttgactaataaaatgatatggcttgcgaaaccttgggggcagagctattcgtattgttgagagatagcacatgaatgattgagtggccgtgggatggatgaatggcaactttgatgtgcacatgttatatgaagaacatggacacgggcaacggaaccttgaaataatcgggcatgttaatcctttttgtacgacaatttcatactgtcctcgattgctttcagaaattacctattcgtgcttctacttgtcgcaagacccatggacaacgacagctttcgccccatgatcaacaccgttgtattcgatgttatcattacccatcggcagctttgcacaaatacacatatctcctaggcattgatttatttaaacacgactgggcttatatcggtcgcctacgagcgtacggtctattgttgacttagttgacttttgggaccgcaagcgaccggatctgaaattaactgcggaccacggtgcagtgcactactgacatcaggtaccaccttaagccggcgataatttcccatccaccaagacacgaccagattctccgtgccggacagccacgcgcatcttcatcttcctctctctcccactcggtcccttgacgcctggtctcctggtcttggttacctagctgcttgtcctcgaccgtgttgcgctcgccaccagccacggcaccaccggcatgtcatctcccccatcacgatcccgccatcctcgagcctagacgctcgtcaccgtctcccgtgcacgcagatatccagtgtggcaagccgctctcttgccattctagctactcctcatgagcaggacctcttgcgtcgaccatctgcgacgactggcgattgatcctgctgctcgcagtcgctccatgttggtctgaagagggccgcacggcttggctggttcgttcgttgtctctgcagcatcgtcgcccaactccactccacgatatcacataaacgacactcgcctacgtctcctcacgctcgatcctactcagatacgatacctaagtcaatcgaatacacacctacagcctccttcaacccgaaatccaccatgaacaacgacctcagcctgtcgagggctcttggcggtctgcgtatcgcaaatgcagatccagatgatggcacttcgagcccaccgccgcctgagccccaggcccaccccgatccaaccactaccactcaaactgcagtgcaagatgcccggcccgaaatagagccccagacgaggccaagcagatctcataccaatgagtcgatcagtgcaagcctcgccaaggtggaatccggaacacacagctcaccgagtactatgagaaaccagaactcgcaatactcaagctcctcttcacgacccatgtcgacaacactatacaatgctgtacctactgccccgggctacgaccaagctgcaaactcctatcacctctttagaacagaacccgccccagcgcccacgtaccccgagtccggcaggacagcaccagctatagagtacgcacccgacatcccctcgcgagaatccagccacagagaccggtcctaccaccaaaaccgccaatctacgaccgtaacgggaagtgggcctgcaccgcctaggaggagttcaaaaggcatggctggtggttatgcttctataccaggcgtcccccgtggcacctgagccccgaggccgcggattagagctaccggggtcgctccccggtaccaccggcagcgaggagtggaaagatcgaggcgccgccacgggcatgcgaaaagaagtcgacgctaatggcaggacggtcatgaagccagtgaagaaaggcgttcgcgacttcacctttggccagatcctgggagagggttcctacagcaccgtctttcttgcaacggatcgacagaccttgaaggaatacgcgatcaaagtgctcgaaaagagacacattataaaagagaagaagatcaaatacgtcaatatcgagaaggatacactgaatcgtctaactgagcaccccggcatagttcggctatactatacattccaggatgagaattccctatactatgtgctggatctgtgcagcggcggtgagcttctcggcgtattgaagaaaacaggcacattcgacgtggagtgcacgaggttctttggagctcaaatattagacgccatcgagtatatgcactcgcgtggggtgatacatcgtgacttgaagcccgagaatgtccttttagacgatcagctgcacgtcaaaatcacagatttcggaacggccaggttattgagcgacccaagagcgccacaggcgccaccacgcatcgaagatacagggacaagctccaggggtagaaaccaggacgacagccgcgcagcctcgtttgttggcaccgctgagtatgtcagtccagagctgcttaccaacaagaatgcttgcaaggctagtgatctttgggcttttggatgcatcatctatcagttattggcaggccgaccacccttcaaaggtggttcggagtacctaactttccaaaagatcgtcagccttgaatatgagttccccgccgggtttcctcccgcagcccgagaccttgttgagcgatgcctcgtgctcgacccagctctaaggttaaccattgagcacataaaaaatcatgagttcttcgacaatcagccattcggcaagaacttatggaagacaaaggctcctaggctgcgaccttacatacccccgtctcatgaaccgaagatcattcaactgaatggcatgtccggctcccaacactccaatgcaaatgctcggccacgaactggtggcaacgacatgaatggtggcagccgtacacctggacgcattatcaccgatattcctcccccatcccagcttgacattgaatggtcgccggtattaaccaaaacgaatgagaggattctgcgactgggcgacctcatggtcttgtcatctgcgatatcaaatagtggcaagggcgatgaagcgccccggaagtttgctcgattttttggtgggagcacgacgaagaagaggcagagacttgtcctgatcacctccagtggaaggataatactcgcgccttctggcggcgaagacaagaaagcaaaacaggaaatatcactactcgcgcctgactgctcttggaagacacagaccgatgccaaaggccaggccgtctggtgtgtcgactcggccggctatcattacacattcgaggaagtgaaggcaccatcatctctcgacccgcctggaccatcacctgacgattgggttgagagtcttcaacgagctaaggatctggctgtgtctacaaatctatcaggagcttatgctaccgacaatgggtttggggatgcctcgtccatgtctagccctactagtacatttggccccgagagcagctatggcgtgagtgaccgccatcgcaaccatatggggagaagtcaagcaagcctagaggatacatcgagtaccaaacgccatcgattcagcaaacggcagtctaagcaaggactaggcgctgccttctaagttcctgatcccataaagtcttgtgtcttatagaaggacagacaccgactgcgcgttcttcgtcccatcccctccttcagttctacctggcctcaatttaccggcattctgtccatttattcccatttcttttgtggcatattctagcgaggcgtcgggtgaggttcccttcgttggcggcttttaaataggtgtcttcgttgtaggcaaacgcatggaaggtagcaagcctttataatcacctgcttcgacaccaagaaagaaatcatattcatcaaacatggaagctttggccgaatagcgatggcggctttctagacagcttagacagagaataggctgatgtgtgacgccattttgcatccacacttcatgctacactaatatatcctgtcaaactctataacaagacattctccaacaggcatgaacttgagtttacatttgcaattttcagatcatgacatgccacgtaaga

SEQ ID NO: 10089 - DNA, 915 bp, Muscodor strobelii
  misc_feature: SGI cDNA ID NO. 563185
  misc_feature: Encodes the peptide sequence at SEQ ID NO 10090
atgtctttcttccaacgcacagcttcacccgttctcaccatgccttcaagtgtgccgtcaggcgccttcggcatgcctcccttcccacaacagtctttcccacgtagccatctcaataccccaatgagatggcccgcagctcctcctgttgccccttcgaggacgagccgcaaacgctcaagagatgaggcaggcgtcaacctcgatgtcgaagaggccaagctcgagacaattgaacccgtcaaagagccagaagacgaatggatctatggcgagggcatggtcctaataaaaaatccatcatcatatgtcgcgaatgccgggagccaatctggtacctggctcgaggagaaagctgccgcagatgaggctaaaaagaacgatgaagcccgagcaatcaatcagcaagaccgaccatctcttcgcagcaataagtcccaacgcctggacatgaatgctgtttccatacccggcattaacacccaagcctctcgagtcagcccagttcgcgacatggaccctatttcatcgacatctggactctcagcagacattagcagccaacccatcgtcgacaactttaccctccatctcggtataggatggagccgcatcagcgaagacgagcatattcaagccgctgcacgcggatgggcacgctacattgagaaccatttccctgtcacgaatgctcgtatacaactagagagcaagggccttcaatcttatctcgtcgaagcctcggagggctttttcttgtttgctgaaaatctacgccaaggtcaattcgttagcaaggatgccaatcaaacccttgccaacctaaagacatcccctccaacatttgagggccttcaagtaatgactgctgctgaatctcctcggcctgttgaggtagacatggacatgagctaa

SEQ ID NO: 10090 - protein, 304 aa, Muscodor strobelii
  misc_feature: SGI Peptide ID NO. 563185
  misc_feature (1)..(304): NCBI GI: 116200187 Blast Desc: CHGG_08249 [Chaetomium globosum CBS 148.51] gi|88179528|gb|EAQ86996.1| CHGG_08249 [Chaetomium globosum CBS 148.51]
  misc_feature (1)..(300): NCBI GI: 145613219 Blast Desc: MGG_01798 [Magnaporthe grisea 70-15] gi|145020345|gb|EDK04474.1| MGG_01798 [Magnaporthe grisea 70-15]
  misc_feature (1)..(298): NCBI GI: 171689998 Blast Desc: protein product [Podospora anserina] gi|170944954|emb|CAP71065.1| protein product [Podospora anserina]
  misc_feature (1)..(304): NCBI GI: 85078212 Blast Desc: NCU03569 [Neurospora crassa OR74A] gi|28881135|emb|CAD70306.1| conserved [Neurospora crassa] gi|28917180|gb|EAA26896.1| conserved [Neurospora crassa OR74A]
  misc_feature (8)..(294): NCBI GI: 261352952 Blast Desc: conserved [Verticillium albo-atrum VaMs.102]
  misc_feature (1)..(303): NCBI GI: 46138423 Blast Desc: FG10726.1 [Gibberella zeae PH-1]
  misc_feature (1)..(303): NCBI GI: 256729190 Blast Desc: NECHADRAFT_93421 [Nectria haematococca mpVI 77-13-4]
  misc_feature (10)..(295): NCBI GI: 156054066 Blast Desc: SS1G_05881 [Sclerotinia sclerotiorum 1980] gi|154703661|gb|EDO03400.1| SS1G_05881 [Sclerotinia sclerotiorum 1980]
  misc_feature (10)..(295): NCBI GI: 154321577 Blast Desc: BC1G_01663 [Botryotinia fuckeliana B05.10] gi|150852201|gb|EDN27393.1| BC1G_01663 [Botryotinia fuckeliana B05.10]
  misc_feature (84)..(292): NCBI GI: 238837800 Blast Desc: conserved [Microsporum canis CBS 113480]
MSFFQRTASPVLTMPSSVPSGAFGMPPFPQQSFPRSHLNTPMRWPAAPPVAPSRTSRKRSRDEAGVNLDVEEAKLETIEPVKEPEDEWIYGEGMVLIKNPSSYVANAGSQSGTWLEEKAAADEAKKNDEARAINQQDRPSLRSNKSQRLDMNAVSIPGINTQASRVSPVRDMDPISSTSGLSADISSQPIVDNFTLHLGIGWSRISEDEHIQAAARGWARYIENHFPVTNARIQLESKGLQSYLVEASEGFFLFAENLRQGQFVSKDANQTLANLKTSPPTFEGLQVMTAAESPRPVEVDMDMS

SEQ ID NO: 10091 - DNA, 1868 bp, Muscodor strobelii
  misc_feature: SGI EST ID NO. CUFF.23832.0
  misc_feature: Variant of the nucleotide sequence at SEQ ID NO 10089
ggactaccatcgcgccttctatgcactcacgcactgcgagagctcctgcggctgcttgcctttgcgcttcttgctctaccacctctctgccttcttcccatcccagggctttcttctctctcacaccacacatacgaatgtgcccccatccccattccaattctcacgtctctcacctctcccattctatttatctactcccacaccttcctcccatcccatcttcaacttactcctccactgcctcttgacttacaccagacctaccacctcccatcagcctcacctatactctaattcacccacccacctgcctgcctgtccacctaccttcttctcctaccacctctaccatcttctatgaacttgagttaagatcctcatcatcgattcaatttcgtctccttagatctcgtgacattttagagtatcatttgcgcagcccatctagaccaattgcctcttggtccttctccactctatgctagtcgtcgaccatcacattctacaatacgttagcctcctatctgacagccagccttaccacatcgccaatttcgcagcgtagactgatctaaccactgcagttgttgttattttgcctaaaagttcgtgctaacagatcagacaatatgtctttcttccaacgcacagcttcacccgttctcaccatgccttcaagtgtgccgtcaggcgccttcggcatgcctcccttcccacaacagtctttcccacgtagccatctcaataccccaatgagatggcccgcagctcctcctgttgccccttcgaggacgagccgcaaacgctcaagagatgaggcaggcgtcaacctcgatgtcgaagaggccaagctcgagacaattgaacccgtcaaagagccagaagacgaatggatctatggcgagggcatggtcctaataaaaaatccatcatcatatgtcgcgaatgccgggagccaatctggtacctggctcgaggagaaagctgccgcagatgaggctaaaaagaacgatgaagcccgagcaatcaatcagcaagaccgaccatctcttcgcagcaataagtcccaacgcctggacatgaatgctgtttccatacccggcattaacacccaagcctctcgagtcagcccagttcgcgacatggaccctatttcatcgacatctggactctcagcagacattagcagccaacccatcgtcgacaactttaccctccatctcggtataggatggagccgcatcagcgaagacgagcatattcaagccgctgcacgcggatgggcacgctacattgagaaccatttccctgtcacgaatgctcgtatacaactagagagcaagggccttcaatcttatctcgtcgaagcctcggagggctttttcttgtttgctgaaaatctacgccaaggtcaattcgttagcaaggatgccaatcaaacccttgccaacctaaagacatcccctccaacatttgagggccttcaagtaatgactgctgctgaatctcctcggcctgttgaggtagacatggacatgagctaaaccaatcaaacactgggatgactgtggtgttgtgggtgtggtcgtgacgacgacgccctgactggcgcacttgggagtttgcgtgagagctgggtggaagcaccgacggctctttttctattttcgttcgtggtattcttacgtgcttttttaacattccaggtgggcacggcgccaataaaaactggtagggacactaggggcaattcatcagcattatgtacgataaatcaatcaaatgaatcaatcgtggtcaacatccacacattcgactttgactttcaacaacattacaatcctgatatcttaattgactgggca

SEQ ID NO: 10092 - DNA, 1683 bp, Muscodor strobelii
  misc_feature: SGI cDNA ID NO. 563186
  misc_feature: Reduced expression when VOC is produced
  misc_feature: Encodes the peptide sequence at SEQ ID NO 10093
atggtctcgcaacccgattacaaccactcttcccttgccttgcgaggcccttcctccgtcgtctctgcccgcacttcctcccgtcctcatgcgtcgtctcggagtaagcgatataatcgctcccatactggtggtacttcgtatgtcccgcgcaacgagttcccagtcttcagtcactctggcgatgtcgagatcattatagcagttggcgggagagaaaatcggtatcttttacacaagcataccttgacaagatgctcgggattcttcgaggccagcacgagccagcaatggtcaaaggcgactgtgttgcccctctcagagccgtcgacgaaggaccttgtgaggataggggaagagactgggagtaatagtggaagtgatgtcggccggcccggtgcatcgtctcccatgcctaggaagcggtggcggtatgaacttgactttggtgttgactcgaacgatattcccatgttgatacagaaagaggcgtctgcaaatctcaacaccaccaaaaataatattgcctccgcgagcacgacgtcactctttggcggtccaagccataatgcgcctcctccagtaacgaggagcgaaggcggccgacatgcccacacgagctcgacaaactcgttcttccgctccgtcgcaaatttatctctcgtgccctcgaaacccgaacacgatgcgccgctttcgcaagctgatgaagatcttttgcgggactacgataatctattccgggtgtgctacaactacccacccgtcctcgacgggatcaatatcgcagacgcatacgtacaatgcaaatcactccttaaactagcagatcaatacgatgcgctcgctgtcgtaggaccacgcgtcgatcaccatctgctccaattccaatcacgcctctggaaacaaatcgcaaaatatcccatcagctacctccgcctgggctatctagcacgcagcaaagttatcttccaagaagcgctcatccacgtcgtagggcagtggccagccggcgaacgcagcatccgcgacacattcccagagaccgtgctagacatcatcgaagataaagtcgacgagctcgaagaaaccgttagtaggatcgagggccgactcttcaggttgaacctcacaaattcgagaggtcagcgtgtgtcgcctcagacttcgtacttggactggttggctgtatcgctatttcggcaatggctggcggatcatacgagtccacctccgccgcctcctccaccatcccctccttcgtcgaggagtcatggcgggagtcgacattctcgtgaggtgtcacggccttctgctccaccgccccttccgatgacggcacttggcactctcgcggcggttggtcgaacatatagaattcttggttcggcctcgggatctggatatcttgggcgagacgagtgtaagaaatttctcaaacttacgccggagctgtactctagggataatcttcgacggttcgagaagtgcatcgatgagttgaaggatgcggcgagagaggtcgtacgaccgctcatgggcacggggctggagttggaactggttagggcgaatcctggcgcgggcgctgggaccccaagtgtgccggttaatggcatgatgagctatttgacttgtgttaaggttcttgagcgggatctgccttgggatgttggggagtga

SEQ ID NO: 10093 - protein, 560 aa, Muscodor strobelii
  misc_feature: SGI Peptide ID NO. 563186
  misc_feature (42)..(556): NCBI GI: 116200189 Blast Desc: CHGG_08250 [Chaetomium globosum CBS 148.51] gi|88179529|gb|EAQ86997.1| CHGG_08250 [Chaetomium globosum CBS 148.51]
  misc_feature (33)..(556): NCBI GI: 256729442 Blast Desc: NECHADRAFT_12569 [Nectria haematococca mpVI 77-13-4]
  misc_feature (10)..(556): NCBI GI: 46117034 Blast Desc: FG04359.1 [Gibberella zeae PH-1]
  misc_feature (29)..(556): NCBI GI: 85078203 Blast Desc: NCU03567 [Neurospora crassa OR74A] gi|18376032|emb|CAD21038.1| [Neurospora crassa] gi|28917178|gb|EAA26894.1| conserved [Neurospora crassa OR74A]
  misc_feature (33)..(560): NCBI GI: 145613217 Blast Desc: MGG_01799 [Magnaporthe grisea 70-15] gi|145020344|gb|EDK04473.1| MGG_01799 [Magnaporthe grisea 70-15]
  misc_feature (1)..(557): NCBI GI: 189190928 Blast Desc: conserved [Pyrenophora tritici-repentis Pt-1C-BFP] gi|187973409|gb|EDU40908.1| conserved [Pyrenophora tritici-repentis Pt-1C-BFP]
  misc_feature (1)..(556): NCBI GI: 156054064 Blast Desc: SS1G_05880 [Sclerotinia sclerotiorum 1980] gi|154703660|gb|EDO03399.1| SS1G_05880 [Sclerotinia sclerotiorum 1980]
  misc_feature (1)..(409): NCBI GI: 171689996 Blast Desc: protein product [Podospora anserina] gi|170944953|emb|CAP71064.1| protein product [Podospora anserina]
  misc_feature (40)..(556): NCBI GI: 212527516 Blast Desc: conserved [Penicillium marneffei ATCC 18224] gi|210073313|gb|EEA27400.1| conserved [Penicillium marneffei ATCC 18224]
  misc_feature (47)..(557): NCBI GI: 121705990 Blast Desc: conserved [Aspergillus clavatus NRRL 1] gi|119399404|gb|EAW09832.1| conserved [Aspergillus clavatus NRRL 1]
  misc_feature: Useful for introducing or modulating the production of volatile compounds
MVSQPDYNHSSLALRGPSSVVSARTSSRPHASSRSKRYNRSHTGGTSYVPRNEFPVFSHSGDVEIIIAVGGRENRYLLHKHTLTRCSGFFEASTSQQWSKATVLPLSEPSTKDLVRIGEETGSNSGSDVGRPGASSPMPRKRWRYELDFGVDSNDIPMLIQKEASANLNTTKNNIASASTTSLFGGPSHNAPPPVTRSEGGRHAHTSSTNSFFRSVANLSLVPSKPEHDAPLSQADEDLLRDYDNLFRVCYNYPPVLDGINIADAYVQCKSLLKLADQYDALAVVGPRVDHHLLQFQSRLWKQIAKYPISYLRLGYLARSKVIFQEALIHVVGQWPAGERSIRDTFPETVLDIIEDKVDELEETVSRIEGRLFRLNLTNSRGQRVSPQTSYLDWLAVSLFRQWLADHTSPPPPPPPPSPPSSRSHGGSRHSREVSRPSAPPPLPMTALGTLAAVGRTYRILGSASGSGYLGRDECKKFLKLTPELYSRDNLRRFEKCIDELKDAAREVVRPLMGTGLELELVRANPGAGAGTPSVPVNGMMSYLTCVKVLERDLPWDVGE

SEQ ID NO: 10094 - DNA, 1683 bp, Muscodor strobelii
  misc_feature: SGI cDNA ID NO. 563187
  misc_feature: Encodes the peptide sequence at SEQ ID NO 10095
atgggtattaaaggcatatacaaagagatcggaacggggaaacgcatctccctcacaaaactagctgttgataagcttgaggaatccggaagacctttacgcatcgctatcgatatttccatatggcaattccaagtacaggcagccaggggtggctccaatccagctatccggactctattttaccgtctgctccgtctgcttagcctatctatacagcccatatttgtattcgatggaccgaataagcctgctttcaagcgcaacaagcgctcaggaagaggtgatggtgtcgcaacagctatggccaagcgactaattaggctctttggcttcgtagcgcatgatgcacctggtgaggctgaggccgagtgcgcgcttctgcaacagaacggcatcgtagatgctgtgctgagcgaagatgtcgataccatcatgttcggatgcacaagaacattacgaaactggtcgtcagaaggcgcgacagggagcaagacaccaacccatgtctccatgtacgacaccgcagagctcagtcaaggaacttccggcttggaccgtgaaggcatggttcttgtcgctttaatgagtggtggagactatctgcccgaaggtgttcccggagctggtgtcaagctagcctgcgaagcagcaaaagctggtttcggtaaaagactttgccaactcaagcgatctgatacttcggaactcgcgagttggaaggagtggctgatgtacgagctacgacataacgaaagcggattcttccgaacgaggcataaggccttgaacatacccgatgatttcccaaatatggacattctgagatactatacccatcctgtcgtatcctcctcctccacattagacaggctaaaacagcaggaatgggatcggccgatagacgttcaggggcttcgggactttgttcgcgaaactttcgactggagttacaggataggggcaatcaaatacatcagagttcttgctccatgtctattgatacggaagatgatccgacggagtatcgcaagcgaacagtcatctacgagtctagatgtgatggaaaaggaggaatccgaactcgtcaaatccatcacaagccgaagagctcacttcagtacggatgcgacgtcagaattgcgcatgtcattcataccaacagacattgtcggttacgactttcaggaagagcctgacgaagttattgatttcggccgagatggtttagcactcaacagtgacgacgagttagaagaactagcggaagaggctggagaattaggctccactacgaagactacagcgaggaagcctttcagtcctactgaaccggatttgacatgggtaccagaaacgatagctaagctgggcgtaccattaatggtcgagaattgggaagcaacacaacgagcaaaggctgcagcgaaagcagcgcctcgtccccgagctaaggccacaaggtcaaaatcgaaaactggaggcatgactgctggagctctcaaccagtttgtcaaggtcacaaagaacaacatggcagatccaaatggacttgagaaggccaactcacctctaccgacaccaggagtactaccacccggccgatcccagacaccactggaaccccccgagaagaaggggctctacgacaccgtcgaggccaacaacaagcggatcgaatag

SEQ ID NO: 10095 - protein, 560 aa, Muscodor strobelii
  misc_feature: SGI Peptide ID NO. 563187
  misc_feature (108)..(204): Pfam Id: PF00867 Pfam Desc: XPG I-region
  misc_feature (1)..(98): Pfam Id: PF00752 Pfam Desc: XPG N-terminal domain
  misc_feature (1)..(540): NCBI GI: 18376035 Blast Desc: related to DNA repair endonuclease rad2 [Neurospora crassa]
  misc_feature (1)..(501): NCBI GI: 164427499 Blast Desc: NCU03564 [Neurospora crassa OR74A] gi|157071768|gb|EAA26891.2| [Neurospora crassa OR74A]
  misc_feature (1)..(509): NCBI GI: 39952315 Blast Desc: MGG_01800 [Magnaporthe grisea 70-15] gi|145020343|gb|EDK04472.1| MGG_01800 [Magnaporthe grisea 70-15]
  misc_feature (1)..(526): NCBI GI: 261352954 Blast Desc: conserved [Verticillium albo-atrum VaMs.102]
  misc_feature (1)..(547): NCBI GI: 171690042 Blast Desc: protein product [Podospora anserina] gi|170944976|emb|CAP71087.1| protein product [Podospora anserina]
  misc_feature (48)..(524): NCBI GI: 116200179 Blast Desc: CHGG_08245 [Chaetomium globosum CBS 148.51] gi|88179524|gb|EAQ86992.1| CHGG_08245 [Chaetomium globosum CBS 148.51]
  misc_feature (1)..(542): NCBI GI: 256729264 Blast Desc: NECHADRAFT_84053 [Nectria haematococca mpVI 77-13-4]
  misc_feature (1)..(513): NCBI GI: 46117088 Blast Desc: FG04386.1 [Gibberella zeae PH-1]
  misc_feature (1)..(512): NCBI GI: 189192965 Blast Desc: flap structure-specific endonuclease [Pyrenophora tritici-repentis Pt-1C-BFP] gi|187978385|gb|EDU45011.1| flap structure-specific endonuclease [Pyrenophora tritici-repentis
  misc_feature (1)..(509): NCBI GI: 156054070 Blast Desc: SS1G_05883 [Sclerotinia sclerotiorum 1980] gi|154703663|gb|EDO03402.1| SS1G_05883 [Sclerotinia sclerotiorum 1980]
MGIKGIYKEIGTGKRISLTKLAVDKLEESGRPLRIAIDISIWQFQVQAARGGSNPAIRTLFYRLLRLLSLSIQPIFVFDGPNKPAFKRNKRSGRGDGVATAMAKRLIRLFGFVAHDAPGEAEAECALLQQNGIVDAVLSEDVDTIMFGCTRTLRNWSSEGATGSKTPTHVSMYDTAELSQGTSGLDREGMVLVALMSGGDYLPEGVPGAGVKLACEAAKAGFGKRLCQLKRSDTSELASWKEWLMYELRHNESGFFRTRHKALNIPDDFPNMDILRYYTHPVVSSSSTLDRLKQQEWDRPIDVQGLRDFVRETFDWSYRIGAIKYIRVLAPCLLIRKMIRRSIASEQSSTSLDVMEKEESELVKSITSRRAHFSTDATSELRMSFIPTDIVGYDFQEEPDEVIDFGRDGLALNSDDELEELAEEAGELGSTTKTTARKPFSPTEPDLTWVPETIAKLGVPLMVENWEATQRAKAAAKAAPRPRAKATRSKSKTGGMTAGALNQFVKVTKNNMADPNGLEKANSPLPTPGVLPPGRSQTPLEPPEKKGLYDTVEANNKRIE

SEQ ID NO: 10096 - DNA, 1737 bp, Muscodor strobelii
  misc_feature: SGI cDNA ID NO. 563188
  misc_feature: Encodes the peptide sequence at SEQ ID NO 10097
atggcgtccagcgctggccctgcgactctcccacatcgcgccgtgacgagcattcgaggaggaactcagggctcgtcagccgtgccccaaacacctgcacggcctctttcagcgtctacctttggctctccctcaggtgcccgagcggacgatgataccatagtgattgaactaggctcgcgaaagctacgccttggttgggccggagacggcgctcctaagagggttgttgccttcagtccagaccaacaccgacgagctggcgacttcagagcatgggacgcggactatgctgccaattggcgtggtagagcttctggaaagccatggggtgctgatcacgagctgtggcaactggatgcacgcggacaagatgttggactagtcgaggacaagcttgagcgggagcttagagatgtatttttcagatacttactcattgactcgagaccgaggaaggttgctctgattttaccgccaacgatgcccttgcccctgctatcgtccacgctcgatactctgatgcatcgtcttcaggcacctacagtatctctcctctcctcgccagtcatgaccgctttggcagccggccttcgatcctccctcgtcattgatctgggttggcatgagacgacgattactgccgtgtacgaataccgcgaagtgcaaacctggcgaacaatcagagccggcaagtatttggtggaagaaaccttcgagtttctatcgcagaaaatacaagatcgcgaaccggcagaacgccacgagcgaactcaagatcgactggcggacgatgccgtcagctttgaagagtgcgaggagattgccacgcgtctgttgtggtgtaaaaaggcggccaagaagccacgccgaggcgccgctgacgagggtctcacgactgttcatgaggatgaagaggtcgacgagatacctccgaacgaggatcaaacagcaatgcatatcacactaaggtcctgcaaacctcctgaatctatcgagataccattttcacaattatccgagccatgcgaaacaactttcttcgacacgcgcgtctcaccatcgtgcttcgatgatcatgaactccctgtccatctgctcgtccaccgggctcttctccagctccccatggatgtgcgtgcagtgtgtatgtcacgcattatctttacggggggctgctccaatatcataggcctccgaagccggatattcgacgaagtaactgtgctggctgaagaacggagctgggaccccgtgacaggcaaagcatatgaccagctcaaatcaaaatcaaagcctagatcaaatggcagcgtaccagcaggtgtcatgcctacgccagctgtggtaatacagccagattcaactgatgcagatggagaaacaccagagactccaacgacaaacgcggccgatgcgccccaagagattgaccaagtagagaagctcattcgaaaggagagaaactacaagcctcctgtgcaaggagatctacgagtggttgagtccttagggccatggtgcggtgccagcttagccacgcagcttaagattcctgcgctggcgactatcgatcgcgaactttggatctcaagaggcattaatggtgcctctcatcccaacgaggtggatgtcaagacgtcgcagcggcagagcatgggacctaatgggttgatgcgaggccaggcagtctcacctaataattggacgctcggcatctggggagcacttgtttga

SEQ ID NO: 10097 - protein, 578 aa, Muscodor strobelii
  misc_feature: SGI Peptide ID NO. 563188
  misc_feature (48)..(548): Pfam Id: PF00022 Pfam Desc: Actin
  misc_feature (178)..(218): Pfam Id: PF00022 Pfam Desc: Actin
  misc_feature (1)..(575): NCBI GI: 116200177 Blast Desc: CHGG_08244 [Chaetomium globosum CBS 148.51] gi|88179523|gb|EAQ86991.1| CHGG_08244 [Chaetomium globosum CBS 148.51]
  misc_feature (1)..(577): NCBI GI: 256729459 Blast Desc: NECHADRAFT_47555 [Nectria haematococca mpVI 77-13-4]
  misc_feature (10)..(575): NCBI GI: 171690044 Blast Desc: protein product [Podospora anserina] gi|170944977|emb|CAP71088.1| protein product [Podospora anserina]
  misc_feature (8)..(576): NCBI GI: 85078187 Blast Desc: NCU03563 [Neurospora crassa OR74A] gi|18376036|emb|CAD21042.1| actin-related protein RO7 [Neurospora crassa] gi|28917174|gb|EAA26890.1| [Neurospora crassa OR74A]
  misc_feature (1)..(577): NCBI GI: 39952317 Blast Desc: MGG_01801 [Magnaporthe grisea 70-15] gi|145020342|gb|EDK04471.1| MGG_01801 [Magnaporthe grisea 70-15]
  misc_feature (1)..(577): NCBI GI: 46117086 Blast Desc: FG04385.1 [Gibberella zeae PH-1]
  misc_feature (1)..(576): NCBI GI: 156054072 Blast Desc: SS1G_05884 [Sclerotinia sclerotiorum 1980] gi|154703664|gb|EDO03403.1| SS1G_05884 [Sclerotinia sclerotiorum 1980]
  misc_feature (8)..(576): NCBI GI: 8347739 Blast Desc: AF264052_1 actin-related protein RO7 [Neurospora crassa]
  misc_feature (29)..(575): NCBI GI: 189193129 Blast Desc: conserved [Pyrenophora tritici-repentis Pt-1C-BFP] gi|187978467|gb|EDU45093.1| conserved [Pyrenophora tritici-repentis Pt-1C-BFP]
  misc_feature (26)..(575): NCBI GI: 169605467 Blast Desc: SNOG_05758 [Phaeosphaeria nodorum SN15] gi|160706769|gb|EAT86822.2| SNOG_05758 [Phaeosphaeria nodorum SN15]
MASSAGPATLPHRAVTSIRGGTQGSSAVPQTPARPLSASTFGSPSGARADDDTIVIELGSRKLRLGWAGDGAPKRVVAFSPDQHRRAGDFRAWDADYAANWRGRASGKPWGADHELWQLDARGQDVGLVEDKLERELRDVFFRYLLIDSRPRKVALILPPTMPLPLLSSTLDTLMHRLQAPTVSLLSSPVMTALAAGLRSSLVIDLGWHETTITAVYEYREVQTWRTIRAGKYLVEETFEFLSQKIQDREPAERHERTQDRLADDAVSFEECEEIATRLLWCKKAAKKPRRGAADEGLTTVHEDEEVDEIPPNEDQTAMHITLRSCKPPESIEIPFSQLSEPCETTFFDTRVSPSCFDDHELPVHLLVHRALLQLPMDVRAVCMSRIIFTGGCSNIIGLRSRIFDEVTVLAEERSWDPVTGKAYDQLKSKSKPRSNGSVPAGVMPTPAVVIQPDSTDADGETPETPTTNAADAPQEIDQVEKLIRKERNYKPPVQGDLRVVESLGPWCGASLATQLKIPALATIDRELWISRGINGASHPNEVDVKTSQRQSMGPNGLMRGQAVSPNNWTLGIWGALV

SEQ ID NO: 10098 - DNA, 2140 bp, Muscodor strobelii
  misc_feature: SGI EST ID NO. CUFF.23847.0
  misc_feature: Variant of the nucleotide sequence at SEQ ID NO 10096
aagaccatctgtttgctggacattatcttgattattgggcttgaagagctctcctgaggtattcgggtgttgacaatctggtcatcatgttcgcctgattgtatctaccatttcttctgtcgcaatttgtcttcaatatgtgaagagcactgtgtgaacgccaaacaacgtgtgacacaatggcgtccagcgctggccctgcgactctcccacatcgcgccgtgacgagcattcgaggaggaactcagggctcgtcagccgtgccccaaacacctgcacggcctctttcagcgtctacctttggctctccctcaggtgcccgagcggacgatgataccatagtgattgaactaggctcgcgaaagctacgccttggttgggccggagacggcgctcctaagagggttgttgccttcagtccagaccaacaccgacgagctggcgacttcagagcatgggacgcggactatgctgccaattggcgtggtagagcttctggaaagccatggggtgctgatcacgagctgtggcaactggatgcacgcggacaagatgttggactagtcgaggacaagcttgagcgggagcttagagatgtatttttcagatacttactcattgactcgagaccgaggaaggttgctctgattttaccgccaacgatgcccttgcccctgctatcgtccacgctcgatactctgatgcatcgtcttcaggcacctacagtatctctcctctcctcgccagtcatgaccgctttggcagccggccttcgatcctccctcgtcattgatctgggttggcatgagacgacgattactgccgtgtacgaataccgcgaagtgcaaacctggcgaacaatcagagccggcaagtatttggtggaagaaaccttcgagtttctatcgcagaaaatacaagatcgcgaaccggcagaacgccacgagcgaactcaagatcgactggcggacgatgccgtcagctttgaagagtgcgaggagattgccacgcgtctgttgtggtgtaaaaaggcggccaagaagccacgccgaggcgccgctgacgagggtctcacgactgttcatgaggatgaagaggtcgacgagatacctccgaacgaggatcaaacagcaatgcatatcacactaaggtcctgcaaacctcctgaatctatcgagataccattttcacaattatccgagccatgcgaaacaactttcttcgacacgcgcgtctcaccatcgtgcttcgatgatcatgaactccctgtccatctgctcgtccaccgggctcttctccagctccccatggatgtgcgtgcagtgtgtatgtcacgcattatctttacggggggctgctccaatatcataggcctccgaagccggatattcgacgaagtaactgtgctggctgaagaacggagctgggaccccgtgacaggcaaagcatatgaccagctcaaatcaaaatcaaagcctagatcaaatggcagcgtaccagcaggtgtcatgcctacgccagctgtggtaatacagccagattcaactgatgcagatggagaaacaccagagactccaacgacaaacgcggccgatgcgccccaagagattgaccaagtagagaagctcattcgaaaggagagaaactacaagcctcctgtgcaaggagatctacgagtggttgagtccttagggccatggtgcggtgccagcttagccacgcagcttaagattcctgcgctggcgactatcgatcgcgaactttggatctcaagaggcattaatggtgcctctcatcccaacgaggtggatgtcaagacgtcgcagcggcagagcatgggacctaatgggttgatgcgaggccaggcagtctcacctaataattggacgctcggcatctggggagcacttgtttgagagcatggaaatgctacggggatggcatgctgtttgtgttgattgttgttaaacatagagatacccctaacgcagaaggcgttgacgaatactatcaagcctataccggattgtgtccgccctgtgttcaaaatgatgtttggtttgacatgagaagagctcacgatgtttctgggctgcgatttagactttacgagctcgccgattcatcacctatcaaatcg

SEQ ID NO: 10099 - DNA, 1524 bp, Muscodor strobelii
  misc_feature: SGI cDNA ID NO. 563189
  misc_feature: Encodes the peptide sequence at SEQ ID NO 10100
atgcgccagtcggcatcgcgtctctactccatcgcaacctccgatgctaacctcaaagccgatgaagtaccaattcaacgtcagcaacggccgacgatagcgccacggcctataattgacataaagagtatccgcacaaatccagaactgtactctcagaactgtctggagaggaactacaaagcccaagccgaatatccggggcgcatcaagacgttgttcgaagaatggcaaggacaccaagcacaagctcgcaagctgcgggagcgaagtaatgagatccggcgcgagatcgcaaatcccgcgacgatacaacatgaagatgacgcacggggcgcagaggaaacaaacgacgtcaagaaaatgaccaaagaacagctcctcgccgaagcccgacaactcaaagcctccctctccggtatcgaagaagccgaatccaccatccaaaccaccatgacagacctcgccctcgctatcccaaatactacctccccctccaccccgatcggcaccgaacccgaagtcctaagctacataaacgagccacaccccttcctcacgtcctccagctccgacagcgtctggcgctcacacgtgcacatcggctccgagctcgggatcctcgacttcgcgggcgccgcaaagacgtcaggatgggggtggtactacctgctagacgaaggcgcacaactcgaacaagccctaatccaatacgttctcacggccgtgacgcgggttccagggtggcgacaagtcgcgcccccttctttagtatacagtcacatagccgcagcctgcggctaccaaccgcgagacacaaacggcgagacccagatctacgccctcgcccaatcacccgacgataaagcgagaggaaaaccagaactcagtctagcggggacagcggaaatacccctagcgggtatgaaaagcgatacgataatggagtcttccgaactccccgcgaaacgcgtgggcgtgagccggtgctatcgcgccgaagcaggggcgcgaggagcagagacgaaaggtttgtatagagttcatgaattcactaaagtcgagatgttcgcctggacagcgccagaccacgacgctacggaggaggtcttcgatgagatggttgacatacagacggagatcctgtcatctcttggcctacactgtcgtgtgctggagatgccgagcacggatctaggagcgagtgcataccgaaaaatagacatcgaggcctttttcccatctcgcgcagcccaaggtctgaatgatgggtggggcgaggtgacgtccgcgagtatttgtacggattatcagagtaggagattaggtacgagacttaggggggatggtggcaagggtatggattttccgtggactgttaatgggactgcgattgctgttcccagggttttggcggcggtgctggagaatgggtgggttgaggagggtgggtatgttgttgtgccggagtgtcttaggccgtggatggatggtatggagaggattgtgatgaggcataggtaa

SEQ ID NO: 10100 - protein, 507 aa, Muscodor strobelii
  misc_feature: SGI Peptide ID NO. 563189
  misc_feature (38)..(163): Pfam Id: PF02403 Pfam Desc: Seryl-tRNA synthetase N-terminal domain
  misc_feature (231)..(416): Pfam Id: PF00587 Pfam Desc: tRNA synthetase class II core domain (G, H, P, S and T)
  misc_feature (124)..(163): Pfam Id: PF02403 Pfam Desc: Seryl-tRNA synthetase N-terminal domain
  misc_feature (30)..(507): NCBI GI: 171690094 Blast Desc: protein product [Podospora anserina] gi|170945002|emb|CAP71113.1| protein product [Podospora anserina]
  misc_feature (30)..(507): NCBI GI: 39942300 Blast Desc: MGG_03230 [Magnaporthe grisea 70-15] gi|145015779|gb|EDK00269.1| MGG_03230 [Magnaporthe grisea 70-15]
  misc_feature (29)..(502): NCBI GI: 46117084 Blast Desc: FG04384.1 [Gibberella zeae PH-1]
  misc_feature (29)..(502): NCBI GI: 256729458 Blast Desc: [Nectria haematococca mpVI 77-13-4]
  misc_feature (30)..(502): NCBI GI: 28881119 Blast Desc: related to mitochondrial serine--tRNA ligase [Neurospora crassa]
  misc_feature (30)..(502): NCBI GI: 164422793 Blast Desc: NCU09594 [Neurospora crassa OR74A] gi|157069824|gb|EAA33936.2| NCU09594 [Neurospora crassa OR74A]
  misc_feature (24)..(507): NCBI GI: 116200207 Blast Desc: CHGG_08259 [Chaetomium globosum CBS 148.51] gi|88179538|gb|EAQ87006.1| CHGG_08259 [Chaetomium globosum CBS 148.51]
  misc_feature (29)..(507): NCBI GI: 261352956 Blast Desc: seryl-tRNA synthetase [Verticillium albo-atrum VaMs.102]
  misc_feature (30)..(498): NCBI GI: 154313426 Blast Desc: BC1G_05410 [Botryotinia fuckeliana B05.10] gi|150849479|gb|EDN24672.1| BC1G_05410 [Botryotinia fuckeliana B05.10]
  misc_feature (30)..(498): NCBI GI: 156042898 Blast Desc: SS1G_11248 [Sclerotinia sclerotiorum 1980] gi|154695633|gb|EDN95371.1| SS1G_11248 [Sclerotinia sclerotiorum 1980]
  misc_feature (87)..(502): SWISSPROT Homolog: EC 6.1.1.11 Serine--tRNA ligase
MRQSASRLYSIATSDANLKADEVPIQRQQRPTIAPRPIIDIKSIRTNPELYSQNCLERNYKAQAEYPGRIKTLFEEWQGHQAQARKLRERSNEIRREIANPATIQHEDDARGAEETNDVKKMTKEQLLAEARQLKASLSGIEEAESTIQTTMTDLALAIPNTTSPSTPIGTEPEVLSYINEPHPFLTSSSSDSVWRSHVHIGSELGILDFAGAAKTSGWGWYYLLDEGAQLEQALIQYVLTAVTRVPGWRQVAPPSLVYSHIAAACGYQPRDTNGETQIYALAQSPDDKARGKPELSLAGTAEIPLAGMKSDTIMESSELPAKRVGVSRCYRAEAGARGAETKGLYRVHEFTKVEMFAWTAPDHDATEEVFDEMVDIQTEILSSLGLHCRVLEMPSTDLGASAYRKIDIEAFFPSRAAQGLNDGWGEVTSASICTDYQSRRLGTRLRGDGGKGMDFPWTVNGTAIAVPRVLAAVLENGWVEEGGYVVVPECLRPWMDGMERIVMRHR

SEQ ID NO: 10101 - DNA, 1977 bp, Muscodor strobelii
  misc_feature: SGI EST ID NO. CUFF.23850.0
  misc_feature: Variant of the nucleotide sequence at SEQ ID NO 10099
ggggaatgtcgtagctgtatcgacagcttaacacgccaaaatttccatttgttcgttctcatcaattccaatgatcaagaaactttcaccagactttgtattctatgttcaattacaacatatgatatcacattttgaatcacagccatgaggtcccttgggacgccattcatatgcacgcgatgcagactcatacggcccagaccagctcgtatcatgcgccagtcggcatcgcgtctctactccatcgcaacctccgatgctaacctcaaagccgatgaagtaccaattcaacgtcagcaacggccgacgatagcgccacggcctataattgacataaagagtatccgcacaaatccagaactgtactctcagaactgtctggagaggaactacaaagcccaagccgaatatccggggcgcatcaagacgttgttcgaagaatggcaaggacaccaagcacaagctcgcaagctgcgggagcgaagtaatgagatccggcgcgagatcgcaaatcccgcgacgatacaacatgaagatgacgcacggggcgcagaggaaacaaacgacgtcaagaaaatgaccaaagaacagctcctcgccgaagcccgacaactcaaagcctccctctccggtatcgaagaagccgaatccaccatccaaaccaccatgacagacctcgccctcgctatcccaaatactacctccccctccaccccgatcggcaccgaacccgaagtcctaagctacataaacgagccacaccccttcctcacgtcctccagctccgacagcgtctggcgctcacacgtgcacatcggctccgagctcgggatcctcgacttcgcgggcgccgcaaagacgtcaggatgggggtggtactacctgctagacgaaggcgcacaactcgaacaagccctaatccaatacgttctcacggccgtgacgcgggttccagggtggcgacaagtcgcgcccccttctttagtatacagtcacatagccgcagcctgcggctaccaaccgcgagacacaaacggcgagacccagatctacgccctcgcccaatcacccgacgataaagcgagaggaaaaccagaactcagtctagcggggacagcggaaatacccctagcgggtatgaaaagcgatacgataatggagtcttccgaactccccgcgaaacgcgtgggcgtgagccggtgctatcgcgccgaagcaggggcgcgaggagcagagacgaaaggtttgtatagagttcatgaattcactaaagtcgagatgttcgcctggacagcgccagaccacgacgctacggaggaggtcttcgatgagatggttgacatacagacggagatcctgtcatctcttggcctacactgtcgtgtgctggagatgccgagcacggatctaggagcgagtgcataccgaaaaatagacatcgaggcctttttcccatctcgcgcagcccaaggtctgaatgatgggtggggcgaggtgacgtccgcgagtatttgtacggattatcagagtaggagattaggtacgagacttaggggggatggtggcaagggtatggattttccgtggactgttaatgggactgcgattgctgttcccagggttttggcggcggtgctggagaatgggtgggttgaggagggtgggtatgttgttgtgccggagtgtcttaggccgtggatggatggtatggagaggattgtgatgaggcataggtaatggtgtggatataaggagaggaagtcgaagaggactgctgtgagggaatggatggatggtgttgtgttgatttgcccctggggagcggtttggcaaattgtttacttgtatgagtatacggctttgaagcaaaaggggtcatggcatgtacgtgaatacggaaagtgtaataccaattgtataatcaaagtcaaagaacaaagctatcaggtcataaatcaaataagtgatactgca

SEQ ID NO: 10102 - DNA, 6114 bp, Muscodor strobelii
  misc_feature: SGI cDNA ID NO. 563190
  misc_feature: Encodes the peptide sequence at SEQ ID NO 10103
atgccgtcgttcgagcgtgaagcgccgcccgaccggcatctaagacatcaacattccgcatcctcctccaatgctctagtccccatgtgggacagctcagatcccgagcgtgctcctccgccgctccctctcaacccacagtctcctagcgtcggcacttcgcgggcgggcacgtcgctggcgatacagtcggcacacgcggcgctgaacgaaaaggcacgcgaggctgcactcgcacctaccctccacaagcgaaacaccaccgacttctcacccgagcgggctctcgtccatcgccccagcccacacaagcgcatgcagtcgctccagcccggcagcgtacgcgacttgagtctcatgatcgaaggctctcacgactctgcacattctacacccaggggatcacctgtaaaggaaaagtacggccctcgcccggctacacctggacgacgagagaacgagaaggagtcaaagtcgcctgagaaggaatacgtcccaaccggcacacctacaccaatgtcgtcgagtctcacacctgtcttgcgacctgcagcaagaaggccacagtcgagcatactcggcgaaaacacacctccccaatctgctaccatgttggctctacgagacatgtcttcgcctccagccagagaggtcgagtctccgctcgccaatgtgacaaacaacgctacagcagcatcaaagcctttggctgtgaacgaccaactcgcgaaccagctcatgaatctgaccaacattgccacatcactccagaaagagatgtctcagctaagtcggagaagtcgcgacaatgcgacagatctaatgagcttgaaggaggctacccacgcaagagatgaagacattcgcaagagtctgcgcgagctggcgacaaatgtcgacactacaaaacatcaccgggacacctacaatggcggcctttaccttgacaacaaggccttcaacgaacccaaaactcgccaattcgccttgcctcgcataccatcacccaacagttttgtcgattcaattgccactgcatcagagcttagcatgccatcgctggtcggtgaagagactcctgctaccatggctctgctggagaagatcatccgggagatgggaacccgagacggtcaagacgcattgatcgaccgcctctcggaactggcagaaaggctggcaggcatggcttctgcggccaaagtggaagagctctcgaaccacgtcaagaagatcaaccacacccgaactatcgtccctgcttccaaaaatcaacagcgaagtctcagcttcgacagcgtcgatgatgtgtcagttggcgaactcgagtggaatcaacaaaatggagctatgactcaaaggggaagggtcgagcacctaatccaagaccacaatggccgtcgtgcctcggttcccgcccgtcccaacgatgtcctcagtgacgacatcgtcaatatgattcgctcggtaaaagactgcgtcgcgcaaggtggcgggctgactgcagaggtgaaagcacttgtgcgagaactgcgaggtgaagtgctcggcatgggaagagaactcggccgaaagctcgaggagaccggcggtaagagctctcacagcaagagcgactcggggcacagagcagagcttgctcagattgtcgaagaaagcctcgaacagatgaaggtctacatgcaacagcgacttagagagcaccgacgcgagtcgactgaatcgcaaaagtctttggtggactaccaagagatatacaatcttgtaaggaccgccatcaccgaatccgaagagggcaagccacaagagcctaagctatgccgtgacgacgtgatgaatgccgtcaaagtagcatgggaggagtacaagcccgagatcgagattcaacagcttggtttggagcgtgatgaggtccttgcttgcatcaaagaaggccttgatgaatacgctcctcgccaagaaattcctcaaggtgcgacacgggatgaagttttccaagctgtcgttgaaggaatgaaacactatgttcctccgaaaatcgatacaccagctactctctctcgcgatgagattctcgatgctgtccgagaatgcctcgaggagttcgaatttcccatcgccccatcagcaataggcaatgaactatcacgggaggacatgcttcacgctgtgaaggaaggacttgataactttgagttcaaccccagcgctgctttggtgcctcatgacggcgctaatagtaccgagatcatggagagactacacgatatcatgcatttcatgcgtgatgagttcaaagctgtgtctgaggaagctaagcaaaatgttgctgccaacggtcgagataccgagcaagtattggatgctaccaaagacggttttgagaacttgcgtgctcatatggaggagtatgtcgacaaagtcagtggcaatcatggcacaggcgagcaggaagagctcatggcaaatcttgtcaacagcttcgacaacttccgcgacgacttgactgagatgattggcaagacgtcagacaactcaagagatctcgtgaagcaagagatcgaatctcttagagatgctgtcaactcgtctcttgttcctcatgttacgccaccgattgactaccgagaggctcttgagactattcgagaaggtctcgatcgagtaagaagcgacctgctgcgtcctcatgcaggcactacggacattctggacgccttgtcagagggcttcggcgacttgcgagcctgcattgagcgtgttaacgacaagccagcagatctcactgccaacgacgaaattctcgaggcccttaagtccggtcttgacagtgttcgtgttgatattgactctcttcgcgaaagtcaagagaacaatcatgttgacaacgaccgcgccgttgcacctgtcggtgctgctccctccatggagctcatcccccctaacttagtcaaacaagacgatatcgagaacttggttaaacacgacgatatccagaatctcgaagtcatgttgacgcagcttagcatcaagctggaggcgatggaatctcagactgtttcctcggttgcacctgaggctggactatcaaaagaggaccttagcgaggtggagcaaatgcttcgacaggctgcttccaaggatgacctgactgagattggagagatccttcaaaacggtccctcaaaagaagacctgaaccaaatggccgatgcgcttgcgagcggagcgtcgaaggaggatattcatcaaatgattgagatgatccagaatggagcatcaaaggaagaccttcagcccatgcttgaattgatccagaacgccgcctctaaggaggatcttgagcagctgaagactctgatcgtcactatgcaagaatcaatgcagcaggtggttgtaaaagaggagacagaagaagagaagcctgtcaacctcgaggatgctgctaccaaggaagatattctggccattgagactattttccgcaacaccaaagctcgtctggatgatcttatagatggcgagcaagcagtccgcaaagatcagatcgatgctgttgaggctgcgatcctggagaccagggaatctgtaacgtctattgtcactgggctcgagaccgtcactcggaaagaggatcttgttgctattgagtcattggtaacacaagtcactgttgcccttgatgagatgaaggaacgtgctgaaaagtctctcgaagaccccgagaaggtcaccaagactgatgttgacgctattgaggcagctgttcacaatacgaagtccctggttgaggagatctccgctgcaagccttggcattgctgagctcccctcaaaggatgatctcatacaacttgaaggcatcatgagagagatcaaggagtacaacactgcgcaagccgaagctaatgccactgcattgacacagcgacagactgaagtcctcactgtcaacgagagagttgaggaggtcaaggcattccttcatgagttccagcagatggccaagcagaaacttgagtctggcagcaatggtgtcgagaccttgagccaggtattggaagacctgagccagactatcaacctaaatgccaccgttggaagtgatgtcaacgagatgttagagaccatgaaatctgaatttgaagagactagaaacagtgtcgttggcgcgaagctcgacaccgatgacaaattcaaggagacaactgatactctcagcgaaaagtttgagacgaagatcggcgagctcgtcaccaagtacgaagaattccagctcgtgatggaagaccgaacaaaggccggagaggctagagacgccgacatggaagccgctgtcgtcggcaacaaggcagtcacagaggaactcaaatccctcatcgacactcttggttcgactgtcaccgattctttggagaaaatggaagaagcttcgaagactgtcttcgagaaagtggaaatgctgtacagcaaggccgaagacaaccactccgacggcctgagcgaacaccagttgacacgcgatcaagtcaagcaagctatcactgttgttgaaggtctccaaggtcatgttactgaatatcagcctcagattcttgacgctgtcaaggatgttctacttatcgttggacaacactacgagcactccaagacgtcggtcactgatattcaacaattcatcgaggacgcaaagccacctgttaatgacgagcctcctttgcttccccctcctcccgagaagtacgatgataccgaagtccaagccaaactggacaacatggatcgtgaggttcactccaaactggataagcttgttgaccacacgcatgcggctggcaaggcatacgcccagctcgacacgcttgacaaagtacaccaacaagtcgtgcagacagcagcagatatcagtgaatttctctcgttacaaaaacagagaatcgagaacgaatacgaggatcgggaaaagacactccaagaaacgaccattgccctcgagcgccagagagcagagcaagagcacgtctcggcctccttggtaactctaagagacgaggaagcacaactacgagagtctatccaagccctaaggacagaacaggaattccttactcgccaaaagaccagactaacagccgatgtctcctcactagagacagcgctccacatccgcaaggaagaactccacgccatggacgtccgagccgaagggctagaacgcagaattctggagggtgtcctggatcactcccgcgctctcctgatgacgaaatccagcaacaagggccgcgaagcaatgagcaggaagcgcgtagcaaggtccagtctaggcggtcccagttcccccgaattgaccaccaaacaaccggctgttgctaaatcgcgcgctctggctaatgtcgttggagcgaatggcagcagagctagtcttatcccgccgaaccccgctggcgcgagtagacgtattttgagccttagccagatcacgagtaatgtacccacgggcggactcaagaggagtcagagcgtgagggctcctgctgctgcggcgttgaggaagagctcttgggcccctggcaggggtggaaacaagacgtatggcgatttggataaggagaatgttgaggctgtcagggaggctgatgagaatgaggagttccttggggatgaggcggagacgccgagacagttacagattgaggatgcgcccacgcctgttgccgaggaggatgatactgttactgatgttggtcttcccgatcatgaacatccactggagtatgaggaagagcctgagcatctctctgagcacgaagagctcgaagagctcgaaggcgattctgaggcgggcacgctgagacgcgagtctggtggttctttgggaactacggttattacgtctgcagagacggagtctgaggcttatagccagtacagtggggagggtgaagagtatgatggccagagtctgtatgatgggagtgagtggactgagagcgcggttagtggtcagagtggtgggagtgggagttatgagggggatagctttgtgagtgagagtattgcggatacggactctattgctggcgagggtgaggttgtcgtctatgctgcttga

SEQ ID NO: 10103 - protein, 2037 aa, Muscodor strobelii
  misc_feature: SGI Peptide ID NO. 563190
  misc_feature (2)..(1885): NCBI GI: 261352957 Blast Desc: conserved [Verticillium albo-atrum VaMs.102]
  misc_feature (106)..(1622): NCBI GI: 145608294 Blast Desc: MGG_03223 [Magnaporthe grisea 70-15] gi|145015786|gb|EDK00276.1| MGG_03223 [Magnaporthe grisea 70-15]
  misc_feature (1)..(974): NCBI GI: 256735374 Blast Desc: NECHADRAFT_32130 [Nectria haematococca mpVI 77-13-4]
  misc_feature (30)..(1705): NCBI GI: 85077546 Blast Desc: NCU03578 [Neurospora crassa OR74A] gi|28881127|emb|CAD70298.1| related to transport protein USO1 [Neurospora crassa] gi|28917058|gb|EAA26781.1| [Neurospora crassa
  misc_feature (13)..(975): NCBI GI: 46107528 Blast Desc: FG00647.1 [Gibberella zeae PH-1]
  misc_feature (1)..(733): NCBI GI: 116200205 Blast Desc: CHGG_08258 [Chaetomium globosum CBS 148.51] gi|88179537|gb|EAQ87005.1| CHGG_08258 [Chaetomium globosum CBS 148.51]
  misc_feature (604)..(1692): NCBI GI: 116200205 Blast Desc: CHGG_08258 [Chaetomium globosum CBS 148.51] gi|88179537|gb|EAQ87005.1| CHGG_08258 [Chaetomium globosum CBS 148.51]
  misc_feature (11)..(1844): NCBI GI: 154284430 Blast Desc: [Ajellomyces capsulatus NAm1] gi|150406651|gb|EDN02192.1| [Ajellomyces capsulatus NAm1]
  misc_feature (1)..(1841): NCBI GI: 258563594 Blast Desc: [Uncinocarpus reesii 1704] gi|237908049|gb|EEP82450.1| [Uncinocarpus reesii 1704]
  misc_feature (11)..(1891): NCBI GI: 240273670 Blast Desc: conserved [Ajellomyces capsulatus H143]
MPSFEREAPPDRHLRHQHSASSSNALVPMWDSSDPERAPPPLPLNPQSPSVGTSRAGTSLAIQSAHAALNEKAREAALAPTLHKRNTTDFSPERALVHRPSPHKRMQSLQPGSVRDLSLMIEGSHDSAHSTPRGSPVKEKYGPRPATPGRRENEKESKSPEKEYVPTGTPTPMSSSLTPVLRPAARRPQSSILGENTPPQSATMLALRDMSSPPAREVESPLANVTNNATAASKPLAVNDQLANQLMNLTNIATSLQKEMSQLSRRSRDNATDLMSLKEATHARDEDIRKSLRELATNVDTTKHHRDTYNGGLYLDNKAFNEPKTRQFALPRIPSPNSFVDSIATASELSMPSLVGEETPATMALLEKIIREMGTRDGQDALIDRLSELAERLAGMASAAKVEELSNHVKKINHTRTIVPASKNQQRSLSFDSVDDVSVGELEWNQQNGAMTQRGRVEHLIQDHNGRRASVPARPNDVLSDDIVNMIRSVKDCVAQGGGLTAEVKALVRELRGEVLGMGRELGRKLEETGGKSSHSKSDSGHRAELAQIVEESLEQMKVYMQQRLREHRRESTESQKSLVDYQEIYNLVRTAITESEEGKPQEPKLCRDDVMNAVKVAWEEYKPEIEIQQLGLERDEVLACIKEGLDEYAPRQEIPQGATRDEVFQAVVEGMKHYVPPKIDTPATLSRDEILDAVRECLEEFEFPIAPSAIGNELSREDMLHAVKEGLDNFEFNPSAALVPHDGANSTEIMERLHDIMHFMRDEFKAVSEEAKQNVAANGRDTEQVLDATKDGFENLRAHMEEYVDKVSGNHGTGEQEELMANLVNSFDNFRDDLTEMIGKTSDNSRDLVKQEIESLRDAVNSSLVPHVTPPIDYREALETIREGLDRVRSDLLRPHAGTTDILDALSEGFGDLRACIERVNDKPADLTANDEILEALKSGLDSVRVDIDSLRESQENNHVDNDRAVAPVGAAPSMELIPPNLVKQDDIENLVKHDDIQNLEVMLTQLSIKLEAMESQTVSSVAPEAGLSKEDLSEVEQMLRQAASKDDLTEIGEILQNGPSKEDLNQMADALASGASKEDIHQMIEMIQNGASKEDLQPMLELIQNAASKEDLEQLKTLIVTMQESMQQVVVKEETEEEKPVNLEDAATKEDILAIETIFRNTKARLDDLIDGEQAVRKDQIDAVEAAILETRESVTSIVTGLETVTRKEDLVAIESLVTQVTVALDEMKERAEKSLEDPEKVTKTDVDAIEAAVHNTKSLVEEISAASLGIAELPSKDDLIQLEGIMREIKEYNTAQAEANATALTQRQTEVLTVNERVEEVKAFLHEFQQMAKQKLESGSNGVETLSQVLEDLSQTINLNATVGSDVNEMLETMKSEFEETRNSVVGAKLDTDDKFKETTDTLSEKFETKIGELVTKYEEFQLVMEDRTKAGEARDADMEAAVVGNKAVTEELKSLIDTLGSTVTDSLEKMEEASKTVFEKVEMLYSKAEDNHSDGLSEHQLTRDQVKQAITVVEGLQGHVTEYQPQILDAVKDVLLIVGQHYEHSKTSVTDIQQFIEDAKPPVNDEPPLLPPPPEKYDDTEVQAKLDNMDREVHSKLDKLVDHTHAAGKAYAQLDTLDKVHQQVVQTAADISEFLSLQKQRIENEYEDREKTLQETTIALERQRAEQEHVSASLVTLRDEEAQLRESIQALRTEQEFLTRQKTRLTADVSSLETALHIRKEELHAMDVRAEGLERRILEGVLDHSRALLMTKSSNKGREAMSRKRVARSSLGGPSSPELTTKQPAVAKSRALANVVGANGSRASLIPPNPAGASRRILSLSQITSNVPTGGLKRSQSVRAPAAAALRKSSWAPGRGGNKTYGDLDKENVEAVREADENEEFLGDEAETPRQLQIEDAPTPVAEEDDTVTDVGLPDHEHPLEYEEEPEHLSEHEELEELEGDSEAGTLRRESGGSLGTTVITSAETESEAYSQYSGEGEEYDGQSLYDGSEWTESAVSGQSGGSGSYEGDSFVSESIADTDSIAGEGEVVVYAA

SEQ ID NO: 10104 - DNA, 915 bp, Muscodor strobelii
  misc_feature: SGI cDNA ID NO. 563191
  misc_feature: Encodes the peptide sequence at SEQ ID NO 10105
atgtctccttctcctcccatggtaactggcaaggagcgcgagtccaacttggctcgacttttgggatctggctctgccggtattgccgaactggccgttttccatcccgtcgacacaattgccaagcgtctcatgagcaatcagactaaaatcgcaaactccgccgaattaaatgctgtcatcttcaaagacaaggccactgctcctgtcgggagaaaattcgtctccttattccctggtctcggatacgctgccggttacaaggtcttacaaagaatctacaagtatggcggccagcccgtagcacgagactacctcgctacccactacggcaaggattttgagagtgcctttggcaagaagacgggcaaagctatcatgcactcgactgccggaagtttgatcggcataggcgagatcgtcctcctccccctcgatgtgcttaagatcaagcgtcagacaaaccccgaggcattccgaggccgcggtatcttcaagatcgttgccgacgaaggattcggtctgtacagaggttggggctggacggccgcgcgaaatgccccaggctctttcgctctcttcggcggttctgctttcaccaaagagtatctttttggacttaacgactacaacaaggcctcttggttccagaacttcatcgcctcgatcgctggtgcttctgcatcgctcgtcgtctcggctcctctcgatgtcatcaagactcgtatccagaacagaaactttgagaaccccgagagcgggttccggatcttgtccaacatggctaagcacgaaggaatgtctagtttcttcaagggattggtgcccaagctcctcatgaccggacctaagctcgtcttctccttctggctcgcacagactctcattccggccttcgacggcatgctgaaataa

SEQ ID NO: 10105 - protein, 304 aa, Muscodor strobelii
  misc_feature: SGI Peptide ID NO. 563191
  misc_feature (214)..(303): Pfam Id: PF00153 Pfam Desc: Mitochondrial carrier protein
  misc_feature (15)..(208): Pfam Id: PF00153 Pfam Desc: Mitochondrial carrier protein
  misc_feature (214)..(283): Pfam Id: PF00153 Pfam Desc: Mitochondrial carrier protein
  misc_feature (144)..(208): Pfam Id: PF00153 Pfam Desc: Mitochondrial carrier protein
  misc_feature (4)..(303): NCBI GI: 261352958 Blast Desc: mitochondrial carrier protein [Verticillium albo-atrum VaMs.102]
  misc_feature (4)..(304): NCBI GI: 256735375 Blast Desc: [Nectria haematococca mpVI 77-13-4]
  misc_feature (4)..(300): NCBI GI: 171690082 Blast Desc: protein product [Podospora anserina] gi|170944996|emb|CAP71107.1| protein product [Podospora anserina]
  misc_feature (6)..(300): NCBI GI: 85078179 Blast Desc: NCU03561 [Neurospora crassa OR74A] gi|18376038|emb|CAD21044.1| YHM1 (mitochondrial carrier) [Neurospora crassa] gi|28917172|gb|EAA26888.1| NCU03561 crassa
  misc_feature (4)..(304): NCBI GI: 116200163 Blast Desc: mitochondrial carrier protein YHM1/SHM1, [Chaetomium globosum CBS 148.51] gi|88179516|gb|EAQ86984.1| mitochondrial carrier protein YHM1/SHM1, [Chaetomium globosum CBS 148.51]
  misc_feature (4)..(300): NCBI GI: 46107526 Blast Desc: FG00646.1 [Gibberella zeae PH-1]
  misc_feature (4)..(303): NCBI GI: 39942288 Blast Desc: conserved [Magnaporthe grisea 70-15] gi|145015785|gb|EDK00275.1| conserved [Magnaporthe grisea 70-15]
  misc_feature (1)..(299): NCBI GI: 238842833 Blast Desc: mitochondrial carrier protein [Microsporum canis CBS 113480]
  misc_feature (12)..(303): NCBI GI: 240110945 Blast Desc: Mitochondrial carrier protein YHM1/SHM1, [Coccidioides posadasii C735 delta SOWgp]
  misc_feature (12)..(299): NCBI GI: 119496303 Blast Desc: mitochondrial carrier protein [Neosartorya fischeri NRRL 181] gi|119413087|gb|EAW23028.1| mitochondrial carrier protein [Neosartorya fischeri NRRL 181]
MSPSPPMVTGKERESNLARLLGSGSAGIAELAVFHPVDTIAKRLMSNQTKIANSAELNAVIFKDKATAPVGRKFVSLFPGLGYAAGYKVLQRIYKYGGQPVARDYLATHYGKDFESAFGKKTGKAIMHSTAGSLIGIGEIVLLPLDVLKIKRQTNPEAFRGRGIFKIVADEGFGLYRGWGWTAARNAPGSFALFGGSAFTKEYLFGLNDYNKASWFQNFIASIAGASASLVVSAPLDVIKTRIQNRNFENPESGFRILSNMAKHEGMSSFFKGLVPKLLMTGPKLVFSFWLAQTLIPAFDGMLK

SEQ ID NO: 10106 - DNA, 1446 bp, Muscodor strobelii
  misc_feature: SGI EST ID NO. CUFF.23869.0
  misc_feature: Variant of the nucleotide sequence at SEQ ID NO 10104
gtgcgctaaagtcgcaatacaaaagttatcgataatttgctgaaccccagcgcgcgccggtctgagtttttgctgctatcaccatcgtcctcgtctccgagcccgccttcactctttttctctgtgtatccattgcgcctcgaagcttgcgatccgtaattcgtaatcatatctaccccattattctctctgatagttgtatatacctaatctaaccgatctccggaccgcctctctccaaccacaatgtctccttctcctcccatggtaactggcaaggagcgcgagtccaacttggctcgacttttgggatctggctctgccggtattgccgaactggccgttttccatcccgtcgacacaattgccaagcgtctcatgagcaatcagactaaaatcgcaaactccgccgaattaaatgctgtcatcttcaaagacaaggccactgctcctgtcgggagaaaattcgtctccttattccctggtctcggatacgctgccggttacaaggtcttacaaagaatctacaagtatggcggccagcccgtagcacgagactacctcgctacccactacggcaaggattttgagagtgcctttggcaagaagacgggcaaagctatcatgcactcgactgccggaagtttgatcggcataggcgagatcgtcctcctccccctcgatgtgcttaagatcaagcgtcagacaaaccccgaggcattccgaggccgcggtatcttcaagatcgttgccgacgaaggattcggtctgtacagaggttggggctggacggccgcgcgaaatgccccaggctctttcgctctcttcggcggttctgctttcaccaaagagtatctttttggacttaacgactacaacaaggcctcttggttccagaacttcatcgcctcgatcgctggtgcttctgcatcgctcgtcgtctcggctcctctcgatgtcatcaagactcgtatccagaacagaaactttgagaaccccgagagcgggttccggatcttgtccaacatggctaagcacgaaggaatgtctagtttcttcaagggattggtgcccaagctcctcatgaccggacctaagctcgtcttctccttctggctcgcacagactctcattccggccttcgacggcatgctgaaataaacaaaacaagaaacgagacaagccaagcatcacaaaaagataatccgacataaaatgtacaagtagataaacggcgcaccaggtttagaggcaatgtacgtgtatataatgagtttaaagatagccggcgtttttcaggggtacgcaagacgttctcgagcgcaaagttaggctagagtcaagagagtacggtaatataaaccagactacaatcttagacgttaggaagtactcgactctataattggaatataaagaagataacaataaaatattcgcgctgca

SEQ ID NO: 10107 - DNA, 2184 bp, Muscodor strobelii
  misc_feature: SGI cDNA ID NO. 563192
  misc_feature: Encodes the peptide sequence at SEQ ID NO 10108
atgctacttaccaagaacgctgccgagctctgcgtcctgctcgtcagtgaagtttatggccagcttccctcgcgcatcgttgctactttgtttgcacgcggccgttcagatgttagggagcttgcactccacacctcgctgacccccaaacaaatccgacatggactggccgtagtcatccagcatagcctcgtcttctacctcaccgaccccgataccaacatcaccaagtatgaagccaaccacgacgccgcctaccacctcgtccgcattggaaagatactcgacgtggtcgacagaaagtatggccgcatggctaagggactagtcaacgatgctctggctctcggcagtgtcgaggctgtcaatctcgtcacttactacgtcgaggagcgttcccccagaaagaggacatacaagcttaagcccaagcgcaagcaggatgatgcgtctgaaccccagcatccagatggacaacaacaagaaggcggccgggaagaacaggaggaagaggtcgttggtgacgatgaactcctgtacgaaccggacactgtactcaaagaggaagaagaagctaacggcgaccctttcgatgacccaatgattacggaccgtagcggtgactatgacaatgggctcaagtggaagatagtggtgcccgatccactgcaccccgatccaatccacaagaccgagttgtacgacactctggcacaactcattggcgctggcattcttgagaccgtccacgacaacatgtttcagtctcctcaggacctcaaggccagcattgagcaggaagtcatgcgcggttttccggaagggattcgaggtatcaagttgacgaacgagtttgacagcaaggtcgctgccaagctcaatggctgtggggaggagcgctggatgctaaggcgagaattgcagaccagcgctctagtcgagcccggcaatatcaaacgccgaaagttgacaaatggggggatcgctggtggatttgcaggctccgagggtggcagcatcttgcaagccaagtctcacaaagcagttctacgagtgaacttcaacaaatgtctcgtcgaactgcggaaccagaggcttgcggactatgccgaggatctcataggggaaactacagctcaagtccttggtgcgctgctggctgccgtgaccagaaaaatctaccaatgccagactcagtcccactccatcgtgtcagatgatgaagtgcatgcccatgtaaacggcgtccgtgtgagcactgacgaagtctttgaccatttgagttcggatgtcgatgtcttcacgggtattggcaccgactcttctgccaagatcgacattcgatatgcggaaaagatccgaaagtatcctcaccaagatcgtgatcctcacaaacccgacggcccagacgatgatgatgatctcatggacatagatgacgaggagtacgaccgaagcgaggagcatcggaatggcgcccagaccaatggacaccattatggacagccctcgcaaaatggcgtcaagcaagcttatgatgaagatgatccgtcagctcgtgctcagagaaagcgacaaatgcgtcagcatctgttggtacttgcggaaatcaagccatacttcattcgccattgtggtcctaacatgtggaccgtggactttgagacgttgctccatcaactgcgattcatggaactggacacaatcattgaagagaactttggccacgagggcctaaggctgactcgaattctccgagagaaaggcaagttggacgataagactctacccaacattgcgcttatgaagaagccggatgtatatgtgaagatggcccagatggaaatggcgggctttcttgaggcccaagaggtgccccgcgataacaaccgcgcagctaaccgaacccttttcttctggttcttcgacgagccacgggcaatgaaccggacactggacatcacgtacaagtcgatggtgcggctcttgcagcgtctgaatgcggagcgttataaggcaaagaatgtcatctcaatgacgaaccggtccgacgtgcggggccaggaagaaaaactccgaggcgatatctacaacgactaccgggaattcgttgaggttgagaagaaacttctcgcgccgttgtccagacttgacgatctggtctcgatcttccaagacttctaa

SEQ ID NO: 10108 - protein, 727 aa, Muscodor strobelii
  misc_feature: SGI Peptide ID NO. 563192
  misc_feature (9)..(70): Pfam Id: PF08221 Pfam Desc: RNA polymerase III subunit RPC82 helix-turn-helix domain
  misc_feature (235)..(623): Pfam Id: PF05645 Pfam Desc: RNA polymerase III subunit RPC82
  misc_feature (505)..(623): Pfam Id: PF05645 Pfam Desc: RNA polymerase III subunit RPC82
  misc_feature (346)..(386): Pfam Id: PF05645 Pfam Desc: RNA polymerase III subunit RPC82
  misc_feature (47)..(727): NCBI GI: 116200165 Blast Desc: CHGG_08238 [Chaetomium globosum CBS 148.51] gi|121779992|sp|Q2GUW6.1|RPC3_CHAGB RecName: Full=DNA-directed RNA polymerase III subunit RPC3; Short=RNA polymerase III subunit
  misc_feature (1)..(727): NCBI GI: 145608292 Blast Desc: MGG_03225 [Magnaporthe grisea 70-15] gi|145015784|gb|EDK00274.1| MGG_03225 [Magnaporthe grisea 70-15]
  misc_feature (4)..(727): NCBI GI: 171690080 Blast Desc: protein product [Podospora anserina] gi|170944995|emb|CAP71106.1| protein product [Podospora anserina]
  misc_feature (232)..(727): NCBI GI: 261352966 Blast Desc: RNA polymerase III subunit Rpc82 [Verticillium albo-atrum VaMs.102]
  misc_feature (230)..(727): NCBI GI: 256735376 Blast Desc: NECHADRAFT_75140 [Nectria haematococca mpVI 77-13-4]
  misc_feature (233)..(727): NCBI GI: 46107524 Blast Desc: FG00645.1 [Gibberella zeae PH-1]
  misc_feature (230)..(727): NCBI GI: 85078174 Blast Desc: NCU03560 [Neurospora crassa OR74A] gi|74622578|sp|Q8WZW7.1|RPC3_NEUCR RecName: Full=DNA-directed RNA polymerase III subunit rpc-3; Short=RNA polymerase III subunit C3
  misc_feature (232)..(727): NCBI GI: 154319039 Blast Desc: BC1G_02471 [Botryotinia fuckeliana B05.10] gi|206558269|sp|A6RPU8.1|RPC3_BOTFB RecName: Full=DNA-directed RNA polymerase III subunit rpc3; Short=RNA polymerase III subunit
  misc_feature (3)..(727): NCBI GI: 258571533 Blast Desc: [Uncinocarpus reesii 1704] gi|237904840|gb|EEP79241.1| [Uncinocarpus reesii 1704]
  misc_feature (2)..(727): NCBI GI: 169776609 Blast Desc: [Aspergillus oryzae RIB40] gi|238503327|ref|XP_002382897.1| DNA directed RNA polymerase III subunit Rpc82, [Aspergillus flavus NRRL3357] RecName: RNA III III
MLLTKNAAELCVLLVSEVYGQLPSRIVATLFARGRSDVRELALHTSLTPKQIRHGLAVVIQHSLVFYLTDPDTNITKYEANHDAAYHLVRIGKILDVVDRKYGRMAKGLVNDALALGSVEAVNLVTYYVEERSPRKRTYKLKPKRKQDDASEPQHPDGQQQEGGREEQEEEVVGDDELLYEPDTVLKEEEEANGDPFDDPMITDRSGDYDNGLKWKIVVPDPLHPDPIHKTELYDTLAQLIGAGILETVHDNMFQSPQDLKASIEQEVMRGFPEGIRGIKLTNEFDSKVAAKLNGCGEERWMLRRELQTSALVEPGNIKRRKLTNGGIAGGFAGSEGGSILQAKSHKAVLRVNFNKCLVELRNQRLADYAEDLIGETTAQVLGALLAAVTRKIYQCQTQSHSIVSDDEVHAHVNGVRVSTDEVFDHLSSDVDVFTGIGTDSSAKIDIRYAEKIRKYPHQDRDPHKPDGPDDDDDLMDIDDEEYDRSEEHRNGAQTNGHHYGQPSQNGVKQAYDEDDPSARAQRKRQMRQHLLVLAEIKPYFIRHCGPNMWTVDFETLLHQLRFMELDTIIEENFGHEGLRLTRILREKGKLDDKTLPNIALMKKPDVYVKMAQMEMAGFLEAQEVPRDNNRAANRTLFFWFFDEPRAMNRTLDITYKSMVRLLQRLNAERYKAKNVISMTNRSDVRGQEEKLRGDIYNDYREFVEVEKKLLAPLSRLDDLVSIFQDF

SEQ ID NO: 10109 - DNA, 2741 bp, Muscodor strobelii
  misc_feature: SGI EST ID NO. CUFF.23916.0
  misc_feature: Variant of the nucleotide sequence at SEQ ID NO 10107
cacaaacttcgtctcgctcagcgcattctcattgatcaccacgatcgccacgtctcagcacatcaatgaagctgaggtagcaattgcgagagctctagagatagtgagaggatctctagaagccattctttccacatcgtctgtgccgtgcactttgaatccgagcgcctgccgcgactgccagcgctgcccgtaacacatcatgctacttaccaagaacgctgccgagctctgcgtcctgctcgtcagtgaagtttatggccagcttccctcgcgcatcgttgctactttgtttgcacgcggccgttcagatgttagggagcttgcactccacacctcgctgacccccaaacaaatccgacatggactggccgtagtcatccagcatagcctcgtcttctacctcaccgaccccgataccaacatcaccaagtatgaagccaaccacgacgccgcctaccacctcgtccgcattggaaagatactcgacgtggtcgacagaaagtatggccgcatggctaagggactagtcaacgatgctctggctctcggcagtgtcgaggctgtcaatctcgtcacttactacgtcgaggagcgttcccccagaaagaggacatacaagcttaagcccaagcgcaagcaggatgatgcgtctgaaccccagcatccagatggacaacaacaagaaggcggccgggaagaacaggaggaagaggtcgttggtgacgatgaactcctgtacgaaccggacactgtactcaaagaggaagaagaagctaacggcgaccctttcgatgacccaatgattacggaccgtagcggtgactatgacaatgggctcaagtggaagatagtggtgcccgatccactgcaccccgatccaatccacaagaccgagttgtacgacactctggcacaactcattggcgctggcattcttgagaccgtccacgacaacatgtttcagtctcctcaggacctcaaggccagcattgagcaggaagtcatgcgcggttttccggaagggattcgaggtatcaagttgacgaacgagtttgacagcaaggtcgctgccaagctcaatggctgtggggaggagcgctggatgctaaggcgagaattgcagaccagcgctctagtcgagcccggcaatatcaaacgccgaaagttgacaaatggggggatcgctggtggatttgcaggctccgagggtggcagcatcttgcaagccaaggtaagccttgccgcatactgattaagaagtcatgctcgctaattgtcatatcagtctcacaaagcagttctacgagtgaacttcaacaaatgtctcgtcgaactgcggaaccagaggcttgcggactatgccgaggatctcataggggaaactacagctcaagtccttggtgcgctgctggctgccgtgaccagaaaaatctaccaatgccagactcagtcccactccatcgtgtcagatgatgaagtgcatgcccatgtaaacggcgtccgtgtgagcactgacgaagtctttgaccatttgagttcggatgtcgatgtcttcacgggtattggcaccgactcttctgccaagatcgacattcgatatgcggaaaagatccgaaagtatcctcaccaagatcgtgatcctcacaaacccgacggcccagacgatgatgatgatctcatggacatagatgacgaggagtacgaccgaagcgaggagcatcggaatggcgcccagaccaatggacaccattatggacagccctcgcaaaatggcgtcaagcaagcttatgatgaagatgatccgtcagctcgtgctcagagaaagcgacaaatgcgtcagcatctgttggtacttgcggaaatcaagccatacttcattcgccattgtggtcctaacatgtggaccgtggactttgagacgttgctccatcaactgcgattcatggaactggacacaatcattgaagagaactttggccacgagggcctaaggctgactcgaattctccgagagaaaggcaagttggacgataagactctacccaacattgcgcttatgaagaagccggatgtatatgtgaagatggcccagatggaaatggcgggctttcttgaggcccaagaggtgccccgcgataacaaccgcgcagctaaccgaacccttttcttctggttcttcgacgagccacgggcaatgaaccggacactggacatcacgtacaagtcgatggtgcggctcttgcagcgtctgaatgcggagcgttataaggcaaagaatgtcatctcaatgacgaaccggtccgacgtgcggggccaggaagaaaaactccgaggcgatatctacaacgactaccgggaattcgttgaggttgagaagaaacttctcgcgccgttgtccagacttgacgatctggtctcgatcttccaagacttctaagaagtcgtgtacaaaccccaaaaatgtaggcagacgaagttcgaggagggaggagtcaccgggagttgcccgtattgcattgcatttcggcgttggttggatcacggcaggccaaggttcatgactcttgcataagatggcgtttgatacttctctaaccagcgactttctacttcgggtgattgtccaggttctggctgaagtcagccgcattagaacctatcttataaagtgtaatatcacaaatgtaccacatcatagtggcgagtagacaaaaaacagagaccttgtgtcaagcata

SEQ ID NO: 10110 - DNA, 327 bp, Muscodor strobelii
  misc_feature: SGI cDNA ID NO. 563193
  misc_feature: Encodes the peptide sequence at SEQ ID NO 10111
atggcctgtttgtcgtccatgcttattatgccgaccatccactcgagttctttcccaccggagggctacaatttcaaagtcaccgaccgcttccagtacggacaaaagaacaccgagagtgaaaactgcttcatcgtctatcacgataaggaacgcaagacttatcagcaccgattcatcgagacagctgtcctctcagccttgggcaaggtcggacccaaagctgccgacaccgctctcgccgcctttggtttgcctgccggaacggcttccaaggttaccgacactgtgaagtgctacgctggcgactatctgcataacttctaa

SEQ ID NO: 10111 - protein, 108 aa, Muscodor strobelii
  misc_feature: SGI Peptide ID NO. 563193
  misc_feature (20)..(108): NCBI GI: 171679753 Blast Desc: protein product [Podospora anserina] gi|170939502|emb|CAP64730.1| protein product [Podospora anserina]
  misc_feature (25)..(108): NCBI GI: 170099229 Blast Desc: [Laccaria bicolor S238N-H82] gi|164644358|gb|EDR08608.1| [Laccaria bicolor S238N-H82]
  misc_feature (26)..(108): NCBI GI: 46119810 Blast Desc: FG04797.1 [Gibberella zeae PH-1]
  misc_feature (27)..(108): NCBI GI: 256728455 Blast Desc: NECHADRAFT_54148 [Nectria haematococca mpVI 77-13-4]
  misc_feature (10)..(108): NCBI GI: 46119781 Blast Desc: FG04795.1 [Gibberella zeae PH-1]
  misc_feature (23)..(108): NCBI GI: 256723418 Blast Desc: NECHADRAFT_80984 [Nectria haematococca mpVI 77-13-4]
MACLSSMLIMPTIHSSSFPPEGYNFKVTDRFQYGQKNTESENCFIVYHDKERKTYQHRFIETAVLSALGKVGPKAADTALAAFGLPAGTASKVTDTVKCYAGDYLHNF

SEQ ID NO: 10112 - DNA, 877 bp, Muscodor strobelii
  misc_feature: SGI EST ID NO. CUFF.23876.0
  misc_feature: Variant of the nucleotide sequence at SEQ ID NO 10110
gttgcattgcattcagtctcagctcacaacgcctcttgagtgttcgatgccactcctgactgattgttgctcgattctcgtagccaaaccaagcccaatgggacagtaccatgccacaagatagccatgtagcaacgaaacctgtcctaataagttcttaccttaaacctgagatactaatttaactctcaaagactgctggcccctcaagcgatgcggttcttatcatatatatttcttgataagtacaacggcaaaacagatccagaagatatgaaaatgaaatgactacctttactgaccacatgctttcattcagagggctacaatttcaaagtcaccgaccgcttccagtacggacaaaagaacaccgagagtgaaaactgcttcatcgtctatcacgataaggaacgcaagacttatcagcaccgattcatcgagacagctgtcctctcagccttgggcaaggtcggacccaaagctgccgacaccgctctcgccgcctttggtttgcctgccggaacggcttccaaggttaccgacactgtgaagtgctacgctggcgactatctgcataacttctaagcggctcctcgtccggcggagatttggtcaaagccattgtgtttgtggctggaggcggtgctactgtgtaggtgattagagggcgcggtataggagtatggtcgagagacgagaggataaggaataagaggtatgcaggaacggaagggggaacgtcattgatgcattaagaaacttaattcattcatttattcccatattggggcttttcactcttttacgcagacaagtagatagatactagcaatatgccggcttgggcacttaatatgcaaaagcccctattgcgcgc

SEQ ID NO: 10113 - DNA, 1374 bp, Muscodor strobelii
  misc_feature: SGI cDNA ID NO. 563194
  misc_feature: Reduced expression when VOC is produced
  misc_feature: Encodes the peptide sequence at SEQ ID NO 10114
atgatcgctaaaacggctatctcccggagcgcccagcttgctagcaggcagggcgcctccaagctcgcccgcagctatgctactacgacgtccgtcccgtcatctttcaactacgagaccgccgacgttgctggtgtcaaggtcgcaacccgcgattcccacggtccgaccaccaaacttgctatcgtcgccaaggcgggcactagatatgagcctactcccggcctgaccgtcggtctggaggagtttgctttcaagaacaccaaatcacgatccgccctgcgcatcacccgagaggccgagcttttgggaggccaattgatcgcataccacactcgagaagccctcgtcctcgaggccagcttcctgcgcgaggatatcccctactttaccgaactgctcgccgaggtcatctcccagactaagtacacaaccttcgaattccaggaggaggttgagcgcgtcttgcatctgaagcaggccaaggttgctggcgatgtctcggcgctcgctttggacgccgcccactcggtcgcattccacaccggccttggttcctccctgtacccttcgccttcgactcccctcaagtcctacttgaacgagcacaagctcgccgaatactccgaggccgtctacagcaagggcaacatcgccctcgtcggagacggtgccacccagaccgccctgcacaagtggaccgagcagttcttcaaggccgtccctgcctcatccaccggcagcctagcgccaacctcgaaggcctcgacatactacggtggtgagcaacgcactgcccacaatgctggcaactcgctggtcctcgccttccccggctccagcttcggcaccttcaagcctgaggttgccgtcctgacagctcttctgggaggaacacccaacgttaagtggtcgcctggtttcagtgttctctctaaggctgctgcggcttctccaggtgctactgcgcacgccaccaacttcgcatactcggacgctggtctgctcaccatccagatcaacggtgctgctgcctcggtgcgcaagactgccgaggaggcagtcaaggccctcaagagcattgctgagggcaccgtcagcaaggaggacctcaccaaggccatcgctcgtgccaagttcgacgccctcgaggccagccagtctggcgtctccaccctcctctcggccggctctggcatcgtccagaccggcaagcccttcgagctcgttgagaccgtgcagtctatcagcggcgtcaccgcggacaagctcaaggctgctgccaaatctattattgacggcaaggctacggtcgctgctgtgggtgacctccatgtattaccgttcgctgaggagcttggattgaaggtataa

SEQ ID NO: 10114 - protein, 457 aa, Muscodor strobelii
  misc_feature: SGI Peptide ID NO. 563194
  misc_feature (199)..(378): Pfam Id: PF05193 Pfam Desc: Peptidase M16 inactive domain
  misc_feature (47)..(193): Pfam Id: PF00675 Pfam Desc: Insulinase (Peptidase family M16)
  misc_feature (47)..(155): Pfam Id: PF00675 Pfam Desc: Insulinase (Peptidase family M16)
  misc_feature (1)..(457): NCBI GI: 164427496 Blast Desc: NCU03559 [Neurospora crassa OR74A] gi|52788223|sp|O60044.2|QCR2_NEUCR RecName: Full=Cytochrome b-c1 complex subunit 2, mitochondrial; AltName: reductase complex core
  misc_feature (1)..(457): NCBI GI: 3087842 Blast Desc: core protein II [Neurospora crassa]
  misc_feature (1)..(457): NCBI GI: 261352965 Blast Desc: cytochrome b-c1 complex subunit 2 [Verticillium albo-atrum VaMs.102]
  misc_feature (1)..(457): NCBI GI: 256734654 Blast Desc: [Nectria haematococca mpVI 77-13-4]
  misc_feature (1)..(457): NCBI GI: 46107522 Blast Desc: FG00644.1 [Gibberella zeae PH-1]
  misc_feature (1)..(457): NCBI GI: 156062962 Blast Desc: SS1G_01597 [Sclerotinia sclerotiorum 1980] gi|154696933|gb|EDN96671.1| SS1G_01597 [Sclerotinia sclerotiorum 1980]
  misc_feature (1)..(457): NCBI GI: 154319041 Blast Desc: ubiquinol-cytochrome-c reductase complex core protein 2, mitochondrial precursor [Botryotinia fuckeliana B05.10] gi|150856903|gb|EDN32095.1| ubiquinol-cytochrome-c reductase core
  misc_feature (1)..(457): NCBI GI: 116200167 Blast Desc: CHGG_08239 [Chaetomium globosum CBS 148.51] gi|88179518|gb|EAQ86986.1| CHGG_08239 [Chaetomium globosum CBS 148.51]
  misc_feature (1)..(457): NCBI GI: 226494017 Blast Desc: LOC100273290 [Zea mays] gi|194703242|gb|ACF85705.1| [Zea mays]
  misc_feature (1)..(457): NCBI GI: 171690078 Blast Desc: protein product [Podospora anserina] gi|170944994|emb|CAP71105.1| protein product [Podospora anserina]
  misc_feature (45)..(448): SWISSPROT Homolog: EC 3.4.24.64 Mitochondrial processing peptidase
  misc_feature: Useful for introducing or modulating the production of volatile compounds
MIAKTAISRSAQLASRQGASKLARSYATTTSVPSSFNYETADVAGVKVATRDSHGPTTKLAIVAKAGTRYEPTPGLTVGLEEFAFKNTKSRSALRITREAELLGGQLIAYHTREALVLEASFLREDIPYFTELLAEVISQTKYTTFEFQEEVERVLHLKQAKVAGDVSALALDAAHSVAFHTGLGSSLYPSPSTPLKSYLNEHKLAEYSEAVYSKGNIALVGDGATQTALHKWTEQFFKAVPASSTGSLAPTSKASTYYGGEQRTAHNAGNSLVLAFPGSSFGTFKPEVAVLTALLGGTPNVKWSPGFSVLSKAAAASPGATAHATNFAYSDAGLLTIQINGAAASVRKTAEEAVKALKSIAEGTVSKEDLTKAIARAKFDALEASQSGVSTLLSAGSGIVQTGKPFELVETVQSISGVTADKLKAAAKSIIDGKATVAAVGDLHVLPFAEELGLKV

SEQ ID NO: 10115 - DNA, 1797 bp, Muscodor strobelii
  misc_feature: SGI EST ID NO. CUFF.24522.0
  misc_feature: Variant of the nucleotide sequence at SEQ ID NO 10113
cgagaatctcccggaactgagcatctttttgctcctccaagctttcacctcgacccgacccgaaggtgtctccgtcgacttcagttgccattcgtcgccggcgaacctcccccatcatgatcgctaaaacggctatctcccggagcgcccagcttgctagcaggcagggcgcctccaagctcgcccgcagctatgctactacgacgtccgtcccgtcatctttcaactacgagaccgccgacgttgctggtgtcaaggtcgcaacccgcgattcccacggtccgaccaccaaacttgctatcgtcgccaaggcgggcactagatatgagcctactcccggcctgaccgtcggtctggaggagtttgctttcaagaacaccaaatcacgatccgccctgcgcatcacccgagaggccgagcttttgggaggccaattgatcgcataccacactcgagaagccctcgtcctcgaggccagcttcctgcgcgaggatatcccctactttaccgaactgctcgccgaggtcatctcccagactaagtacacaaccttcgaattccaggaggaggttgagcgcgtcttgcatctgaagcaggccaaggttgctggcgatgtctcggcgctcgctttggacgccgcccactcggtcgcattccacaccggccttggttcctccctgtacccttcgccttcgactcccctcaagtcctacttgaacgagcacaagctcgccgaatactccgaggccgtctacagcaagggcaacatcgccctcgtcggagacggtgccacccagaccgccctgcacaagtggaccgagcagttcttcaaggccgtccctgcctcatccaccggcagcctagcgccaacctcgaaggcctcgacatactacggtggtgagcaacgcactgcccacaatgctggcaactcgctggtcctcgccttccccggctccagcttcggcaccttcaagcctgaggttgccgtcctgacagctcttctgggaggaacacccaacgttaagtggtcgcctggtttcagtgttctctctaaggctgctgcggcttctccaggtgctactgcgcacgccaccaacttcgcatactcggacgctggtctgctcaccatccagatcaacggtgctgctgcctcggtgcgcaagactgccgaggaggcagtcaaggccctcaagagcattgctgagggcaccgtcagcaaggaggacctcaccaaggccatcgctcgtgccaagttcgacgccctcgaggccagccagtctggcgtctccaccctcctctcggccggctctggcatcgtccagaccggcaagcccttcgagctcgttgagaccgtgcagtctatcagcggcgtcaccgcggacaagctcaaggctgctgccaaatctattattgacggcaaggctacggtcgctgctgtgggtgacctccatgtattaccgttcgctgaggagcttggattgaaggtataagtgtggtattggggcggtggataagtataaaaatgtaccaacagatcagtagagtcgagccctagccttgtgcatatagtcagcatcccttagagttccctttataatctttagatttcaccaaagtgccacccgttacttgatacttgtatctaataggtcgctatttcagcgcgtaatgagtttcgattatgcttgggctgacatccccatcaaatccatacagtaggtgtaatcaatgcatctgatgcaggatatgatataagtccaaactatccaatagctcataggtatcaatgaaatttcg

SEQ ID NO: 10116 - DNA, 228 bp, Muscodor strobelii
  misc_feature: SGI cDNA ID NO. 563195
  misc_feature: Encodes the peptide sequence at SEQ ID NO 10117
atggtcttcgcctggaaagcagctggcctcagctacaaccgctacctctcggtcgcctcccgcgtcgtgcgccgaagcttgaaggaggagaagagagtcgctgccgagcgccgaggcgatatggacttgcgatttgccaagtgggagaacggcaagatgggcgataccaagaacttggccgacgccaacgcggcggctgctgctgagaacgcctccagctcctcataa

SEQ ID NO: 10117 - protein, 75 aa, Muscodor strobelii
  misc_feature: SGI Peptide ID NO. 563195
  misc_feature (3)..(51): Pfam Id: PF04627 Pfam Desc: Mitochondrial ATP synthase epsilon chain
  misc_feature (1)..(74): NCBI GI: 154319043 Blast Desc: mitochondrial ATP synthase epsilon chain domain-containing protein [Botryotinia fuckeliana B05.10] gi|150856904|gb|EDN32096.1| mitochondrial ATP synthase epsilon
  misc_feature (1)..(73): NCBI GI: 116200167 Blast Desc: CHGG_08239 [Chaetomium globosum CBS 148.51] gi|88179518|gb|EAQ86986.1| CHGG_08239 [Chaetomium globosum CBS 148.51]
  misc_feature (1)..(71): NCBI GI: 259479723 Blast Desc: TPA: Mitochondrial ATP synthase epsilon chain domain-containing protein (AFU_orthologue; AFUA_2G09310) [Aspergillus nidulans FGSC A4]
  misc_feature (1)..(65): NCBI GI: 226282078 Blast Desc: PAAG_08062 [Paracoccidioides brasiliensis Pb01]
  misc_feature (1)..(59): NCBI GI: 256734623 Blast Desc: [Nectria haematococca mpVI 77-13-4]
  misc_feature (1)..(71): NCBI GI: 255941292 Blast Desc: Pc16g11100 [Penicillium chrysogenum Wisconsin 54-1255] gi|211586038|emb|CAP93780.1| Pc16g11100 [Penicillium chrysogenum Wisconsin 54-1255]
  misc_feature (1)..(59): NCBI GI: 171690076 Blast Desc: protein product [Podospora anserina] gi|170944993|emb|CAP71104.1| protein product [Podospora anserina]
  misc_feature (5)..(71): NCBI GI: 238493597 Blast Desc: Mitochondrial ATP synthase epsilon chain domain-containing protein [Aspergillus flavus NRRL3357] gi|220696529|gb|EED52871.1| Mitochondrial ATP synthase epsilon
  misc_feature (1)..(59): NCBI GI: 261194567 Blast Desc: BDBG_05862 [Ajellomyces dermatitidis SLH14081] gi|239588226|gb|EEQ70869.1| BDBG_05862 [Ajellomyces dermatitidis SLH14081] gi|239613495|gb|EEQ90482.1| BDCG_05602 [Ajellomyces
  misc_feature (1)..(59): NCBI GI: 39942294 Blast Desc: [Magnaporthe grisea 70-15] gi|145015782|gb|EDK00272.1| [Magnaporthe grisea 70-15]
MVFAWKAAGLSYNRYLSVASRVVRRSLKEEKRVAAERRGDMDLRFAKWENGKMGDTKNLADANAAAAAENASSSS

SEQ ID NO: 10118 - DNA, 580 bp, Muscodor strobelii
  misc_feature: SGI EST ID NO. CUFF.24671.0
  misc_feature: Variant of the nucleotide sequence at SEQ ID NO 10116
ctggtgcagcccgtcggaaactcggccattcgcccaattgcacccgggcgagctctcgattttgcttcatcctcaagtaccgcaacacctcgcccaaccaccaccctcatccgacaccctcaataccgtcaaaatggtcttcgcctggaaagcagctggcctcagctacaaccgctacctctcggtcgcctcccgcgtcgtgcgccgaagcttgaaggaggagaagagagtcgctgccgagcgccgaggcgatatggacttgcgatttgccaagtgggagaacggcaagatgggcgataccaagaacttggccgacgccaacgcggcggctgctgctgagaacgcctccagctcctcataaacgactacgatacccgattgacaagacaacatccggtcagtgaagggtgcacaatggacagataccatagacggcagaaagagtacgagatcaagggctagaaaggcttttcgtcttcgtgtacaattgtataaaataggagcaacaaaagcttacacctaccaattgaaggcataaggtagccatcataattgatcatctgctgctgtccgacatgtg

SEQ ID NO: 10119 - DNA, 2286 bp, Muscodor strobelii
  misc_feature: SGI cDNA ID NO. 563196
  misc_feature: Encodes the peptide sequence at SEQ ID NO 10120
atgcagtccttcgactcccccgtgccgcctccgcccaacatatcgcgacctggcatcatggctatagatatcactgacaagttcaagtctgcagtaaacactctagcacctggtgaaattatcaaagatgagcatttcactcttttcgagtcggtctcggccctggagatcatggaccgcaagatggacagcggcgtgcttgaagacggcgagtcgctcgatgaggagtacgacgtgagtcgtgagctactaccagtagagatacttggcatcataaaccagctactaagtcttgagatggcctggcatcttggctatccgctgtcgcaaacacttctcacgagcgtctatgtggaggccatgatgaaccctcacccaagaacgatagacgaagtaaatttcacgagagggccgcctgatcccgaggactcgacatctctcatgtttgtcctgcgagcctattgtgccgggatgctgagagcttgcgcttttgtgaacgacatagtgaaggatgagttgtactacgaggaggaggatttcgtcaccaatacctacgatcgatacttcctatacgatatacccagcatcgacatattggaccttctcaacagtgcgtggggtgagctatacgcaatgagtgacgctataggtcctgagatatgcgcagccctcgcttaccgtattgaatttcgaatcaagtttctacttgccttggagcagcttgtttctagagacattaattctgaatcaccggcacccctctggatagagatgaggagactggtcgatgacatagaaaaacgacccgagctagaaagacctgttccagaagctttcagtaccaaactgcagagacggctcgctagtaccatgcctccacgtcccatggtcaatttgagctttgaggaaagcattagccatttcaaacgatttgcccaaaccgggatcgaagttatggatgtgcttgactacaaagatccacaaagcctccttaatttcattctcactttccaaacacaaaagccacaaccgtcgccattcataaggaccatccttcagaatcttttattcaaagatatgatcgtacttggccgtttcagtatccgccagttgattgatcatgacatcggtattcttgtgctacctagcagcccacatcttgagcgaggaaacgataatgttgaagtccctacggatccacggcattcgatctcgtcgcaaatggaggtcttccgtcagcgaattgcagacgtatacttggatacatttcgctttctctgccagaaccggtgtcgtgtaaggagaacactatgccatcatattcaggactgggacgcattagaagcagacgtgggcgagatcgaggaacgcctcaagggccctctcagcgaaatatctctgcctggatgggatcccacgttcctgcccctgacatcttgggcttatgtctacaaactacaacagatggaatgggtagtacagcttggtttcgagcttaccgtgtaccaggctgacgagctcgccggcatgtattactacctcaagcggttagctgcactccgcgcccaacacatcgagtacatcaagcggataaccaccacacgacaagacgaatcgcaagcatccgaagtgtctgaaactccagatcatgactccgagttccaatacgcgagatcaagacaatatcaccgcgtggcgatgctagacgcggcatgtacatgggaattcgccgacggactgagtctcgtctacacggcacttcttcgcttaggtctgatcaaaccacctcctagaccatacagcacggataaactgcgctacgaaatacgcatgcgaccattctcacgcgtcgcaatgccgcagctgccaagctacgaggaattcaccgagtataccatgctccacgatgtcagaacagcagaactgctcaacttcgccgacactgctgtagccgcggcgagaagaggttttgaggcatcgctgcatctgtctgagaatgactcgttctcgattaatgctacggcgtatgggagatggatcagcaataagaaggattgcctgcgcgctacgatcgcggccggcgttgctgttagtacgctgaaaagagcctatgaacgagttatggaagcacagaagactagactcggtaaagagaaggatcaagagggtggcgtggagggggagaagaagcttgcggacttactaaaaatcaaggtcgaggtcccggagcccgaggatgcgtaccataactggtggattgtgcccaaattgacgcctcttcggtag

SEQ ID NO: 10120 - protein, 761 aa, Muscodor strobelii
  misc_feature: SGI Peptide ID NO. 563196
  misc_feature (22)..(202): Pfam Id: PF04112 Pfam Desc: Mak10 subunit, NatC N(alpha)-terminal acetyltransferase
  misc_feature (22)..(121): Pfam Id: PF04112 Pfam Desc: Mak10 subunit, NatC N(alpha)-terminal acetyltransferase
  misc_feature (2)..(759): NCBI GI: 256734624 Blast Desc: NECHADRAFT_75084 [Nectria haematococca mpVI 77-13-4]
  misc_feature (13)..(759): NCBI GI: 46105362 Blast Desc: FG00309.1 [Gibberella zeae PH-1]
  misc_feature (7)..(761): NCBI GI: 261356844 Blast Desc: conserved [Verticillium albo-atrum VaMs.102]
  misc_feature (12)..(758): NCBI GI: 39942296 Blast Desc: MGG_03228 [Magnaporthe grisea 70-15] gi|145015781|gb|EDK00271.1| MGG_03228 [Magnaporthe grisea 70-15]
  misc_feature (14)..(538): NCBI GI: 18376042 Blast Desc: conserved [Neurospora crassa]
  misc_feature (14)..(538): NCBI GI: 164427494 Blast Desc: NCU03557 [Neurospora crassa OR74A] gi|157071766|gb|EAA26884.2| conserved [Neurospora crassa OR74A]
  misc_feature (23)..(761): NCBI GI: 119480799 Blast Desc: amino-acid N-acetyltransferase subunit Mak10, [Neosartorya fischeri NRRL 181] gi|119408582|gb|EAW18531.1| amino-acid N-acetyltransferase subunit Mak10, [Neosartorya NRRL
  misc_feature (163)..(758): NCBI GI: 116200169 Blast Desc: CHGG_08240 [Chaetomium globosum CBS 148.51] gi|88179519|gb|EAQ86987.1| CHGG_08240 [Chaetomium globosum CBS 148.51]
  misc_feature (20)..(761): NCBI GI: 238844342 Blast Desc: conserved [Microsporum canis CBS 113480]
  misc_feature (23)..(759): NCBI GI: 238493595 Blast Desc: amino-acid N-acetyltransferase subunit Mak10, [Aspergillus flavus NRRL3357] gi|220696528|gb|EED52870.1| amino-acid N-acetyltransferase subunit Mak10, [Aspergillus flavus
MQSFDSPVPPPPNISRPGIMAIDITDKFKSAVNTLAPGEIIKDEHFTLFESVSALEIMDRKMDSGVLEDGESLDEEYDVSRELLPVEILGIINQLLSLEMAWHLGYPLSQTLLTSVYVEAMMNPHPRTIDEVNFTRGPPDPEDSTSLMFVLRAYCAGMLRACAFVNDIVKDELYYEEEDFVTNTYDRYFLYDIPSIDILDLLNSAWGELYAMSDAIGPEICAALAYRIEFRIKFLLALEQLVSRDINSESPAPLWIEMRRLVDDIEKRPELERPVPEAFSTKLQRRLASTMPPRPMVNLSFEESISHFKRFAQTGIEVMDVLDYKDPQSLLNFILTFQTQKPQPSPFIRTILQNLLFKDMIVLGRFSIRQLIDHDIGILVLPSSPHLERGNDNVEVPTDPRHSISSQMEVFRQRIADVYLDTFRFLCQNRCRVRRTLCHHIQDWDALEADVGEIEERLKGPLSEISLPGWDPTFLPLTSWAYVYKLQQMEWVVQLGFELTVYQADELAGMYYYLKRLAALRAQHIEYIKRITTTRQDESQASEVSETPDHDSEFQYARSRQYHRVAMLDAACTWEFADGLSLVYTALLRLGLIKPPPRPYSTDKLRYEIRMRPFSRVAMPQLPSYEEFTEYTMLHDVRTAELLNFADTAVAAARRGFEASLHLSENDSFSINATAYGRWISNKKDCLRATIAAGVAVSTLKRAYERVMEAQKTRLGKEKDQEGGVEGEKKLADLLKIKVEVPEPEDAYHNWWIVPKLTPLR

SEQ ID NO: 10121 - DNA, 471 bp, Muscodor strobelii
  misc_feature: SGI EST ID NO. CUFF.24686.0
  misc_feature: Variant of the nucleotide sequence at SEQ ID NO 10119
gaacgatagacgaagtaaatttcacgagagggccgcctgatcccgaggactcgacatctctcatgtttgtcctgcgagcctattgtgccgggatgctgagagcttgcgcttttgtgaacgacatagtgaaggatgagttgtactacgaggaggaggatttcgtcaccaatacctacgatcgatacttcctatacgatatacccagcatcgacatattggaccttctcaacagtgcgtggggtgagctatacgcaatgagtgacgctataggtcctgagatatgcgcagccctcgcttaccgtattgaatttcgaatcaagtttctacttgccttggagcagcttgtttctagagacattaattctgaatcaccggcacccctctggatagagatgaggagactggtcgatgacatagaaaaacgacccgagctagaaagacctgttccagaagctttcagtaccaaactgc

SEQ ID NO: 10122 - DNA, 981 bp, Muscodor strobelii
  misc_feature: SGI cDNA ID NO. 563197
  misc_feature: Reduced expression when VOC is produced
  misc_feature: Encodes the peptide sequence at SEQ ID NO 10123
atgccggtggcctcgaaacccatcatcccgcaaaatgacaacgtcgcgcacgccctcgccggcgcaggaggaggtatcctctccatggtcctaacctaccccctaataaccctctcaacacgcgcccaagtagagtccaaacgcgccgaaacccgattcctctcagccgtacagcgcatcgtagcccgggaaggcatctcaggtctctactccggtctcgacagcgccgtcttcgggatttccgtgacgaacttcgtatactactactggtacgaatggatgcgatccttcttcgaagccgccgccacgaaatccggccggtcctcaaagaagctcacaaccatcgagtccatgctcgcgggcgccctcgccgggtcagcgaccgtcatcctgacgaaccccatctgggtagtaaacacgcggatcacgacacgccgcgaatccctcgaatcgagtcaagacctcgtcgtcgaaggatcgggcgccaaggcagtagcggctaaaccaaaaccaccgactacaatcggaaccctcatggcgctgttgcgggacgaaggaccacaggcgttatttcgcggtgtcatcccagcgctcgtactagtcgcgaacccgatactgcaatatacgctcttcgagcagatgaagaacgccgtcgagcgaaggaagaaaaagggtatcacgcccacgatggcgtttttcctcggtgcgctggggaagctgttcgctactagcgttacgtacccgtatatcactgttaagagccagatgcacgttgcggggaatggccagaaggagggtatgacgcaggcgatcagtcgggttgttaaggaggaggggtatgctgggttgtataaggggatcggccccaaggtcacgcagagtgtgcttaccgctgctttcctcttcgcgttcaaggatgtgctgtatgagcagactgtgaagctgcggagcactatagctcgtaaggccgtcaaggcttga

SEQ ID NO: 10123 - protein, 326 aa, Muscodor strobelii
  misc_feature: SGI Peptide ID NO. 563197
  misc_feature (113)..(222): Pfam Id: PF00153 Pfam Desc: Mitochondrial carrier protein
  misc_feature (227)..(316): Pfam Id: PF00153 Pfam Desc: Mitochondrial carrier protein
  misc_feature (13)..(102): Pfam Id: PF00153 Pfam Desc: Mitochondrial carrier protein
  misc_feature (5)..(324): NCBI GI: 164427492 Blast Desc: NCU03556 [Neurospora crassa OR74A] gi|157071765|gb|EAA26883.2| NCU03556 [Neurospora crassa OR74A]
  misc_feature (1)..(324): NCBI GI: 171690070 Blast Desc: protein product [Podospora anserina] gi|170944990|emb|CAP71101.1| protein product [Podospora anserina]
  misc_feature (5)..(322): NCBI GI: 261356843 Blast Desc: peroxisomal membrane protein PMP47A [Verticillium albo-atrum VaMs.102]
  misc_feature (11)..(325): NCBI GI: 154318604 Blast Desc: BC1G_02691 [Botryotinia fuckeliana B05.10] gi|150857821|gb|EDN33013.1| BC1G_02691 [Botryotinia fuckeliana B05.10]
  misc_feature (5)..(316): NCBI GI: 18376043 Blast Desc: related to peroxisomal membrane protein PMP47B [Neurospora crassa]
  misc_feature (1)..(322): NCBI GI: 39942334 Blast Desc: MGG_03247 [Magnaporthe grisea 70-15] gi|145015757|gb|EDK00247.1| MGG_03247 [Magnaporthe grisea 70-15]
  misc_feature (3)..(326): NCBI GI: 256735352 Blast Desc: [Nectria haematococca mpVI 77-13-4]
  misc_feature (7)..(316): NCBI GI: 46105360 Blast Desc: FG00308.1 [Gibberella zeae PH-1]
  misc_feature (5)..(326): NCBI GI: 116200171 Blast Desc: CHGG_08241 [Chaetomium globosum CBS 148.51] gi|88179520|gb|EAQ86988.1| CHGG_08241 [Chaetomium globosum CBS 148.51]
  misc_feature (11)..(323): NCBI GI: 189195584 Blast Desc: peroxisomal membrane protein PMP47B [Pyrenophora tritici-repentis Pt-1C-BFP] gi|187980009|gb|EDU46635.1| peroxisomal membrane protein PMP47B [Pyrenophora tritici-repentis
  misc_feature: Useful for introducing or modulating the production of volatile compounds
MPVASKPIIPQNDNVAHALAGAGGGILSMVLTYPLITLSTRAQVESKRAETRFLSAVQRIVAREGISGLYSGLDSAVFGISVTNFVYYYWYEWMRSFFEAAATKSGRSSKKLTTIESMLAGALAGSATVILTNPIWVVNTRITTRRESLESSQDLVVEGSGAKAVAAKPKPPTTIGTLMALLRDEGPQALFRGVIPALVLVANPILQYTLFEQMKNAVERRKKKGITPTMAFFLGALGKLFATSVTYPYITVKSQMHVAGNGQKEGMTQAISRVVKEEGYAGLYKGIGPKVTQSVLTAAFLFAFKDVLYEQTVKLRSTIARKAVKA

SEQ ID NO: 10124 - DNA, 2906 bp, Muscodor strobelii
  misc_feature: SGI EST ID NO. CUFF.24693.0
  misc_feature: Variant of the nucleotide sequence at SEQ ID NO 10122
ggaaacctccaaccgatcttgtgtctggtgattgccaccactagaactagtgaaatgcttccagagcatcgcattcgcggcttgagttgaatgtctttcttttctttttgaagtgtctaaacgagtcatgaagcctcgcctcttgctatcaacctatcgcgccaacagctagctatctctttcgccccaaacgaacgtatcactcttttgtacaacgacgaccaccaaccgcaaccatgccggtggcctcgaaacccatcatcccgcaaaatgacaacgtcgcgcacgccctcgccggcgcaggaggaggtatcctctccatggtcctaacctaccccctaataaccctctcaacacgcgcccaagtagagtccaaacgcgccgaaacccgattcctctcagccgtacagcgcatcgtagcccgggaaggcatctcaggtctctactccggtctcgacagcgccgtcttcgggatttccgtgacgaacttcgtatactactactggtacgaatggatgcgatccttcttcgaagccgccgccacgaaatccggccggtcctcaaagaagctcacaaccatcgagtccatgctcgcgggcgccctcgccgggtcagcgaccgtcatcctgacgaaccccatctgggtagtaaacacgcggatcacgacacgccgcgaatccctcgaatcgagtcaagacctcgtcgtcgaaggatcgggcgccaaggcagtagcggctaaaccaaaaccaccgactacaatcggaaccctcatggcgctgttgcgggacgaaggaccacaggcgttatttcgcggtgtcatcccagcgctcgtactagtcgcgaacccgatactgcaatatacgctcttcgagcagatgaagaacgccgtcgagcgaaggaagaaaaagggtatcacgcccacgatggcgtttttcctcggtgcgctggggaagctgttcgctactagcgttacgtacccgtatatcactgttaagagccagatgcacgttgcggggaatggccagaaggagggtatgacgcaggcgatcagtcgggttgttaaggaggaggggtatgctgggttgtataaggggatcggccccaaggtcacgcagagtgtgcttaccgctgctttcctcttcgcgttcaaggatgtgctgtatgagcagactgtgaagctgcggagcactatagctcgtaaggccgtcaaggcttgaggagttgtaagtccttgatcacgatgcgacgcgtcgagagacttaggggtcccgtccgcgtaggtgtaagacctggcaagaggccccggcgtaatacacgttgctcgagagaaagcccggtggtcatggttatttgtatatagcagataaaggaggatggaaaagggagggggacgggctcttgactgcaggagtcatcatgttttgatattgacaatgagacgaagactcttttttgagtatctttagcattacgtagacttatgcaattatctctaaagtaatatcatcaccgcctacagcttccccatactcccatcgaacgaggtcccgcgcctagttctacctatctattgatcaaaccgttcagtgacccaagagcctcgacctacagcttctaccgaagaggcgtcaatttgggcacaatccaccagttatggtacgcatcctcgggctccgggacctcgaccttgatttttagtaagtccgcaagcttcttctccccctccacgccaccctcttgatccttctctttaccgagtctagtcttctgtgcttccataactcgttcataggctcttttcagcgtactaacagcaacgccggccgcgatcgtagcgcgcaggcaatccttcttattgctgatccatctcccatacgccgtagcattaatcgagaacgagtcattctcagacagatgcagcgatgcctcaaaacctcttctcgccgcggctacagcagtgtcggcgaagttgagcagttctgctgttctgacatcgtggagcatggtatactcggtgaattcctcgtagcttggcagctgcggcattgcgacgcgtgagaatggtcgcatgcgtatttcgtagcgcagtttatccgtgctgtatggtctaggaggtggtttgatcagacctaagcgaagaagtgccgtgtagacgagactcagtccgtcggcgaattcccatgtacatgccgcgtctagcatcgccacgcggtgatattgtcttgatctcgcgtattggaactcggagtcatgatctggagtttcagacacttcggatgcttgcgattcgtcttgtcgtgtggtggttatccgcttgatgtactcgatgtgttgggcgcggagtgcagctaaccgcttgaggtagtaatacatgccggcgagctcgtcagcctggtacacggtaagctcgaaaccaagctgtactacccattccatctgttgtagtttgtagacataagcccaagatgtcaggggcaggaacgtgggatcccatccaggcagagatatttcgctgagagggcccttgaggcgttcctcgatctcgcccacgtctgcttctaatgcgtcccagtcctgaatatgatggcatagtgttctccttacacgacaccggttctggcagagaaagcgaaatgtatccaagtatacgtctgcaattcgctgacggaagacctccatttgcgacgagatcgaatgccgtggatccgtagggacttcaacattatcgtttcctcgctcaagatgtgggctgctaggtagcacaagaataccgatgtcatgatcaatcaactggcggatactgaaacggccaagtacgatcatatctttgaataaaagattctgaaggatggtccttatgaatggcgacggttgtggcttttgtgtttggaaagtgagaatgaaat

SEQ ID NO: 10125 - DNA, 1131 bp, Muscodor strobelii
  misc_feature: SGI cDNA ID NO. 563198
  misc_feature: Encodes the peptide sequence at SEQ ID NO 10126
atgcctcctaaaaactacgccgcttacctcgtcgacaagcatgggaaaccgctggaagtcagagaagcaccctacaccaaaccaggacccaacgagatcgtcatcaaagcgcactcactcgctatcaatcccgtagacctaggcaagcaggccctcggcgactttctacttccctgggtcaaatacccatttatactcggcggtgacgtagcaggagaagtcgtcgaagtcggacaaggaggagacgcagcgcagcgctacgaagtcggtgaccgagtcctcggcctggcagccggttccgataaacgctcgaataagaactccgaaggggcatttcagcagtatgtcatattgcggagtcacttagcctcgaagatcccgcatgatctatcctatgagcaggcgtgtgttgtgccgcttacgttatcgactgctgcttcgggattgtttatgaaggattacctagcgctgaggcatccggtggctaacgctaacccagagaagagagttgagactggagaagctgtcattatttggggtgcttcgacgagcgtcggttgcaatgctgtgcagttggcgaaagctgcgggttatgaagtctacgctactgcgtcgacgaagaatttcgaatatgtcaaggcactcggcgcctcacatgtgtttgattataaggacccgactacgccacagaaaatgatcgaagcgctgaagaacaaaatctgcgctggagctctagctataggcgaaggttcgctggatgtctgtatagacattgttgcaggtgttcctggtcgtcgattcgtctcacaagctagtatcagcggagacttaccgaagagtatgataggcttgacgggtttcgtgatttggtacgcctggtggaatcttacgatcgcgctcaagaagtggaggaaaggcgttcaggcgaagttcatctggggttcggatctcatggctaatgaggttggaccgatgatatttcatgatttcttgcctgaggcacttgctgaagggggctttgtggcaaagccggaacccaaggttgttggaactgggttggagtttgtgcagaaggggtttgaggtttatctgaagggtgtttcgttgaagaagattgtcgttaatctttga

SEQ ID NO: 10126 - protein, 376 aa, Muscodor strobelii
  misc_feature: SGI Peptide ID NO. 563198
  misc_feature (30)..(126): Pfam Id: PF08240 Pfam Desc: Alcohol dehydrogenase GroES-like domain
  misc_feature (172)..(309): Pfam Id: PF00107 Pfam Desc: Zinc-binding dehydrogenase
  misc_feature (172)..(239): Pfam Id: PF00107 Pfam Desc: Zinc-binding dehydrogenase
  misc_feature (1)..(376): NCBI GI: 189188774 Blast Desc: zinc-binding oxidoreductase CipB [Pyrenophora tritici-repentis Pt-1C-BFP] gi|187972332|gb|EDU39831.1| zinc-binding oxidoreductase CipB [Pyrenophora tritici-repentis
  misc_feature (3)..(376): NCBI GI: 242783896 Blast Desc: alcohol dehydrogenase, [Talaromyces stipitatus ATCC 10500] gi|242783902|ref|XP_002480279.1| alcohol dehydrogenase, [Talaromyces stipitatus ATCC 10500] gi|218720425|gb|EED19844.1|
  misc_feature (3)..(376): NCBI GI: 212527480 Blast Desc: zinc-binding oxidoreductase CipB [Penicillium marneffei ATCC 18224] gi|210073295|gb|EEA27382.1| zinc-binding oxidoreductase CipB [Penicillium marneffei ATCC 18224]
  misc_feature (3)..(376): NCBI GI: 154299623 Blast Desc: BC1G_10774 [Botryotinia fuckeliana B05.10] gi|150857266|gb|EDN32458.1| BC1G_10774 [Botryotinia fuckeliana B05.10]
  misc_feature (1)..(376): NCBI GI: 145253561 Blast Desc: An17g00640 [Aspergillus niger] gi|134083861|emb|CAK42992.1| protein product [Aspergillus niger]
  misc_feature (18)..(376): NCBI GI: 156030740 Blast Desc: SS1G_14309 [Sclerotinia sclerotiorum 1980] gi|154700700|gb|EDO00439.1| SS1G_14309 [Sclerotinia sclerotiorum 1980]
  misc_feature (3)..(376): NCBI GI: 212539219 Blast Desc: alcohol dehydrogenase, [Penicillium marneffei ATCC 18224] gi|210069507|gb|EEA23598.1| alcohol dehydrogenase, [Penicillium marneffei ATCC 18224]
  misc_feature (3)..(376): NCBI GI: 242760701 Blast Desc: alcohol dehydrogenase, [Talaromyces stipitatus ATCC 10500] gi|218723239|gb|EED22656.1| alcohol dehydrogenase, [Talaromyces stipitatus ATCC 10500]
  misc_feature (1)..(376): NCBI GI: 119500206 Blast Desc: oxidoreductase, zinc-binding dehydrogenase family superfamily [Neosartorya fischeri NRRL 181] gi|119415025|gb|EAW24963.1| oxidoreductase, zinc-binding family
  misc_feature (29)..(376): NCBI GI: 212541656 Blast Desc: quinone oxidoreductase, [Penicillium marneffei ATCC 18224] gi|210068282|gb|EEA22374.1| quinone oxidoreductase, [Penicillium marneffei ATCC 18224]
  misc_feature (28)..(262): SWISSPROT Homolog: EC 1.6.5.5 NADPH:quinone reductase
MPPKNYAAYLVDKHGKPLEVREAPYTKPGPNEIVIKAHSLAINPVDLGKQALGDFLLPWVKYPFILGGDVAGEVVEVGQGGDAAQRYEVGDRVLGLAAGSDKRSNKNSEGAFQQYVILRSHLASKIPHDLSYEQACVVPLTLSTAASGLFMKDYLALRHPVANANPEKRVETGEAVIIWGASTSVGCNAVQLAKAAGYEVYATASTKNFEYVKALGASHVFDYKDPTTPQKMIEALKNKICAGALAIGEGSLDVCIDIVAGVPGRRFVSQASISGDLPKSMIGLTGFVIWYAWWNLTIALKKWRKGVQAKFIWGSDLMANEVGPMIFHDFLPEALAEGGFVAKPEPKVVGTGLEFVQKGFEVYLKGVSLKKIVVNL

SEQ ID NO: 10127 - DNA, 575 bp, Muscodor strobelii
  misc_feature: SGI EST ID NO. CUFF.23906.0
  misc_feature: Variant of the nucleotide sequence at SEQ ID NO 10125
ctcaaaagcctttaataaacgcaccctcttttccacgtcgtgatacaagacgtagtgacaagtaaaatcccattcgggcaaccctccggtctgtaacaactcatcctgcggactttactgccgctctacaatatgcctcctaaaaactacgccgcttacctcgtcgacaagcatgggaaaccgctggaagtcagagaagcaccctacaccaaaccaggacccaacgagatcgtcatcaaagcgcactcactcgctatcaatcccgtagacctaggcaagcaggccctcggcgactttctacttccctgggtcaaatacccatttatactcggcggtgacgtagcaggagaagtcgtcgaagtcggacaaggaggagacgcagcgcagcgctacgaagtcggtgaccgagtcctcggcctggcagccggttccgataaacgctcgaataagaactccgaaggggcatttcagcagtatgtcatattgcggagtcacttagcctcgaagatcccgcatgatctatcctatgagcaggcgtgtgttgtgccgcttacgttatcgactgctgcttcggg

SEQ ID NO: 10128 - DNA, 1815 bp, Muscodor strobelii
  misc_feature: SGI cDNA ID NO. 563199
  misc_feature: Encodes the peptide sequence at SEQ ID NO 10129
atgctccctaacagatctgtgaccagcggttccattgaggatgcagagtcgtttaggtctcctccgaagagtgagggtaagagtttcagtacctttaccctcttcgaactcatcgcaaaactccactcaaaggaaatcaagacgtgggccgagttggctctcaagttgggtgttgagccgccagatcatgagaaaggacaaagctctcagaagatacagcagtatgcagtgcggttaaaagtaacactgtccaataatcctcatccttattggacccagatacccacagaccgcaaccccgtatccgaagaaggccgggatggggttgccgccgaagatgatatggcattgcgtgccctactcccgcacataagaccgcgtcgcggtaggaaacgccccgaggaggacagtctgagtaaatcgccgtcccaacggccgaggcttgactcaccagccttcaacgccgaagcgcagcatcgccaagatggactcaatgcatggactgctcatcccgacgcacggcaagcctttgtctttcctccgatggatccacgatctggcgtaacagccgcgcatgatcccgcttatgcttggcagggtgatgttcaacgagagcctatgactgcgtatccgcaatctgctatcactccttctacaagaggttctttttggccggattctgccgaaccgcggtcggcgatcagccccaaaagcaaaccattgggccgtcgtcacggagccaaagcagtgtcctcggcgtggagaagtataggcggctcagcaagcggaaaggctcgtggacgaccacccctgaaccgtgatgtcgaaacgccaacgtcagcataccttccggagagaaatgtcactccgaatacagcgtttgatcaccaatcctattcaactacgccgacgcctttgcatatgccgccgcctgaaatggaaccggcagcaagagcgtctgaacccaccttcgaaaacgtccctcgtcctcaccgaccggggcgtctttccttacaagttccggagagacccagcggtccggttagattggcaaccccaccagccccagtcgtcatggtgaatggccaaagtacagttaatggaaacgaacacacgcatatcaacgacagcaccgcctctgccgacgaccagcgttctcaacgagatcgaggttatgtgatgttcaacgaccggtcttcggcaatgtacttgaacaaggacaacccatcccgactcgatgatattgacctcgatggtcctgataaaactagtcatgacgaagttgagactatacttgtcacgacgctcattgagtgcgcatggtttgatcctcacggcgctgctggacttcgtcctagtgtcgccgaagtggtcgcggttgtccgcgcagtaatacgaagcatctcggatcaggctctcaccagagaagcattcctaatcaacttagctgctctcattggtgggcacttcatgatccaaccagacaaagaggtgcaccgacttgaaattggccccgactatacgaaatatctttgcaaatggacccttcgatatggagctatgtccagcacattcactttgacagagacagtacctcattcgaaatggaaaccagggcatcagaacgttaatgaacctcccgccaaagacgccatgccagccgatggtatcccagctgcggagtattggcagaagcaataccagtccttagctgtcacctccatccggcggttggacagtttgaccacggcgaaagtgaatgcgcttcggttcttaaaggaacagccggacattaacacccaccaaatgctttaa

SEQ ID NO: 10129 - protein, 604 aa, Muscodor strobelii
  misc_feature: SGI Peptide ID NO. 563199
  misc_feature (1)..(139): Pfam Id: PF09441 Pfam Desc: ARS binding protein 2
  misc_feature (16)..(80): Pfam Id: PF09441 Pfam Desc: ARS binding protein 2
  misc_feature (85)..(139): Pfam Id: PF09441 Pfam Desc: ARS binding protein 2
  misc_feature (2)..(592): NCBI GI: 261356717 Blast Desc: ARS-binding protein [Verticillium albo-atrum VaMs.102]
  misc_feature (18)..(531): NCBI GI: 154318606 Blast Desc: BC1G_02692 [Botryotinia fuckeliana B05.10] gi|150857822|gb|EDN33014.1| BC1G_02692 [Botryotinia fuckeliana B05.10]
  misc_feature (2)..(594): NCBI GI: 171690068 Blast Desc: protein product [Podospora anserina] gi|170944989|emb|CAP71100.1| protein product [Podospora anserina]
  misc_feature (2)..(545): NCBI GI: 85078153 Blast Desc: NCU03555 [Neurospora crassa OR74A] gi|18376044|emb|CAD21050.1| related to ars binding protein 2 [Neurospora crassa] gi|28917166|gb|EAA26882.1| [Neurospora crassa
  misc_feature (18)..(367): NCBI GI: 156063742 Blast Desc: SS1G_01989 [Sclerotinia sclerotiorum 1980] gi|154697323|gb|EDN97061.1| SS1G_01989 [Sclerotinia sclerotiorum 1980]
  misc_feature (16)..(537): NCBI GI: 145608264 Blast Desc: MGG_03248 [Magnaporthe grisea 70-15] gi|145015755|gb|EDK00245.1| MGG_03248 [Magnaporthe grisea 70-15]
  misc_feature (2)..(570): NCBI GI: 256734641 Blast Desc: NECHADRAFT_105833 [Nectria haematococca mpVI 77-13-4]
  misc_feature (2)..(596): NCBI GI: 46107892 Blast Desc: FG00829.1 [Gibberella zeae PH-1]
  misc_feature (3)..(386): NCBI GI: 67516117 Blast Desc: AN0340.2 [Aspergillus nidulans FGSC A4] gi|40746590|gb|EAA65746.1| AN0340.2 [Aspergillus nidulans FGSC A4]
  misc_feature (3)..(386): NCBI GI: 259489426 Blast Desc: TPA: ARS binding protein Abp2, (AFU_orthologue; AFUA_1G02270) [Aspergillus nidulans FGSC A4]
MLPNRSVTSGSIEDAESFRSPPKSEGKSFSTFTLFELIAKLHSKEIKTWAELALKLGVEPPDHEKGQSSQKIQQYAVRLKVTLSNNPHPYWTQIPTDRNPVSEEGRDGVAAEDDMALRALLPHIRPRRGRKRPEEDSLSKSPSQRPRLDSPAFNAEAQHRQDGLNAWTAHPDARQAFVFPPMDPRSGVTAAHDPAYAWQGDVQREPMTAYPQSAITPSTRGSFWPDSAEPRSAISPKSKPLGRRHGAKAVSSAWRSIGGSASGKARGRPPLNRDVETPTSAYLPERNVTPNTAFDHQSYSTTPTPLHMPPPEMEPAARASEPTFENVPRPHRPGRLSLQVPERPSGPVRLATPPAPVVMVNGQSTVNGNEHTHINDSTASADDQRSQRDRGYVMFNDRSSAMYLNKDNPSRLDDIDLDGPDKTSHDEVETILVTTLIECAWFDPHGAAGLRPSVAEVVAVVRAVIRSISDQALTREAFLINLAALIGGHFMIQPDKEVHRLEIGPDYTKYLCKWTLRYGAMSSTFTLTETVPHSKWKPGHQNVNEPPAKDAMPADGIPAAEYWQKQYQSLAVTSIRRLDSLTTAKVNALRFLKEQPDINTHQML

SEQ ID NO: 10130 - DNA, 1437 bp, Muscodor strobelii
  misc_feature: SGI cDNA ID NO. 563200
  misc_feature: Encodes the peptide sequence at SEQ ID NO 10131
atgggttcagagctcacctcagataccatcagtcctctgcctcccgtcctgcacggcggtctgatcgccgtttccacctttgcctacatatcattcttctcgtctttcagtctcttctgctacctcacatggaagctaatcagatggcaccggacacccgttgccggcaccaaccaaccgtaccggaaatcgtcggaggcagcgacgcaggcagcggaggatgtgttcggtagcaaggacatcgacttgtacgatggcaccaggaagctgccgggcgtcgtggagtccgttcggcccgtccccggacgcaaaccaccgaaccagttcctcgtgctcatcttcaacctcctcctcgcagatctgcaccaggccacggcctatctgctcagctcgcactggctcgccgtcgacggcatcatggtaggcaccaagacgtgcttcgtgcaaggcctgtttgactctaacggcgatttgtcctcgggtttcttcatctcggctatcgctattcatacgtacttcgccgtcgtgcacaagtacaaacccccgcagaatgttctatatgccggtatcgtcggcatctgggtcttcgtgtacgcattggcgttgatcccaatggcggtgacgagaaacggtgaggatgtgggagggtatttcgtaagagctggtccttggtgctggatcaacgtagcctacgaagagctccgtctactgacgcactacctctttatcttcatctccatcgccacaacaacgaccttctacacactaaccttcgtctccctgcgtcggcagaacaagcgcggtaccctcgaccgcaacctcaagcgctcgcaccacccaggcttcctcgtctacccgctcatctacctcgcctgcatcctacccctggcgctcggccgtgtcgccaccatggcccaccacgagccccctcttgagtatttctgcttcgcaggcgtcatgatcgctagcaacggctggctcgacgttgtgctcttcgccaccacgcgccgcgccatcgttttcgccggcgtagacgacatcggcgacggcgacatcggtgtcgacaccttcgctttcatgcgtacgcctcctaaccgtgtccttggaaacatggtctgggttcagggtggccgcgccaacggcgataacgacgacaggaccggcggcaagggctcatggtggtggattctcggtgattcgaagcccgaatccaacttccgcgaaggcaccaggggcggttatcggagtcgtcatgggactccaaggacgctgagccagacgtcactgtcagcgaggagtgagacggctattcaaatggagattgtgacgacggtggtggtggagagtgacgagccgacaattggaggagatagagaaagtgactggacctctaggtcgatggatagtactgagaaggagacgagtcagagggtctaa

SEQ ID NO: 10131 - protein, 478 aa, Muscodor strobelii
  misc_feature: SGI Peptide ID NO. 563200
  misc_feature (7)..(475): NCBI GI: 256734597 Blast Desc: NECHADRAFT_75030 [Nectria haematococca mpVI 77-13-4]
  misc_feature (9)..(476): NCBI GI: 46113790 Blast Desc: FG02942.1 [Gibberella zeae PH-1]
  misc_feature (5)..(459): NCBI GI: 256722241 Blast Desc: NECHADRAFT_97370 [Nectria haematococca mpVI 77-13-4]
  misc_feature (9)..(451): NCBI GI: 261360947 Blast Desc: conserved [Verticillium albo-atrum VaMs.102]
  misc_feature (20)..(457): NCBI GI: 145608926 Blast Desc: MGG_06257 [Magnaporthe grisea 70-15] gi|145016347|gb|EDK00837.1| MGG_06257 [Magnaporthe grisea 70-15]
  misc_feature (3)..(396): NCBI GI: 171692543 Blast Desc: protein product [Podospora anserina] gi|170946220|emb|CAP73021.1| protein product [Podospora anserina]
  misc_feature (9)..(377): NCBI GI: 39977825 Blast Desc: MGG_06797 [Magnaporthe grisea 70-15] gi|145013664|gb|EDJ98305.1| MGG_06797 [Magnaporthe grisea 70-15]
  misc_feature (7)..(360): NCBI GI: 154312702 Blast Desc: BC1G_05052 [Botryotinia fuckeliana B05.10] gi|150849754|gb|EDN24947.1| BC1G_05052 [Botryotinia fuckeliana B05.10]
  misc_feature (10)..(341): NCBI GI: 121711399 Blast Desc: conserved [Aspergillus clavatus NRRL 1] gi|119401466|gb|EAW11889.1| conserved [Aspergillus clavatus NRRL 1]
  misc_feature (7)..(264): NCBI GI: 116195772 Blast Desc: CHGG_04484 [Chaetomium globosum CBS 148.51] gi|88180397|gb|EAQ87865.1| CHGG_04484 [Chaetomium globosum CBS 148.51]
MGSELTSDTISPLPPVLHGGLIAVSTFAYISFFSSFSLFCYLTWKLIRWHRTPVAGTNQPYRKSSEAATQAAEDVFGSKDIDLYDGTRKLPGVVESVRPVPGRKPPNQFLVLIFNLLLADLHQATAYLLSSHWLAVDGIMVGTKTCFVQGLFDSNGDLSSGFFISAIAIHTYFAVVHKYKPPQNVLYAGIVGIWVFVYALALIPMAVTRNGEDVGGYFVRAGPWCWINVAYEELRLLTHYLFIFISIATTTTFYTLTFVSLRRQNKRGTLDRNLKRSHHPGFLVYPLIYLACILPLALGRVATMAHHEPPLEYFCFAGVMIASNGWLDVVLFATTRRAIVFAGVDDIGDGDIGVDTFAFMRTPPNRVLGNMVWVQGGRANGDNDDRTGGKGSWWWILGDSKPESNFREGTRGGYRSRHGTPRTLSQTSLSARSETAIQMEIVTTVVVESDEPTIGGDRESDWTSRSMDSTEKETSQRV

SEQ ID NO: 10132 - DNA, 1542 bp, Muscodor strobelii
  misc_feature: SGI cDNA ID NO. 563201
  misc_feature: Encodes the peptide sequence at SEQ ID NO 10133
atgctttggcacaggttcgggattctgatctacgtcgcggtggtccatgcggccgacttgagcgagttgcccgcgaagctcaagaccatctcaaatgccatcttttcagggctcaagggtttgtcattggatatttacgaccatccagagatttcgaagtctgaatttcacgcacatgatgctatcgttaattatttcaagacaaacgcaccaaataaatggatagttacgccacatgctttcggccaaccgactgcgtggtcggcggagttaagccataaacccatcgggctctctggttcagatgacgacttgccggccattggatttcttgccgaatacgatgcccttcttggtatcggtcatgcctgcggccatcatctgatttctttgaatgggttgacggcagccagcattgctgctcaggccctgatcgacttggatatcccaggaaggattaagcttgtcgggacgccagatgaagagaacaccgcaggaaaagcccgcctgatggatgctggcgcattcgagggaatcgatatatggatggaggctcatgctacttcgagtaacgggatcaatcctatgcaatcacgggagaatattgtggcaaatttcgtcgccgacaaacatgaggacgttgtgaaactagcttacgaagccctcgtcagtgtcacaaacctttccggccaccttcctggaaatcagagcaccacaactacgatcgaagacgttgggatgttcacgagcaatgtgatccaacagcaaatcaaatttggagttgccgggttgagtctcgcgcaagtgacacaggtcgtcgatgggatattggacagtacatatccaggcgtgaattatatggctgaacaaacgactgaagttagcaatggggttgctctcactatattgggacctggaggccacgcttcggaaaactccaagacgccccttcgtctaagcgtggagacttttcgcacactcgtgaatggcgacaagactgtatcgttctttctccccggtaacacatcggccactgcacttgatataacagtatcggcgcggacaaggtatacactcgaccaagaagccgtaactagcacggtgatgagcgctattggcaaccgcgccgagaaaatatcaacagatttgccatatccagctctggaagtggttcccgccatcgcaaaccgcttcatcaagctaatggcaaccgacgactacggtgagacagactgggcagtttcaaccatcacgcctgctgcaacagatgcgggttttatccaagagcctgaaatcgatgcaactacccgacagttgaagagtgtagggaaggtcgtgtttcacccaaactttggaatatgtgatcctgccccgggttctctttgcgcatttccgcatgaaccgcccttcagaatagtgtccggagcagattttgccttcggaaggaccgaggttgtagctagagccttgtcccaactggctattgaggctatcgctgaccgatctgtatatgatgacattacctctttggtcaggcgataa

SEQ ID NO: 10133 - protein, 513 aa, Muscodor strobelii
  misc_feature: SGI Peptide ID NO. 563201
  misc_feature (14)..(488): NCBI GI: 116191105 Blast Desc: CHGG_05270 [Chaetomium globosum CBS 148.51] gi|88181183|gb|EAQ88651.1| CHGG_05270 [Chaetomium globosum CBS 148.51]
  misc_feature (36)..(206): NCBI GI: 71007703 Blast Desc: UM01992.1 [Ustilago maydis 521] gi|46097421|gb|EAK82654.1| UM01992.1 [Ustilago maydis 521]
  misc_feature (13)..(190): NCBI GI: 212538599 Blast Desc: amidohydrolase, [Penicillium marneffei ATCC 18224] gi|210069197|gb|EEA23288.1| amidohydrolase, [Penicillium marneffei ATCC 18224]
  misc_feature (36)..(197): NCBI GI: 46110479 Blast Desc: FG02121.1 [Gibberella zeae PH-1]
  misc_feature (20)..(187): NCBI GI: 169772983 Blast Desc: [Aspergillus oryzae RIB40] gi|83768821|dbj|BAE58958.1| protein product [Aspergillus oryzae]
  misc_feature (24)..(186): NCBI GI: 170095737 Blast Desc: [Laccaria bicolor S238N-H82] gi|164646393|gb|EDR10639.1| [Laccaria bicolor S238N-H82]
  misc_feature (19)..(206): NCBI GI: 255943991 Blast Desc: Pc20g02040 [Penicillium chrysogenum Wisconsin 54-1255] gi|211587498|emb|CAP85533.1| Pc20g02040 [Penicillium chrysogenum Wisconsin 54-1255]
  misc_feature (38)..(190): NCBI GI: 242806341 Blast Desc: amidohydrolase, [Talaromyces stipitatus ATCC 10500] gi|218715349|gb|EED14771.1| amidohydrolase, [Talaromyces stipitatus ATCC 10500]
  misc_feature (24)..(186): NCBI GI: 242210360 Blast Desc: [Postia placenta Mad-698-R] gi|220729925|gb|EED83791.1| [Postia placenta Mad-698-R]
  misc_feature (18)..(187): NCBI GI: 238490916 Blast Desc: amidohydrolase, [Aspergillus flavus NRRL3357] gi|220697108|gb|EED53449.1| amidohydrolase, [Aspergillus flavus NRRL3357]
MLWHRFGILIYVAVVHAADLSELPAKLKTISNAIFSGLKGLSLDIYDHPEISKSEFHAHDAIVNYFKTNAPNKWIVTPHAFGQPTAWSAELSHKPIGLSGSDDDLPAIGFLAEYDALLGIGHACGHHLISLNGLTAASIAAQALIDLDIPGRIKLVGTPDEENTAGKARLMDAGAFEGIDIWMEAHATSSNGINPMQSRENIVANFVADKHEDVVKLAYEALVSVTNLSGHLPGNQSTTTTIEDVGMFTSNVIQQQIKFGVAGLSLAQVTQVVDGILDSTYPGVNYMAEQTTEVSNGVALTILGPGGHASENSKTPLRLSVETFRTLVNGDKTVSFFLPGNTSATALDITVSARTRYTLDQEAVTSTVMSAIGNRAEKISTDLPYPALEVVPAIANRFIKLMATDDYGETDWAVSTITPAATDAGFIQEPEIDATTRQLKSVGKVVFHPNFGICDPAPGSLCAFPHEPPFRIVSGADFAFGRTEVVARALSQLAIEAIADRSVYDDITSLVRR

SEQ ID NO: 10134 - DNA, 2702 bp, Muscodor strobelii
  misc_feature: SGI EST ID NO. CUFF.23931.0
  misc_feature: Variant of the nucleotide sequence at SEQ ID NO 10132
agtacataaaaaatatcagcgatatcacctcaagattttgtgatgacgaatagacaatacactacgtagtattttgatggcgcgccacgaacccgtatataccgagttaggtacataagtaaggctgaagacctatcacgcaccaggccctcgaagagattcaatgatgcaaactgagctatgtaagttttttttctcttcgatagaacaacatttcggtattgcacttatccggcgccatcagtcaggattggctacacctcgcagcacgacatatgacaattacgttgagacagctggatagtgtgtgggcatggagatgttatcatacttggtcttaaccaatgcgatctacaaccgagcttctgctacctcttacggcgaacacttactaagaatttcggggtatgagtgtctgttcttacaaatcttttgagacccaggacaagagaattttagctcaccaaacgtactttttaagtgggaataacagatcgctatgaggctagaattctgattagaccttatgagcatccatgctcgtggaagttgctctatgcagcaaacggtgaatggcagcaaatgcattgctaaggaaaagacatatataaaagcgaacagatcacagaccctgagagctctcgggacaatcgagcaatgcagatgttaaatcattcatgatgctttggcacaggttcgggattctgatctacgtcgcggtggtccatgcggccgacttgagcgagttgcccgcgaagctcaagaccatctcaaatgccatcttttcagggctcaagggtttgtcattggatatttacgaccatccagagatttcgaagtctgaatttcacgcacatgatgctatcgttaattatttcaagacaaacgcaccaaataaatggatagttacgccacatgctttcggccaaccgactgcgtggtcggcggagttaagccataaacccatcgggctctctggttcagatgacgacttgccggccattggatttcttgccgaatacgatgcccttcttggtatcggtcatgcctgcggccatcatctgatttctttgaatgggttgacggcagccagcattgctgctcaggccctgatcgacttggatatcccaggaaggattaagcttgtcgggacgccagatgaagagaacaccgcaggaaaagcccgcctgatggatgctggcgcattcgagggaatcgatatatggatggaggctcatgctacttcgagtaacgggatcaatcctatgcaatcacgggagaatattgtggcaaatttcgtcgccgacaaacatgaggacgttgtgaaactagcttacgaagccctcgtcagtgtcacaaacctttccggccaccttcctggaaatcagagcaccacaactacgatcgaagacgttgggatgttcacgagcaatgtgatccaacagcaaatcaaatttggagttgccgggttgagtctcgcgcaagtgacacaggtcgtcgatgggatattggacagtacatatccaggcgtgaattatatggctgaacaaacgactgaagttagcaatggggttgctctcactatattgggacctggaggccacgcttcggaaaactccaagacgccccttcgtctaagcgtggagacttttcgcacactcgtgaatggcgacaagactgtatcgttctttctccccggtaacacatcggccactgcacttgatataacagtatcggcgcggacaaggtatacactcgaccaagaagccgtaactagcacggtgatgagcgctattggcaaccgcgccgagaaaatatcaacagatttgccatatccagctctggaagtggttcccgccatcgcaaaccgcttcatcaagctaatggcaaccgacgactacggtgagacagactgggcagtttcaaccatcacgcctgctgcaacagatgcgggttttatccaagagcctgaaatcgatgcaactacccgacagttgaagagtgtagggaaggtcgtgtttcacccaaactttggaatatgtgatcctgccccgggttctctttgcgcatttccgcatgaaccgcccttcagaatagtgtccggagcagattttgccttcggaaggaccgaggttgtagctagagccttgtcccaactggctattgaggctatcgctgaccgatctgtatatgatgacattacctctttggtcaggcgataagatgataatctgacgagtaagaatatgaagttaccaagccaatagttgtgaagagttcgggttcgttgtgctacgcagtagatggagataagccgaagctcagaccctttattgtcagaacaaagaacattctaccacttaagttagaattgagatcaagtacaggattactagttggccatttataagtttcgtttgggatcttagtaaagtagagaatttgcttgtgagtttccatattacgcccattgcaatatacccttcaacgtaaccatttattcagaaactccgatttgatgaaggagcaagttacgcatgatctgccgctagctaagcttttttcccgcgatactgatgtacgaagaagctggcattgccttgtgcgtgaaaaacactatgtttagcctcagtattctagtgctgccccacaccgttaaggtgcctgagaaagagaaaatggcaatagtctctgaaccaaac

SEQ ID NO: 10135 - DNA, 459 bp, Muscodor strobelii
  misc_feature: SGI cDNA ID NO. 563202
  misc_feature: Reduced expression when VOC is produced
  misc_feature: Encodes the peptide sequence at SEQ ID NO 10136
atgcctctgaccttagatgatctagcccaaaagggcgatatcctagacatgatgacattccaacagattctagagatggacgagccagatgatcacgaattcagtctaagtatcgttatggggttctttgaccaagcgggaaacactatgtcgcacatgaagcgaagtgtccaggaaggagattttggacaactggccgacctcgcgcacttcttgaaggggtctgcaaattccattggggctgttcaagtcagagatacgctcctgaggattaagaaccttgggttgggtaaagatgagaatgcggaggataaggagcctagaggcgatgcgacggctgatgcactgcctaggatcggggagttggttgagcggctgggacgggagacgaagagtctaagggaggtgttgtatgattattatgggatgtctgtgccgaaggacgaggatgaggagtga

SEQ ID NO: 10136 - protein, 152 aa, Muscodor strobelii
  misc_feature: SGI Peptide ID NO. 563202
  misc_feature (37)..(129): Pfam Id: PF01627 Pfam Desc: Hpt domain
  misc_feature (2)..(107): NCBI GI: 67523097 Blast Desc: AN2005.2 [Aspergillus nidulans FGSC A4] gi|40744750|gb|EAA63906.1| AN2005.2 [Aspergillus nidulans FGSC A4] gi|259487372|tpe|CBF85997.1| TPA: histidine-containing FGSC
  misc_feature (7)..(145): NCBI GI: 261205810 Blast Desc: phosphotransmitter protein Ypd1 [Ajellomyces dermatitidis SLH14081] gi|239592701|gb|EEQ75282.1| phosphotransmitter protein Ypd1 [Ajellomyces dermatitidis protein
  misc_feature (12)..(141): NCBI GI: 256729447 Blast Desc: NECHADRAFT_84022 [Nectria haematococca mpVI 77-13-4]
  misc_feature (12)..(141): NCBI GI: 39726351 Blast Desc: histidine phosphotransferase HPT1p [Gibberella moniliformis]
  misc_feature (7)..(109): NCBI GI: 225558936 Blast Desc: conserved [Ajellomyces capsulatus G186AR]
  misc_feature (7)..(109): NCBI GI: 240281859 Blast Desc: phosphotransmitter protein Ypd1 [Ajellomyces capsulatus H143]
  misc_feature (12)..(141): NCBI GI: 46117042 Blast Desc: FG04363.1 [Gibberella zeae PH-1]
  misc_feature (13)..(107): NCBI GI: 115492315 Blast Desc: conserved [Aspergillus terreus NIH2624] gi|114197645|gb|EAU39345.1| conserved [Aspergillus terreus NIH2624]
  misc_feature (13)..(142): NCBI GI: 121707662 Blast Desc: phosphotransmitter protein Ypd1, [Aspergillus clavatus NRRL 1] gi|119400051|gb|EAW10477.1| phosphotransmitter protein Ypd1, [Aspergillus clavatus NRRL 1]
  misc_feature (9)..(152): NCBI GI: 242218139 Blast Desc: histidine phosphotransferase [Postia placenta Mad-698-R] gi|220725990|gb|EED79955.1| histidine phosphotransferase [Postia placenta Mad-698-R]
  misc_feature: Useful for introducing or modulating the production of volatile compounds
MPLTLDDLAQKGDILDMMTFQQILEMDEPDDHEFSLSIVMGFFDQAGNTMSHMKRSVQEGDFGQLADLAHFLKGSANSIGAVQVRDTLLRIKNLGLGKDENAEDKEPRGDATADALPRIGELVERLGRETKSLREVLYDYYGMSVPKDEDEE

SEQ ID NO: 10137 - DNA, 684 bp, Muscodor strobelii
  misc_feature: SGI EST ID NO. CUFF.23943.0
  misc_feature: Variant of the nucleotide sequence at SEQ ID NO 10135
gattctagagatggacgagccagatgatcacgaattcagtctaagtatcgttatggggttctttgaccaagcgggaaacactatgtcgcacatgaagcgaagtgtccaggaaggagattttggacaactggccgacctcgcgcacttcttgaaggggtctgcaaattccattggggctgttcaagtcagagatacgctcctgaggattaagaaccttgggttgggtaaagatgagaatgcggaggataaggagcctagaggcgatgcgacggctgatgcactgcctaggatcggggagttggttgagcggctgggacgggagacgaagagtctaagggaggtgttgtatgattattatgggatgtctgtgccgaaggacgaggatgaggagtgattgtgtaagataggggtgatggaagttgggtagatgtagagtgaagctctcttaatcctaatccaaaaacgaatgctgagaaaaaaggcgctcgaaagctttagaacaaaagagcaaagacacatggggttcctgtattcatcagccctccttcacgctcttaaaaatctttcgttctttctcatttccatgtttaatgttcttcccctctgatctcacgcagtctttgctccttcttagtcctccttctcctccttctcgcctctctcaatgcaggtcatcgcacaact

SEQ ID NO: 10138 - DNA, 2154 bp, Muscodor strobelii
  misc_feature: SGI cDNA ID NO. 563203
  misc_feature: Reduced expression when VOC is produced
  misc_feature: Encodes the peptide sequence at SEQ ID NO 10139
atgccgaagccacgatcgaaacgacaggctcttcgcgaggaacgcaagaagaagcgacaggacaacgaggccggcgccgacgacgcctcgcaaccggccaagagacaacgacgcaatgacgacgatcccaccgatgatcaagaaccccaattcgatggcgggtatgacgaggcacaggggcaagcgcagacaggcgatctcgcctcggaacgtgagttctttggcatgctgtccgaccaagaacaagaatatttccgatccgtcgacgagcagctcgatatcgacaacttcccctcacaagaagaacgccagctcttcctcgctagtgtatttaccgaggcgcaaggcaaagaactcaagttggcatgcagtcaatcatgttcgcgactaatggagcgactgatcctcatgtctaacacgaggcaaaagaagaaactgttcgagcaattcgctagtcactttcttgctctcatacagcatcgcttcgctagccactgttgcgaaacgctgttcttgcagtccgctccgattgtcacgagcgagttgggaggagagcgggacgacgcagcggatgaggaggaagaggataagagaacactaccgttcatggaagagctcttcctcttgactctcgacgaactggagggacggctcagctttctcttgaccgacagattcgcatcacacactctgagggtattattactcatcctcgctgggcgaccgttggaccaggcccagaccaagtcccttattcacagcaagaagaaggagaagatatccgcaccctggacattcagtagtggcacggatggtaacgctcaacttcgcgctgtgcccaattctttcaatcttgcggccaagaaggtcatagcagattcggtgtctggcatgagcccaaccgagctgcgagtactggcgacacacccgaccggaaacccggttcttcagcttctgttggaattggacatcttgctcaatgccaagtcggaagacgagtcaaatcaaatgaccttattatggcatcttctgcctgatgcgcctgcttcgttgaaagactccgaatcacctgccacccagtttgtcaactccatgttatacgacagggttgggtcacgtctgcttgagacccttataatccactgccccggcaaaatcttcaaagtgctgtacaaacaaatcttcggccctcgcatgcacagctacctgcgtaatgacacagcatcgtaccctgcaatccgagtcttgaatcgattgagcaaggaagacttggcagaagtagtgaaacagacgttacccgaggttaacaagctcgtcacactctctaggttcaacgttatcaaggccctcatggagcgctgccaggctcgtcaggcatacgatgaggttaagtcattgactagaggcctgatcgaagcctgtgggaatgatccaaaatcactcgttccccacctatgtttaccgccagcgtcggatgcaaagggaaacaatgaccccttggcgaagaatcgttctgcactagtatcacacggatctcacctgacgacagcattacttgccataccgaacgctccacgaaaggccgtacagacatcaatctcaagtctttcagaagatcaggtcctggagcttgcgacaggctccggtcccacctcacacgtcctagtcgacgctcttgccactccatcacaaaacaaaatcttccacaaagcactcgtcgccgttctgcgtcctcatgtcatgaagctcgccacttctgagcacggaaacaaagttctatgcgctataatatctgtaccatcgcgaagtgagggcgcttcacttccattccatatcaaagagtcgatcttgactgaactcggacagcacgagcaagagttgcggcaatcgcatgaagggcgccgcgtatggaggacatggaaaggagacttatggaggaatcgcagagtggactggattgcatgggcaaaagaggttgataccgaggtagagcctaagactcctgcaccagatcgttggacgaagaatggtcaacaggaaaacccgaacaatatcaaggtggttcccaaggatatgaggaattatgtaagacctaatacgaagagaaaacgtgttgaaggagttcatatgctggtcgatgcagatgaggattga

SEQ ID NO: 10139 - protein, 717 aa, Muscodor strobelii
  misc_feature: SGI Peptide ID NO. 563203
  misc_feature (5)..(663): NCBI GI: 85094928 Blast Desc: NCU06118 [Neurospora crassa OR74A] gi|28921438|gb|EAA30744.1| conserved [Neurospora crassa OR74A]
  misc_feature (1)..(682): NCBI GI: 46125321 Blast Desc: FG07038.1 [Gibberella zeae PH-1]
  misc_feature (1)..(683): NCBI GI: 256732598 Blast Desc: [Nectria haematococca mpVI 77-13-4]
  misc_feature (5)..(662): NCBI GI: 171679469 Blast Desc: protein product [Podospora anserina] gi|170939360|emb|CAP64588.1| protein product [Podospora anserina]
  misc_feature (5)..(662): NCBI GI: 116203647 Blast Desc: CHGG_09707 [Chaetomium globosum CBS 148.51] gi|88175835|gb|EAQ83303.1| CHGG_09707 [Chaetomium globosum CBS 148.51]
  misc_feature (71)..(678): NCBI GI: 39943722 Blast Desc: MGG_03872 [Magnaporthe grisea 70-15] gi|145014563|gb|EDJ99131.1| MGG_03872 [Magnaporthe grisea 70-15]
  misc_feature (1)..(662): NCBI GI: 154310009 Blast Desc: BC1G_06925 [Botryotinia fuckeliana B05.10] gi|150851713|gb|EDN26906.1| BC1G_06925 [Botryotinia fuckeliana B05.10]
  misc_feature (1)..(562): NCBI GI: 156039199 Blast Desc: SS1G_11736 [Sclerotinia sclerotiorum 1980] gi|154697473|gb|EDN97211.1| SS1G_11736 [Sclerotinia sclerotiorum 1980]
  misc_feature (51)..(660): NCBI GI: 169770695 Blast Desc: [Aspergillus oryzae RIB40] gi|83767676|dbj|BAE57815.1| protein product [Aspergillus oryzae]
  misc_feature (51)..(660): NCBI GI: 238486848 Blast Desc: rRNA processing protein Nop9, [Aspergillus flavus NRRL3357] gi|220699541|gb|EED55880.1| rRNA processing protein Nop9, [Aspergillus flavus NRRL3357]
  misc_feature: Useful for introducing or modulating the production of volatile compounds
MPKPRSKRQALREERKKKRQDNEAGADDASQPAKRQRRNDDDPTDDQEPQFDGGYDEAQGQAQTGDLASEREFFGMLSDQEQEYFRSVDEQLDIDNFPSQEERQLFLASVFTEAQGKELKLACSQSCSRLMERLILMSNTRQKKKLFEQFASHFLALIQHRFASHCCETLFLQSAPIVTSELGGERDDAADEEEEDKRTLPFMEELFLLTLDELEGRLSFLLTDRFASHTLRVLLLILAGRPLDQAQTKSLIHSKKKEKISAPWTFSSGTDGNAQLRAVPNSFNLAAKKVIADSVSGMSPTELRVLATHPTGNPVLQLLLELDILLNAKSEDESNQMTLLWHLLPDAPASLKDSESPATQFVNSMLYDRVGSRLLETLIIHCPGKIFKVLYKQIFGPRMHSYLRNDTASYPAIRVLNRLSKEDLAEVVKQTLPEVNKLVTLSRFNVIKALMERCQARQAYDEVKSLTRGLIEACGNDPKSLVPHLCLPPASDAKGNNDPLAKNRSALVSHGSHLTTALLAIPNAPRKAVQTSISSLSEDQVLELATGSGPTSHVLVDALATPSQNKIFHKALVAVLRPHVMKLATSEHGNKVLCAIISVPSRSEGASLPFHIKESILTELGQHEQELRQSHEGRRVWRTWKGDLWRNRRVDWIAWAKEVDTEVEPKTPAPDRWTKNGQQENPNNIKVVPKDMRNYVRPNTKRKRVEGVHMLVDADED

SEQ ID NO: 10140 - DNA, 1521 bp, Muscodor strobelii
  misc_feature: SGI cDNA ID NO. 563204
  misc_feature: Elevated expression when VOC is produced
  misc_feature: Encodes the peptide sequence at SEQ ID NO 10141
atggcgcctgttctagcactaacaacagttgtctcggtcatctggctggtatggaacctttggagcaagatatcgccgtcaaaaacgctctccggcattccgctcgtcgaattcgatgacaacaatgccaaagagagatatacgactgaagctggcagcctgttaactaaaggctatgacactcatattaaacatggacgtcctttctgcattcgagatttcttgaatccagcccgtccacgtgtgtttctgccgctcaagtacatgagcgagtataagaatgcaccgcaagatgaactgagtcaacctgccgttctagataacacttccacgatgagcaaagtaggcggtcctcgaatcacggaggagattcaagatgccacgaagttcagcttgaaccgctcgttgaacaaactcattgagcctatgcaaaccctgtgctttcgcgcggccgagcaggggatgccaagttaccctaagtggacctccatcgtcctttatccgaagatattcgagatgttctccagaatgtcatctcgtgtcatggttggccctgagctatgcgaagcgtggccggcgatcgcctcgaagtacatcactcgtacacttgccgcgcaacgtgctatgcgtacccggtactaccctatgttctactggacggcatactatcttaaccctgaagtagcctcggtgaatgagacgcgccgcgaggcagccgagcttgtgcggcctgtgcttgaagctcggcaagctgctctcgatgctcagggcgcggacgccgagaaacacgacgactttattcagtggatcatggagaactatcgcgcgaagggcaaaaaggtctcggcagttgagtgcgtacagaatatctttatcgtgatgtttgcgtcgatgcatggtacttctttcgtcgccttgcaatccctgttcagcctgctcgggacacccggcgctgttgctgagattcgccgtgagattgagcgggtatcgaacgatgaactcaaaggttccccgatatggacgcgtcatggtttgggggagctgaggactatggactctatgatgaaggaaacgttgcggctgaagccgtttcaagaagccacatgccagcgcttttcacttaaaccgtatacattcaaggacggcttacacattcccgagggcaccgtcgtttcattcccaactttgctgtataaccaagactccacaagtatgtcagggctcgacgccagcaccttcgatggtaaacgttggcttcaccggcgcgctggatttgatacgagcaagtaccaatttgcctcgttggccgaagattcgttcgactggggtggtggaccgcacgcgtgcccaggtcgcttcatggcagatgtcactatcaaacttatcctcatttctctgattacgaggtatgatatgaagcttgtagaagatgcgaagaaacgacctgcagagtcaaaacggttcttggattcctcacccgatacgtcgacgcctgtcatgattagagatgttcaagcatag

SEQ ID NO: 10141 - protein, 506 aa, Muscodor strobelii
  misc_feature: SGI Peptide ID NO. 563204
  misc_feature (26)..(499): Pfam Id: PF00067 Pfam Desc: Cytochrome P450
  misc_feature (232)..(482): Pfam Id: PF00067 Pfam Desc: Cytochrome P450
  misc_feature (132)..(506): NCBI GI: 116203149 Blast Desc: CHGG_09459 [Chaetomium globosum CBS 148.51] gi|88177977|gb|EAQ85445.1| CHGG_09459 [Chaetomium globosum CBS 148.51]
  misc_feature (5)..(503): NCBI GI: 116191135 Blast Desc: CHGG_05285 [Chaetomium globosum CBS 148.51] gi|88181198|gb|EAQ88666.1| CHGG_05285 [Chaetomium globosum CBS 148.51]
  misc_feature (1)..(502): NCBI GI: 121704569 Blast Desc: cytochrome P450 [Aspergillus clavatus NRRL 1] gi|119398693|gb|EAW09122.1| cytochrome P450 [Aspergillus clavatus NRRL 1]
  misc_feature (30)..(503): NCBI GI: 39946266 Blast Desc: MGG_08379 [Magnaporthe grisea 70-15] gi|145019963|gb|EDK04191.1| MGG_08379 [Magnaporthe grisea 70-15]
  misc_feature (26)..(441): NCBI GI: 116181228 Blast Desc: CHGG_01242 [Chaetomium globosum CBS 148.51] gi|88185539|gb|EAQ93007.1| CHGG_01242 [Chaetomium globosum CBS 148.51]
  misc_feature (11)..(482): NCBI GI: 256724873 Blast Desc: NECHADRAFT_77014 [Nectria haematococca mpVI 77-13-4]
  misc_feature (46)..(482): NCBI GI: 212539424 Blast Desc: cytochrome P450, [Penicillium marneffei ATCC 18224] gi|210067166|gb|EEA21258.1| cytochrome P450, [Penicillium marneffei ATCC 18224]
  misc_feature (74)..(502): NCBI GI: 156045918 Blast Desc: SS1G_09235 [Sclerotinia sclerotiorum 1980] gi|154693631|gb|EDN93369.1| SS1G_09235 [Sclerotinia sclerotiorum 1980]
  misc_feature (5)..(482): NCBI GI: 242804557 Blast Desc: cytochrome P450, [Talaromyces stipitatus ATCC 10500] gi|218717744|gb|EED17165.1| cytochrome P450, [Talaromyces stipitatus ATCC 10500]
  misc_feature (74)..(503): NCBI GI: 169635726 Blast Desc: cytochrome P450 monooxygenase [Botryotinia fuckeliana]
  misc_feature (46)..(502): SWISSPROT Homolog: EC 1.14.13.78 Ent-kaurene oxidase
  misc_feature: Useful for introducing or modulating the production of volatile compounds
MAPVLALTTVVSVIWLVWNLWSKISPSKTLSGIPLVEFDDNNAKERYTTEAGSLLTKGYDTHIKHGRPFCIRDFLNPARPRVFLPLKYMSEYKNAPQDELSQPAVLDNTSTMSKVGGPRITEEIQDATKFSLNRSLNKLIEPMQTLCFRAAEQGMPSYPKWTSIVLYPKIFEMFSRMSSRVMVGPELCEAWPAIASKYITRTLAAQRAMRTRYYPMFYWTAYYLNPEVASVNETRREAAELVRPVLEARQAALDAQGADAEKHDDFIQWIMENYRAKGKKVSAVECVQNIFIVMFASMHGTSFVALQSLFSLLGTPGAVAEIRREIERVSNDELKGSPIWTRHGLGELRTMDSMMKETLRLKPFQEATCQRFSLKPYTFKDGLHIPEGTVVSFPTLLYNQDSTSMSGLDASTFDGKRWLHRRAGFDTSKYQFASLAEDSFDWGGGPHACPGRFMADVTIKLILISLITRYDMKLVEDAKKRPAESKRFLDSSPDTSTPVMIRDVQA

SEQ ID NO: 10142 - DNA, 5133 bp, Muscodor strobelii
  misc_feature: SGI EST ID NO. CUFF.23960.0
  misc_feature: Variant of the nucleotide sequence at SEQ ID NO 10140
gttgagttggatcaatcggtgatgctagtaagtgtagtaataacacgttgatgtgtatagaacggacaacatgtatgaagtggacaaagccaccgttagagaatggcggtcgtctagtcttctacttatcgtgccttaatctacacaacacgcgtcgacctcttacgaaagaaatcgaaatcgtaggtggagaacgatagtcaatggggcgccgcgtctcagccgtaagactatccactgctattggagtgatgtctgtgaggctagattgttctgctagactccagctggaaactaacgatctttagcctcatccggattgagccgcctaccagaaattctccatcggtcgaggcgttgtcaaacgcgggggttattctctgcacggtcggattagagctagatcatctctattgattgtctctgcgacgtgtgtgggttccgcagccgagtagaagcatgagcgcgagggcatcatgaccaaactcctcgaggataagcgaggctgatcgatgtctagtagcgactctaagctgctagagctacctttattcgtcttaagactgtgttttgaatgcttatcgcatactatccgctcttgttttttcaatcctcatctgcatcgaccagcatatgaactccttcaacacgttttctcttcgtattaggtcttacataattcctcatatccttgggaaccaccttgatattgttcgggttttcctgttgaccattcttcgtccaacgatctggtgcaggagtcttaggctctacctcggtatcaacctcttttgcccatgcaatccagtccactctgcgattcctccataagtctcctttccatgtcctccatacgcggcgcccttcatgcgattgccgcaactcttgctcgtgctgtccgagttcagtcaagatcgactctttgatatggaatggaagtgaagcgccctcacttcgcgatggtacagatattatagcgcatagaactttgtttccgtgctcagaagtggcgagcttcatgacatgaggacgcagaacggcgacgagtgctttgtggaagattttgttttgtgatggagtggcaagagcgtcgactaggacgtgtgaggtgggaccggagcctgtcgcaagctccaggacctgatcttctgaaagacttgagattgatgtctgtacggcctttcgtggagcgttcggtatggcaagtaatgctgtcgtcaggtgagatccgtgtgatactagtgcagaacgattcttcgccaaggggtcattgtttccctttgcatccgacgctggcggtaaacataggtggggaacgagtgattttggatcattcccacaggcttcgatcaggcctctagtcaatgacttaacctcatcgtatgcctgacgagcctggcagcgctccatgagggccttgataacgttgaacctagagagtgtgacgagcttgttaacctcgggtaacgtctgtttcactacttctgccaagtcttccttgctcaatcgattcaagactcggattgcagggtacgatgctgtgtcattacgcaggtagctgtgcatgcgagggccgaagatttgtttgtacagcactttgaagattttgccggggcagtggattataagggtctcaagcagacgtgacccaaccctgtcgtataacatggagttgacaaactgggtggcaggtgattcggagtctttcaacgaagcaggcgcatcaggcagaagatgccataataaggtcatttgatttgactcgtcttccgacttggcattgagcaagatgtccaattccaacagaagctgaagaaccgggtttccggtcgggtgtgtcgccagtactcgcagctcggttgggctcatgccagacaccgaatctgctatgaccttcttggccgcaagattgaaagaattgggcacagcgcgaagttgagcgttaccatccgtgccactactgaatgtccagggtgcggatatcttctccttcttcttgctgtgaataagggacttggtctgggcctggtccaacggtcgcccagcgaggatgagtaataataccctcagagtgtgtgatgcgaatctgtcggtcaagagaaagctgagccgtccctccagttcgtcgagagtcaagaggaagagctcttccatgaacggtagtgttctcttatcctcttcctcctcatccgctgcgtcgtcccgctctcctcccaactcgctcgtgacaatcggagcggactgcaagaacagcgtttcgcaacagtggctagcgaagcgatgctgtatgagagcaagaaagtgactagcgaattgctcgaacagtttcttcttttgcctcgtgttagacatgaggatcagtcgctccattagtcgcgaacatgattgactgcatgccaacttgagttctttgccttgcgcctcggtaaatacactagcgaggaagagctggcgttcttcttgtgaggggaagttgtcgatatcgagctgctcgtcgacggatcggaaatattcttgttcttggtcggacagcatgccaaagaactcacgttccgaggcgagatcgcctgtctgcgcttgcccctgtgcctcgtcatacccgccatcgaattggggttcttgatcatcggtgggatcgtcgtcattgcgtcgttgtctcttggccggttgcgaggcgtcgtcggcgccggcctcgttgtcctgtcgcttcttcttgcgttcctcgcgaagagcctgtcgtttcgatcgtggcttcggcattgtgcagacgagccaccggcaatgtgacaaccaacgtctgtctccaatcacgtgcacaattcgtggttgtcgcaggcgcgcgatgtgcgatgaggcccgccaaaataaatttcgaggtacagagtgacctagctgcgaaaagatgccggccgacagcgataagcgtcagatggaggggcgctatctcttatcggtccacatgccttacccagttggccctagcgtctgaaccggctcgcgtctccttgctcagaccttccatgatacagagaagactacagtacaggtgtgatctttccagtactccttggatttgagcattaatcttgatcgccgtcctgtgagcaatgaaaaaagatgtgaaaatacatcaaacgtagtaatgattattgctgtgcgactgcctgttgctgaacctccaggcagtaggtgagcccttcgatatattgacctccggctcatcttcacagacaagccctgaacctggatcgctccccagggatgaatgggcgcaactccgccagtagacatccatcaccaccccgcaggtgtgcaagttgaccaaggaagagctgtgcgatggtcgaggtaagaaaatacgcgtgaatgttgtccatctgggctttccaacctctcgttcgccagagatgtaaaatactcactatacttcttttttgacattgtctcaactgtttgtttttagcccttcacatatacttgatcacaaagttttggctgctctcatatctcagatatcgatgatggcgcctgttctagcactaacaacagttgtctcggtcatctggctggtatggaacctttggagcaagatatcgccgtcaaaaacgctctccggcattccgctcgtcgaattcgatgacaacaatgccaaagagagatatacgactgaagctggcagcctgttaactaaaggctatgacactcatattaaacatggacgtcctttctgcattcgagatttcttgaatccagcccgtccacgtgtgtttctgccgctcaagtacatgagcgagtataagaatgcaccgcaagatgaactgagtcaacctgccgttctagataacgtctctttgcctggctccggaatcctatctctcgttactgaacaaattttagacttccacgatgagcaaagtaggcggtcctcgaatcacggaggagattcaagatgccacgaagttcagcttgaaccgctcgttgaacaaactcattgagcctatgcaaaccctgtgctttcgcgcggccgagcaggggatgccaagttaccctaagtggacctccatcgtcctttatccgaagatattcgagatgttctccagaatgtcatctcgtgtcatggttggccctgagctatgcgaagcgtggccggcgatcgcctcgaagtacatcactcgtacacttgccgcgcaacgtgctatgcgtacccggtactaccctatgttctactggacggcatactatcttaaccctgaagtagcctcggtgaatgagacgcgccgcgaggcagccgagcttgtgcggcctgtgcttgaagctcggcaagctgctctcgatgctcagggcgcggacgccgagaaacacgacgactttattcagtggatcatggagaactatcgcgcgaagggcaaaaaggtctcggcagttgagtgcgtacagaatatctttatcgtgatgtttgcgtcgatgcatggtacttctttcgtcgccttgcaatccctgttcagcctgctcgggacacccggcgctgttgctgagattcgccgtgagattgagcgggtatcgaacgatgaactcaaaggttccccgatatggacgcgtcatggtttgggggagctgaggactatggactctatgatgaaggaaacgttgcggctgaagccgtttcaagaagccacatgccagcgcttttcacttaaaccgtatacattcaaggacggcttacacattcccgagggcaccgtcgtttcattcccaactttgctgtataaccaagactccacaagtatgtcagggctcgacgccagcaccttcgatggtaaacgttggcttcaccggcgcgctggatttgatacgagcaagtaccaatttgcctcgttggccgaagattcgttcgactggggtggtggaccgcacgcgtgcccaggtcgcttcatggcagatgtcactatcaaacttatcctcatttctctgattacgaggtatgatatgaagcttgtagaagatgcgaagaaacgacctgcagagtcaaaacggttcttggattcctcacccgatacgtcgacgcctgtcatgattagagatgttcaagcataggtacctagatactccaatgccgaatatgttaaatcgcgg

SEQ ID NO: 10143 - DNA, 1410 bp, Muscodor strobelii
  misc_feature: SGI cDNA ID NO. 563205
  misc_feature: Encodes the peptide sequence at SEQ ID NO 10144
atgaatgagaagtgccatgatgatgcttccgatagtcaccgtgaccgtgaatcgcttgagagccatgaccatgctcctccgcagcttgacaggatacggactgcatcgagaccagcctctgccagggcttcacacgatattaagaagactgccagcaacgtcttatcgcatgttgcctctcgactaacgacgagatctttgcccgagccaccaccaccgcctgacggaggagtgaaagcatggacgcaagtcgccttaggcttcttcgtactcttgacgacatggggctatgcgaactcatttggtgcctttcaaacatattatactgaaacactccccgaatctgcatctactatctcatggatcgggtcaattcaaatctggttttcgttgacgtttggtgcattttctggtcgcctacttgatgccggctacttcttccccacgtttatcgttggtattatcatccaggtcctgggcatctttcttatgagcgtaagccgcacattttggcagcttttcttgacacaaggcattctgagtggtattggcgcgggtatctacttcacgccggctgtttcgattatcagtacgtactttgacaagcatcgcgccctggccgtcggtattgctacgaccggtaattcggcgggaggtcttgtatatcccatcattgtgaatcaacttattccaaaatttggatttgcgtggacaactcgagtgattggcttcatcaatctcggagtgctgctactagcgctagcattcattcgacctcgcctgccaccgcgaaaatctggcccccttgttgatctatcagcgtttaaagaacccatctacgcatcatttgtcgctggagcgtttttcgcgatgtggtcgacgtattacaccttctactatatcgcttcatttggcactcaagctttgcatatgccgtactcggaagcatccaacctagttgtcattatcaacgctgcgggtctccctaaccgtgtgattattcccatccttgttgatcgatacggtcccttaaatgtcatactacctgtcacactcatatgggtcatcgtggctttcagttggctagctgttgatggtgttgcaggcggctacgtcttcgcagtgatcttcgggatagcttcagctagctttcagtgcctatttccttctaccatagctaagattacgcctaagctcaacactgtaggaacgcgattaggaatggcgttcgctgtcatctcattcgcatctttatcggggcctcccatcggcggtgcgattttagcacagagtggaggctactatcaaaattcacagatatggtctgcactgtcggtcttgctctctttgctggcgtttggctacacacgagtgctacgcggtggcttcgacttgaaggcgaattgctag

SEQ ID NO: 10144 - protein, 469 aa, Muscodor strobelii
  misc_feature: SGI Peptide ID NO. 563205
  misc_feature (86)..(421): Pfam Id: PF07690 Pfam Desc: Major Facilitator Superfamily
  misc_feature (7)..(468): NCBI GI: 145604747 Blast Desc: MGG_07882 [Magnaporthe grisea 70-15] gi|145012689|gb|EDJ97343.1| MGG_07882 [Magnaporthe grisea 70-15]
  misc_feature (55)..(469): NCBI GI: 256721290 Blast Desc: NECHADRAFT_52759 [Nectria haematococca mpVI 77-13-4]
  misc_feature (17)..(469): NCBI GI: 46105138 Blast Desc: FG00197.1 [Gibberella zeae PH-1]
  misc_feature (7)..(469): NCBI GI: 169601970 Blast Desc: SNOG_03862 [Phaeosphaeria nodorum SN15] gi|111067947|gb|EAT89067.1| SNOG_03862 [Phaeosphaeria nodorum SN15]
  misc_feature (63)..(468): NCBI GI: 169764347 Blast Desc: [Aspergillus oryzae RIB40] gi|83764499|dbj|BAE54643.1| protein product [Aspergillus oryzae]
  misc_feature (61)..(468): NCBI GI: 238504424 Blast Desc: monocarboxylate permease, [Aspergillus flavus NRRL3357] gi|220690914|gb|EED47263.1| monocarboxylate permease, [Aspergillus flavus NRRL3357]
  misc_feature (15)..(448): NCBI GI: 154311335 Blast Desc: BC1G_06520 [Botryotinia fuckeliana B05.10] gi|150850917|gb|EDN26110.1| BC1G_06520 [Botryotinia fuckeliana B05.10]
  misc_feature (65)..(468): NCBI GI: 255948762 Blast Desc: Pc22g12020 [Penicillium chrysogenum Wisconsin 54-1255] gi|211592165|emb|CAP98490.1| Pc22g12020 [Penicillium chrysogenum Wisconsin 54-1255]
  misc_feature (47)..(443): NCBI GI: 156042688 Blast Desc: SS1G_11142 [Sclerotinia sclerotiorum 1980] gi|154695528|gb|EDN95266.1| SS1G_11142 [Sclerotinia sclerotiorum 1980]
  misc_feature (1)..(468): NCBI GI: 115402957 Blast Desc: conserved [Aspergillus terreus NIH2624] gi|114189401|gb|EAU31101.1| conserved [Aspergillus terreus NIH2624]
MNEKCHDDASDSHRDRESLESHDHAPPQLDRIRTASRPASARASHDIKKTASNVLSHVASRLTTRSLPEPPPPPDGGVKAWTQVALGFFVLLTTWGYANSFGAFQTYYTETLPESASTISWIGSIQIWFSLTFGAFSGRLLDAGYFFPTFIVGIIIQVLGIFLMSVSRTFWQLFLTQGILSGIGAGIYFTPAVSIISTYFDKHRALAVGIATTGNSAGGLVYPIIVNQLIPKFGFAWTTRVIGFINLGVLLLALAFIRPRLPPRKSGPLVDLSAFKEPIYASFVAGAFFAMWSTYYTFYYIASFGTQALHMPYSEASNLVVIINAAGLPNRVIIPILVDRYGPLNVILPVTLIWVIVAFSWLAVDGVAGGYVFAVIFGIASASFQCLFPSTIAKITPKLNTVGTRLGMAFAVISFASLSGPPIGGAILAQSGGYYQNSQIWSALSVLLSLLAFGYTRVLRGGFDLKANC

SEQ ID NO: 10145 - DNA, 1888 bp, Muscodor strobelii
  misc_feature: SGI EST ID NO. CUFF.23948.0
  misc_feature: Variant of the nucleotide sequence at SEQ ID NO 10143
ccgtgataggtcttctcttcaatcgatatcgtcattgtgcacccccttctgttattttttcttgacttacgctcatatcagtatcatatttgagtttaactatcaagtatcagccatatatcctcccttcatatggcgggctcaacttcacagacagattaccggtagagttggcgaaagatgacaatcaatgtcgccggagacaacgccgacttctattgcatctcggttctccacagtggatcgtgacggaacggcaaatgtgatagtgtcacgttggagagtcccgccaccacaaaccggaaataagttccggatccaccctcaagatcgtggcaatggggattttcatcgggtttctctaccattcgtcgcccttatgatgtcgccgaagacggagaaggaccggtgagcctctcctgcttcgccttatgcgccaacgctctccaatcctacctcattgagggaacctttatcttcatcgcttgagtagccccatcatgctgggctgctgtatcaaaatcaaagcggtccatagctccatttctactgtattgttcaagaacaccactcctttgctaaactaattggcaccgcgtgtgtctaatttgaagcatagctatcatcaaaatgaatgagaagtgccatgatgatgcttccgatagtcaccgtgaccgtgaatcgcttgagagccatgaccatgctcctccgcagcttgacaggatacggactgcatcgagaccagcctctgccagggcttcacacgatattaagaagactgccagcaacgtcttatcgcatgttgcctctcgactaacgacgagatctttgcccgagccaccaccaccgcctgacggaggagtgaaagcatggacgcaagtcgccttaggcttcttcgtactcttgacgacatggggctatgcgaactcatttggtgcctttcaaacatattatactgaaacactccccgaatctgcatctactatctcatggatcgggtcaattcaaatctggttttcgttgacgtttggtgcattttctggtcgcctacttgatgccggctacttcttccccacgtttatcgttggtattatcatccaggtcctgggcatctttcttatgagcgtaagccgcacattttggcagcttttcttgacacaaggcattctgagtggtattggcgcgggtatctacttcacgccggctgtttcgattatcagtacgtactttgacaagcatcgcgccctggccgtcggtattgctacgaccggtaattcggcgggaggtcttgtatatcccatcattgtgaatcaacttattccaaaatttggatttgcgtggacaactcgagtgattggcttcatcaatctcggagtgctgctactagcgctagcattcattcgacctcgcctgccaccgcgaaaatctggcccccttgttgatctatcagcgtttaaagaacccatctacgcatcatttgtcgctggagcgtttttcgcgatgtggtcgacgtattacaccttctactatatcgcttcatttggcactcaagctttgcatatgccgtactcggaagcatccaacctagttgtcattatcaacgctgcgggtctccctaaccgtgtgattattcccatccttgttgatcgatacggtcccttaaatgtcatactacctgtcacactcatatgggtcatcgtggctttcagttggctagctgttgatggtgttgcaggcggctacgtcttcgcagtgatcttcgggatagcttcagctagctttcagtgcctatttccttctaccatagctaagattacgcctaagctcaacactgtaggaacgcgattaggaatggcgttcgctgtcatctcattcgcatctttatcgg

SEQ ID NO: 10146 - DNA, 1671 bp, Muscodor strobelii
  misc_feature: SGI cDNA ID NO. 563206
  misc_feature: Encodes the peptide sequence at SEQ ID NO 10147
atgggtgtgattgagccgctgttgaaggcagctctggggttcttcatcgcagtggcgacggtccgcatttcgaacttcctctctaaaggatgggaagtccgaagcaagctcagaaagctccaaaaggagggccagccgatgaatccgcatagtcttctcatgggccatctacttaatgcgaaggctgccgcggaagagcttccacctggtgctcatagcaattatgtgttgaatcgcatggcagctagattaggaaatcctgaagcgttctacttcgatccatggccggttgcagacccgatgttagttgttacggatcagtatcttgccgaacaggccaccagccatcacttgagcggcggcttcaagccaccatcgctcactcgttggttcgcccctatttcgggccgcggaggacagaacctttttgttcaaaatggccaagactggaagcaagaccatgagacctttctaccctggttcagcaacagcaatctcgacgcgacgcttcccgcggtcattgacgagatgcttattttccgcgatatcttaagagagaaggcacagtcaaaggacatgatccgtcttgagcctctcactcttcgtctcatgaacgatatcattggccgcgtgatcttcaacacggaactgaagaaccagacatccgatacgccccatcccctctcgcagtacatgatccgccaactcgactccaagtttcaagagaatgacgctgtgcagcagattggtcgactcagccccttgtacatgttgggagtgtggaacaacggtcgaaatctagacaaagagatcagcacgcaaattaagcgacgagtggatgctctacgcgctgcgaaatggcaaggagaatcttcgttaagctcgatgcttgaccgtgtactcttagagtacttctcgaaacctgaacgtcagagagtgggaattgttgatactgagtttatgaagatgttggtttgtcagctgcgcttattgttcttcgctggatacgactcgacatctagcactatgatagtcctttgttacatgatatggacacacccagaggttctcgctaagctgcgtgctgagcacgatgatgtctttggtcgaaacgttgaatcatgcgctggccagatcgtcgagaacccggccattctcaactctcttccttacaccaatgctgtgattaaggaggcaatgagactactgccgcccgctagtggcgtacgtcaaggatgcagagacttggtgttaagaggccgggacggcgcagaatatcccacggacggctatgtcgtgaacacaaatcacatgggtgtcatgagaaaccccaaaacttggccgcgacctctcgagtttctgccagagcgctttctcgttggtccgggacatgagttatatccgcctaagggcgcttggcggccgttcgagaacgggttgcgaacctgcactggtcaggcgtttgtgttgaaggagctgcgtgcgttccttgcgcttactgtgagggagtttgactttcacgaggcttatgatgaggccttcgccggcgagaaaatcgacctgacaggtgtttacggcgagaaggcatatatgatcgaggcaggttcggctcacccccgtggagagttcccttgtcggattacccttagcgggtatgggaatgggaaatga

SEQ ID NO: 10147 - protein, 556 aa, Muscodor strobelii
  misc_feature: SGI Peptide ID NO. 563206
  misc_feature (49)..(534): Pfam Id: PF00067 Pfam Desc: Cytochrome P450
  misc_feature (324)..(507): Pfam Id: PF00067 Pfam Desc: Cytochrome P450
  misc_feature (29)..(548): NCBI GI: 189195772 Blast Desc: cytochrome P450 71B25 [Pyrenophora tritici-repentis Pt-1C-BFP] gi|187980103|gb|EDU46729.1| cytochrome P450 71B25 [Pyrenophora tritici-repentis Pt-1C-BFP]
  misc_feature (16)..(549): NCBI GI: 238486080 Blast Desc: N-alkane-inducible cytochrome P450, [Aspergillus flavus NRRL3357] gi|220699157|gb|EED55496.1| N-alkane-inducible cytochrome P450, [Aspergillus flavus NRRL3357]
  misc_feature (12)..(548): NCBI GI: 156042896 Blast Desc: SS1G_11247 [Sclerotinia sclerotiorum 1980] gi|154695632|gb|EDN95370.1| SS1G_11247 [Sclerotinia sclerotiorum 1980]
  misc_feature (26)..(532): NCBI GI: 156032916 Blast Desc: SS1G_13864 [Sclerotinia sclerotiorum 1980] gi|154699266|gb|EDN99004.1| SS1G_13864 [Sclerotinia sclerotiorum 1980]
  misc_feature (12)..(549): NCBI GI: 154320460 Blast Desc: BC1G_01702 [Botryotinia fuckeliana B05.10] gi|150853391|gb|EDN28583.1| BC1G_01702 [Botryotinia fuckeliana B05.10]
  misc_feature (101)..(549): NCBI GI: 169771371 Blast Desc: [Aspergillus oryzae RIB40] gi|83768014|dbj|BAE58153.1| protein product [Aspergillus oryzae]
  misc_feature (12)..(551): NCBI GI: 259484753 Blast Desc: TPA: cytochrome P450, (Eurofung) [Aspergillus nidulans FGSC A4]
  misc_feature (12)..(547): NCBI GI: 238497407 Blast Desc: aflN/ verA/ monooxygenase [Aspergillus flavus NRRL3357] gi|220694819|gb|EED51163.1| aflN/ verA/ monooxygenase [Aspergillus flavus NRRL3357]
  misc_feature (35)..(550): NCBI GI: 225554246 Blast Desc: sterigmatocystin biosynthesis P450 monooxygenase StcS [Ajellomyces capsulatus G186AR]
  misc_feature (47)..(549): NCBI GI: 208879566 Blast Desc: AflN [Aspergillus ochraceoroseus]
  misc_feature (123)..(506): SWISSPROT Homolog: EC 1.14.15.3 Alkane 1-monooxygenase
MGVIEPLLKAALGFFIAVATVRISNFLSKGWEVRSKLRKLQKEGQPMNPHSLLMGHLLNAKAAAEELPPGAHSNYVLNRMAARLGNPEAFYFDPWPVADPMLVVTDQYLAEQATSHHLSGGFKPPSLTRWFAPISGRGGQNLFVQNGQDWKQDHETFLPWFSNSNLDATLPAVIDEMLIFRDILREKAQSKDMIRLEPLTLRLMNDIIGRVIFNTELKNQTSDTPHPLSQYMIRQLDSKFQENDAVQQIGRLSPLYMLGVWNNGRNLDKEISTQIKRRVDALRAAKWQGESSLSSMLDRVLLEYFSKPERQRVGIVDTEFMKMLVCQLRLLFFAGYDSTSSTMIVLCYMIWTHPEVLAKLRAEHDDVFGRNVESCAGQIVENPAILNSLPYTNAVIKEAMRLLPPASGVRQGCRDLVLRGRDGAEYPTDGYVVNTNHMGVMRNPKTWPRPLEFLPERFLVGPGHELYPPKGAWRPFENGLRTCTGQAFVLKELRAFLALTVREFDFHEAYDEAFAGEKIDLTGVYGEKAYMIEAGSAHPRGEFPCRITLSGYGNGK

SEQ ID NO: 10148 - DNA, 2359 bp, Muscodor strobelii
  misc_feature: SGI EST ID NO. CUFF.23954.0
  misc_feature: Variant of the nucleotide sequence at SEQ ID NO 10146
cctggaagcatcggaataagggacaatggggtgaaatctgctggaatatcgaaacaggactgggtcctgctattgtcctattcgaaaaattcgttggcgactcgattcgggttgaactttttagatttcatgcgccctctttacgtctaggtctccgtctaagagtcagaagctcatacgttaggccaaccaagacatctactcgaggaggcggaacaacccgcaatatctagatccctgagtctaggactgcgtggcacgctgtcgattaaaagtggcgttaccgatcctacttcgaagagtcacgatagtgttgaaaacacatcattgtagcactcgcatcatagccttgagcggggcgtacaccaagattggctctgcttcctgctggaacacgcaggctcggtctattgatatacactcaagtgtcgatgactgaactgtatcgagtataacattgcgttaaccgaagcacctagtctgcgaattttactttaattttatcatgggtgtgattgagccgctgttgaaggcagctctggggttcttcatcgcagtggcgacggtccgcatttcgaacttcctctctaaaggatgggaagtccgaagcaagctcagaaagctccaaaaggagggccagccgatgaatccgcatagtcttctcatgggccatctacttaatgcgaaggctgccgcggaagagcttccacctggtgctcatagcaattatgtgttgaatcgcatggcagctagattaggaaatcctgaagcgttctacttcgatccatggccggttgcagacccgatgttagttgttacggatcagtatcttgccgaacaggccaccagccatcacttgagcggcggcttcaagccaccatcgctcactcgttggttcgcccctatttcgggccgcggaggacagaacctttttgttcaaaatggccaagactggaagcaagaccatgagacctttctaccctggttcagcaacagcaatctcgacgcgacgcttcccgcggtcattgacgagatgcttattttccgcgatatcttaagagagaaggcacagtcaaaggacatgatccgtcttgagcctctcactcttcgtctcatgaacgatatcattggccgcgtgatcttcaacacggaactgaagaaccagacatccgatacgccccatcccctctcgcagtacatgatccgccaactcgactccaagtttcaagagaatgacgctgtgcagcagattggtcgactcagccccttgtacatgttgggagtgtggaacaacggtcgaaatctagacaaagagatcagcacgcaaattaagcgacgagtggatgctctacgcgctgcgaaatggcaaggagaatcttcgttaagctcgatgcttgaccgtgtactcttagagtacttctcgaaacctgaacgtcagagagtgggaattgttgatactgagtttatgaagatgttggtttgtcagctgcgcttattgttcttcgctggatacgactcgacatctagcactatgatagtcctttgttacatgatatggacacacccagaggttctcgctaagctgcgtgctgagcacgatgatgtctttggtcgaaacgttgaatcatgcgctggccagatcgtcgagaacccggccattctcaactctcttccttacaccaatgctgtgattaaggaggcaatgagactactgccgcccgctagtggcgtacgtcaaggatgcagagacttggtgttaagaggccgggacggcgcagaatatcccacggacggctatgtcgtgaacacaaatcacatgggtgtcatgagaaaccccaaaacttggccgcgacctctcgagtttctgccagagcgctttctcgttggtccgggacatgagttatatccgcctaagggcgcttggcggccgttcgagaacgggttgcgaacctgcactggtcaggcgtttgtgttgaaggagctgcgtgcgttccttgcgcttactgtgagggagtttgactttcacgaggcttatgatgaggccttcgccggcgagaaaatcgacctgacaggtgtttacggcgagaaggcatatatgatcgaggcaggttcggctcacccccgtggagagttcccttgtcggattacccttagcgggtatgggaatgggaaatgaaaggaaaaagcgcgcattgtctcacagaggtgagactggtgatcgtggaatcttacggaagtgctgtagacgctcacgtgggaagagtaataatgggatggttttctacttaacttcagaatagaccggcgaatagcgcctgtatatgtacacacctaaacccatttattatgctccctagag

SEQ ID NO: 10149 - DNA, 1866 bp, Muscodor strobelii
  misc_feature: SGI cDNA ID NO. 563207
  misc_feature: Encodes the peptide sequence at SEQ ID NO 10150
atggaaaacttcctagctggtcaagtcgcctcaaccgcatatcataccgaactgactccggtgaatgcacaacttccagtctctcctgagagtcttcagaaccatagcccaaacccaccgtcatgtcttgctgcagacagtaacagcatcaacgagacgaccgattcaactactgttcaattattaaaggctcttccttctgatcacgatgtcaggctgttgcttcaagagagcttgataccagcattatatgctctcttactcaatactcaaccatacagtgagctgacatacgagaggctcacggcacatatctcaaatacagaggctcctggtcctcacactcatcccgtaattctcgccaagcagatgcttctctttgcgcttactttacaaagcccggctcgagaaaatctggcagttctttccgagccgcttgacccactgatgcatcgcttagtcgatgcagcaacgacatgggtaacgacgaaagaacatatgcagggaaccgttgatggcctgatatgcatcatgttagaaggagtatatgaagccaacagcggtaatcttcgccgctcgtggctagcattccgcagggccatgtctgtagcacagctgatgggtttacaccgttctcgggcacccgttcccgctctgaagcgcatcgatccgacactcgatgtcaagcctgcattcttgtggtaccgtattgtctacatggatcgatatttgtgcctcatgcttggactacctcagggctcccacgacagaagtatcggagcgccatcggccttacttggtgaaccgccactcggtcaatttgaaagacaactgactgtcatcgcatcacatgtgttggaccgtaatgaagactcgacgtctatcaacgacattgctagtacccagtctattgacgcagaattgttgatggtagcaaagaatatgccgacaagtttttggcgtccggcaaattttcacaatcaagttccagggtccgctgagtcgttgcttgagacggtccggttagtggctcatgtcaactactacggtctattaattcacctccatcttcccttcctcatagatttcggcaataggacaggcgatgcatattctaaagtcacttgcgtcaatgcaagtcgtgaaatcatgacacgtttcataacacatcgaaccttcaaccctctttcatcttgctcgagacctgtagacttcatcgcgcttattgccagcatgacgcttttacttgctcatctggatacacaccatcatccagatactcccaattacctcgcccatcatcggctcagtgaccgcgcattgctggaccaggcattggaaaggatggatgcgatcagtaacatgaatgacgatccaataaccaccaaaagtgcagtcctggttcgtcgcttactggagatcgaggaggatgcagctaatggagcaacctactccactgagaatgtctccgtgcatgttaatactgcgatggacggcaatgaagccaaagatcaagatcaaaataatgaagcacttcgcttgccagttccgtttctcggtattatcaggattgctagattgggggctatctctctcgagtcatttcacaatgctaacaatgcagtgtcaccccaatcaccaataaggaaagagttaggtgcattgccgactaatggagacccggccgacacacaatgtattccttcttttaatgacaacatcaatctgtcgccctcaatagcggctggcgtcagcgactacgcgttccaaggagtggacgcggcgtttttcgatagcgtcttgtcaggaatgccgtatgaggaagctggtttatctgagcagcaatggattgatggctcaatgtag

SEQ ID NO: 10150 - protein, 621 aa, Muscodor strobelii
  misc_feature: SGI Peptide ID NO. 563207
  misc_feature (170)..(269): Pfam Id: PF04082 Pfam Desc: Fungal specific transcription factor domain
  misc_feature (170)..(212): Pfam Id: PF04082 Pfam Desc: Fungal specific transcription factor domain
  misc_feature (43)..(614): NCBI GI: 119476830 Blast Desc: C6 zinc finger domain protein [Neosartorya fischeri NRRL 181] gi|119407372|gb|EAW17321.1| C6 zinc finger domain protein [Neosartorya fischeri NRRL 181]
  misc_feature (1)..(601): NCBI GI: 238482509 Blast Desc: conserved [Aspergillus flavus NRRL3357] gi|220700543|gb|EED56881.1| conserved [Aspergillus flavus NRRL3357]
  misc_feature (25)..(603): NCBI GI: 116208600 Blast Desc: CHGG_03593 [Chaetomium globosum CBS 148.51] gi|88184190|gb|EAQ91658.1| CHGG_03593 [Chaetomium globosum CBS 148.51]
  misc_feature (55)..(603): NCBI GI: 242791249 Blast Desc: TSTA_115260 [Talaromyces stipitatus ATCC 10500] gi|218718307|gb|EED17727.1| TSTA_115260 [Talaromyces stipitatus ATCC 10500]
  misc_feature (181)..(601): NCBI GI: 169765896 Blast Desc: [Aspergillus oryzae RIB40] gi|83765274|dbj|BAE55417.1| protein product [Aspergillus oryzae]
  misc_feature (61)..(604): NCBI GI: 242797239 Blast Desc: conserved [Talaromyces stipitatus ATCC 10500] gi|218719558|gb|EED18978.1| conserved [Talaromyces stipitatus ATCC 10500]
  misc_feature (61)..(528): NCBI GI: 255955041 Blast Desc: Pc21g12430 [Penicillium chrysogenum Wisconsin 54-1255] gi|211589984|emb|CAP96140.1| Pc21g12430 [Penicillium chrysogenum Wisconsin 54-1255]
  misc_feature (55)..(526): NCBI GI: 115396206 Blast Desc: [Aspergillus terreus NIH2624] gi|114193311|gb|EAU35011.1| [Aspergillus terreus NIH2624]
  misc_feature (40)..(526): NCBI GI: 189196762 Blast Desc: C6 zinc finger domain containing protein [Pyrenophora tritici-repentis Pt-1C-BFP] gi|187980598|gb|EDU47224.1| C6 zinc finger domain containing protein [Pyrenophora tritici-repentis
  misc_feature (20)..(544): NCBI GI: 169603215 Blast Desc: SNOG_04616 [Phaeosphaeria nodorum SN15] gi|160706349|gb|EAT88376.2| SNOG_04616 [Phaeosphaeria nodorum SN15]
MENFLAGQVASTAYHTELTPVNAQLPVSPESLQNHSPNPPSCLAADSNSINETTDSTTVQLLKALPSDHDVRLLLQESLIPALYALLLNTQPYSELTYERLTAHISNTEAPGPHTHPVILAKQMLLFALTLQSPARENLAVLSEPLDPLMHRLVDAATTWVTTKEHMQGTVDGLICIMLEGVYEANSGNLRRSWLAFRRAMSVAQLMGLHRSRAPVPALKRIDPTLDVKPAFLWYRIVYMDRYLCLMLGLPQGSHDRSIGAPSALLGEPPLGQFERQLTVIASHVLDRNEDSTSINDIASTQSIDAELLMVAKNMPTSFWRPANFHNQVPGSAESLLETVRLVAHVNYYGLLIHLHLPFLIDFGNRTGDAYSKVTCVNASREIMTRFITHRTFNPLSSCSRPVDFIALIASMTLLLAHLDTHHHPDTPNYLAHHRLSDRALLDQALERMDAISNMNDDPITTKSAVLVRRLLEIEEDAANGATYSTENVSVHVNTAMDGNEAKDQDQNNEALRLPVPFLGIIRIARLGAISLESFHNANNAVSPQSPIRKELGALPTNGDPADTQCIPSFNDNINLSPSIAAGVSDYAFQGVDAAFFDSVLSGMPYEEAGLSEQQWIDGSM

SEQ ID NO: 10151 - DNA, 480 bp, Muscodor strobelii
  misc_feature: SGI cDNA ID NO. 563208
  misc_feature: Encodes the peptide sequence at SEQ ID NO 10152
atgtacgcaacagcaccaacccggcaagagatcattcaatcctgtccaggactccaagcctcaccaacccaggttcgcgactggttctcaacctacctcgcctaccgaggactcgacgcatcggacggacaaaaattcctctggcgcggcatagaactccatcgcgctacattcaccactctcgtcgatgcattcaagcatcattgtagcaagttagactgggaggctgatgtgcttgcatatgatgtatataccatcgttgaggaatcagtaccaccgcccaaacgaacaatgttccagcgctatgtcgagagcctattcgggtacgagttctacagcaatctgatgcaatggtcgaagccgaattcgaagtttctggattacgctaattgtgtgctctgttggggtggtttctcgcttatacacgccgtgctattgttgattatcgctgttgttgttgggtttttgttgagtagttga

SEQ ID NO: 10152 - protein, 159 aa, Muscodor strobelii
  misc_feature: SGI Peptide ID NO. 563208
MYATAPTRQEIIQSCPGLQASPTQVRDWFSTYLAYRGLDASDGQKFLWRGIELHRATFTTLVDAFKHHCSKLDWEADVLAYDVYTIVEESVPPPKRTMFQRYVESLFGYEFYSNLMQWSKPNSKFLDYANCVLCWGGFSLIHAVLLLIIAVVVGFLLSS

SEQ ID NO: 10153 - DNA, 5609 bp, Muscodor strobelii
  misc_feature: SGI EST ID NO. CUFF.24639.0
  misc_feature: Variant of the nucleotide sequence at SEQ ID NO 10151
cgaattcattctataacgctttgagtatagcttgactacgccagcaagccttgattttatcccgccgtggcggcgaaggtggaatttaggtactgacatcagcgagcctaggggctttccactaacgacgtgggtgattggtagtggagatagccccctgtcaattggccgtgatgtattgaggtcgtagcgccatcgtagcgccgtggcggcggagatacgaagttattacaaacgacttgatggcttcataccagttgcggtgcagtacgatgatttccgccgtgtagaatctttaagcgaaatctaacgataattttcgattgtcacaggaccgcgacgattgcagcagaaacccacacaaaatatcgcggtgatgtcttctgacgacggacgaatgccaccgaagcggagaaaggttcgcaaaggaactcggtcgtgttgggaatgtaaaagaaggaaagcaaaatgtatcttcacagatgctgaagatgagaatgcaaattgccttggctgccagcaacgacggacaccatgtgtctcgcaagagctgcccgaacatctagctccggcacggctcgggaatcgacatttgggccatcgcatttcaagggtagaagacttcatggaaaacttcctagctggtcaagtcgcctcaaccgcatatcataccgaactgactccggtgaatgcacaacttccagtctctcctgaggtgaagaacccataaaactcgcattccaacatccgaaatacccgacttacctcgtctcagagtcttcagaaccatagcccaaacccaccgtcatgtcttgctgcagacagtaacagcatcaacgagacgaccgattcaactactgttcaattattaaaggctcttccttctgatcacgatgtcaggctgttgcttcaagagagcttgataccagcattatatgctctcttactcaatactcaaccatacagtgagctgacatacgagaggctcacggcacatatctcaaatacagaggctcctggtcctcacactcatcccgtaattctcgccaagcagatgcttctctttgcgcttactttacaaagcccggctcgagaaaatctggcagttctttccgagccgcttgacccactgatgcatcgcttagtcgatgcagcaacgacatgggtaacgacgaaagaacatatgcagggaaccgttgatggcctgatatgcatcatgttagaaggagtatatgaagccaacagcggtaatcttcgccgctcgtggctagcattccgcagggccatgtctgtagcacagctgatgggtttacaccgttctcgggcacccgttcccgctctgaagcgcatcgatccgacactcgatgtcaagcctgcattcttgtggtaccgtattgtctacatggatcgatatttgtgcctcatgcttggactacctcagggctcccacgacagaagtatcggagcgccatcggccttacttggtgaaccgccactcggtcaatttgaaagacaactgactgtcatcgcatcacatgtgttggaccgtaatgaagactcgacgtctatcaacgacattgctagtacccagtctattgacgcagaattgttgatggtagcaaagaatatgccgacaagtttttggcgtccggcaaattttcacaatcaagttccagggtccgctgagtcgttgcttgagacggtccggttagtggctcatgtcaactactacggtctattaattcacctccatcttcccttcctcatagatttcggcaataggacaggcgatgcatattctaaagtcacttgcgtcaatgcaagtcgtgaaatcatgacacgtttcataacacatcgaaccttcaaccctctttcatcttgctcgagacctgtagacttcatcgcgcttattgccagcatgacgcttttacttgctcatctggatacacaccatcatccagatactcccaattacctcgcccatcatcggctcagtgaccgcgcattgctggaccaggcattggaaaggatggatgcgatcagtaacatgaatgacgatccaataaccaccaaaagtgcagtcctggttcgtcgcttactggagatcgaggaggatgcagctaatggagcaacctactccactgagaatgtctccgtgcatgttaatactgcgatggacggcaatgaagccaaagatcaagatcaaaataatgaagcacttcgcttgccagttccgtttctcggtattatcaggattgctagattgggggctatctctctcgagtcatttcacaatgctaacaatgcagtgtcaccccaatcaccaataaggaaagagttaggtgcattgccgactaatggagacccggccgacacacaatgtattccttcttttaatgacaacatcaatctgtcgccctcaatagcggctggcgtcagcgactacgcgttccaaggagtggacgcggcgtttttcgatagcgtcttgtcaggaatgccgtatgaggaagctggtttatctgagcagcaatggattgatggctcaatgtagtttgattattaatacacatattgcaatataccactagatgggttgaaatgaacagtttattgagaatttgattatacttcctgaggaccacatgttaccattgtgagaaggtggctttccatcaagttagatttttagacatgacactgtctggtcgtcccttggaccagactctctttgtccaatgtccaagtctaagcaagcttacctattgtgatcctattgtgatcttgatatttcattcctatctttgtcgcgataccgcatcgagactcatcataaagagacaaataacaataagccaacacaatagcatctccacgtgccttgtgcatcaccatgaagaataactcagacccgatctcagcaattgagtcacgatcatggcatccaccatagcacgacccgtgcaaatcccctcaccatgactaaccctcgtccaccacacacccaactcgcacccaaaatgtacgcaacagcaccaacccggcaagagatcattcaatcctgtccaggactccaagcctcaccaacccaggttcgcgactggttctcaacctacctcgcctaccgaggactcgacgcatcggacggacaaaaattcctctggcgcggcatagaactccatcgcgctacattcaccactctcgtcgatgcattcaagcatcattgtagcaagttagactgggaggctgatgtgcttgcatatgatgtatataccatcgttgaggaatcagtaccaccgcccaaacgaacaatgttccagcgctatgtcgagagcctattcgggtacgagttctacagcaatctgatgcaatggtcgaagccgaattcgaagtttctggattacgctaattgtgtgctctgttggggtggtttctcgcttatacacgccgtgctattgttgattatcgctgttgttgttgggtttttgttgagtagttgatgagcctcgagagagtgtggagacgaggggtcgggacgggtgttatttgatgttattgtacatattggagtaggtgggattcggggcgtatatcttctatgtcagctctcattgtatatcaattgaacgcttcaagtgggtcatagcagagaaagacgctatgatacctttccatttgttgagtcatataccagcgctttggaatttctggataggcaatatagaggtttgcgcggagcaacggagggaggtcttgcctgtgtattctgcctatcgccgaccggttatatcttggcagacgttcacgaagcctccgttctgacggctttttcctcggcagtatgcagtgtaaaaattcaaagttttggggtatgtatattgtgtcaaatttgaaaatatgtatatgaaatctaatgggttttgtttgacatatgtaccttgcacactctgaatattgtcttccatgatttaatttcactaaaaccaccattgtcctacccaccgcgaatatgctgaaagtcgcgtcccttcttgctctttggtgcacgagtttcgtcgtggctaggagtgcaaaacgtgatgactgcgatgtatcaatcatcgcgcactctggtgacccagtcgggacggaagaagtccacaatgggagtatgcgagccggaacgagatcatggtgaatgatacgagccgagagctgacgcgatttcagtcaatctctacatcacaggaaaaccttcaagtaaagcgatcgtatacctgacaaacgtatttggcatacaggaactcgaaaacaagctgtgcgtcgaacgtgcgctggatcgtccggaagctaacagggtatagcctcgccgatagttttgggcgtgcgggctatctcgtagtggcacctgatctgttcaatgggacacccgctccagcagacatagacaaaccgtcgtcaacgttcaacacaactgcgttccttgaggaccatggtcccgacgtaaccgatccactcattgagacgaccattgactacctgcgaacgacgcgaaacatctctcggatcgcgacaacgggatactgctttggcgggcgatatgcattccggatgcttgcggcaggcagaggagtagatgttgggttcactgcgcatccgagtctgctcgaggatggcgaaatcgaggcaattactggccctgtcagcgttgcggctgcggaaacagacagcatgatgccgcctgagagacgtgctcaagtcatggcattattgctgaacacgacacagccgtacatgatgtctctgtacggtgggacgtctcatggttttggagtcagtgccaacatatcagacccgagacagaaatttggtaaggaagatgcatttttgcaggctgtaaaatggtttgatacatggctttgagaggctagagatttgatatcaatgaaatagttcgggtggtgtggtgctagaagggaaagtgtgatggagtatcataacgagtgcattttgttcctgtgcgcgtggtaatcattcggacttgagattttttttataggattttcaattcgttttctttgactatccaagctgaaatagaaagtgcgcggtcctatgagcgtgatcttgatcgggttgatcccttatgtgtgtcagtaaggcgcatggtctgattggcgggtgccctattatagggtttcattgcatttcgaagtaccaatcagatcgaagtcgtctcatcctgacatccatcgacctggtattatcatgcaattgtgtttgcctgcttgactggacaattcattaggataagtgtagtatgggcagatcagctgtaacccatctggtcgtcaagcatgtgccacagctcctgtgttgggccacggaagctgtctggaggtggcatcatctgatcatagctctcttgctccggcatcaacgtaaagaactggttccagaagccaaaggagtccggaatgttctcaaacggcacgaaatgatcaacagcgtccaccataactggctcgcttggctgactcattggattcgtgactggttcactgggtggaggaatgtccttgggcggctctccatgcccattctgatatgcttgtggtttcataacatcggtc

SEQ ID NO: 10154 - DNA, 2169 bp, Muscodor strobelii
  misc_feature: SGI cDNA ID NO. 563209
  misc_feature: Encodes the peptide sequence at SEQ ID NO 10155
atgaagcgcaaaacgcctgctgatcccccgccgcccgagtcgcaacggagtcgacggcagccccagacatcatgtctcaattgtaggctgaagaaactcaaatgtgaccgagggacgccttgctcgtcctgccatgtccgcggcatcacctgcaccggccagccgggggcggcccccgcgcccatggtgccccaatacaataccaacatctctatccccgacgtgtccatcctgtcgagattggacaaattagagaaggccgtgttcggtgctggcaatcgtcatgggcccaaccaggacctcgtttcaggaagagtgaaacccaactcaacgagtccctcatacccagcgaccaacagcaccaccacgccgccttctccggcgcaataccaggatacggaacgtcaacagacggttgctttcctggacagaacatatacaaagaatgtccaccacgtgagcatgagcacgatgattgacagcgaggacgagcaggttgctacgccccgattcgacaggctatcttttcaaattgctccggcttcttctcattatgcgcttctttcgcatgatgtttcccttcgaaaacacttaagccgcaaggcactcatcatgacccagcaggaggctctagaactactccgtgatttccttgacaatcccttccatctcatgcccataatctacgagccagctgcacgtaacatgataatcaatttctacgcgcagttggcgcagggcagagatgtagatccatccaccgcagccttgattctaagtatagcttcctgtagcgcctccttttacaaccagaatagtgcgatataccactattttgcgtcgaccgatgaggctaccgatgtctctatctcatggcgagactcggcactgctcatactcgacgatcctgatcgtcaccttagtgagagtctggaagaagttcaggcccgggcgatcattgcttatatggtgttgaatgtggagggctgttcagctcgtttcagattactacatgcttccgaaattgctgtggcacgcgacatgtcgctgcatcttgtagacagcccagctcggcaggatgcgtcagatgactgcataacaagagagataaagaggagactctggtggcacattgcatcgacagattggctgcttggcatggtgggtgggcctcttgatggtacctacagcgtacaggcgcgccactgcaacgtcaagcgtcctaggaatctgaacgacagcgatctgaaagagcatgaggagactctgacctacccggcgaacacgcccactgagatgtcctccttcatccagcggatacgtctcagcgagattgtaagagatgccatagatgcccgagacccgtggtgcccagatattgagattaccgacttcgatactgtcaccagcctggatcgcctgttcgagcaggccttggcagatatgccccctttccaaaagaggactggccctatccctgctggcgctcctactctcttcgctcagcaacgagatatgatcatcctcgccttccatgcccgaagagcgagacttcaccgaacattcttaatcaacaacagcgacgatccacgctgcgaaccggctcgccaacagtgcgtcacctcggctcgcaccacgctagccatcgctattgaactcctagaaggcacaaatgccgcggaacatgctatccatgcggggctcactgggacccatacaacgcccggtggcaccgtaatacatcctggggatgccgcttctaccgaattccaagcggagatgaatgctaagatcagccgggctactcgtgcccttactcaggctggcgagaagtcatctttcgcagcgacgctagttcgcaatctcaccgatgttatgaaaccacaagcatatcagaatgggcatggagagccgcccaaggacattcctccacccagtgaaccagtcacgaatccaatgagtcagccaagcgagccagttatggtggacgctgttgatcatttcgtgccgtttgagaacattccggactcctttggcttctggaaccagttctttacgttgatgccggagcaagagagctatgatcagatgatgccacctccagacagcttccgtggcccaacacaggagctgtggcacatgcttgacgaccagatgggttacagctga

SEQ ID NO: 10155 - protein, 722 aa, Muscodor strobelii
  misc_feature: SGI Peptide ID NO. 563209
  misc_feature (23)..(61): Pfam Id: PF00172 Pfam Desc: Fungal Zn(2)-Cys(6) binuclear cluster domain
  misc_feature (23)..(52): Pfam Id: PF00172 Pfam Desc: Fungal Zn(2)-Cys(6) binuclear cluster domain
  misc_feature (74)..(555): NCBI GI: 145604573 Blast Desc: MGG_07800 [Magnaporthe grisea 70-15] gi|145012575|gb|EDJ97229.1| MGG_07800 [Magnaporthe grisea 70-15]
  misc_feature (1)..(555): NCBI GI: 116181420 Blast Desc: CHGG_01338 [Chaetomium globosum CBS 148.51] gi|88185635|gb|EAQ93103.1| CHGG_01338 [Chaetomium globosum CBS 148.51]
  misc_feature (32)..(627): NCBI GI: 258575153 Blast Desc: [Uncinocarpus reesii 1704] gi|237902024|gb|EEP76425.1| [Uncinocarpus reesii 1704]
  misc_feature (16)..(627): NCBI GI: 115385222 Blast Desc: [Aspergillus terreus NIH2624] gi|114196850|gb|EAU38550.1| [Aspergillus terreus NIH2624]
  misc_feature (207)..(632): NCBI GI: 238498020 Blast Desc: conserved [Aspergillus flavus NRRL3357] gi|220693519|gb|EED49864.1| conserved [Aspergillus flavus NRRL3357]
  misc_feature (2)..(547): NCBI GI: 145251423 Blast Desc: An15g06980 [Aspergillus niger] gi|134082759|emb|CAK48533.1| protein product [Aspergillus niger]
  misc_feature (16)..(560): NCBI GI: 256729215 Blast Desc: NECHADRAFT_47519 [Nectria haematococca mpVI 77-13-4]
  misc_feature (207)..(655): NCBI GI: 242806361 Blast Desc: conserved [Talaromyces stipitatus ATCC 10500] gi|218715353|gb|EED14775.1| conserved [Talaromyces stipitatus ATCC 10500]
  misc_feature (16)..(659): NCBI GI: 46116948 Blast Desc: FG04316.1 [Gibberella zeae PH-1]
  misc_feature (209)..(549): NCBI GI: 67903038 Blast Desc: AN8506.2 [Aspergillus nidulans FGSC A4] gi|40747694|gb|EAA66850.1| AN8506.2 [Aspergillus nidulans FGSC A4] gi|259484459|tpe|CBF80697.1| TPA: Zn(II)2Cys6 transcription
MKRKTPADPPPPESQRSRRQPQTSCLNCRLKKLKCDRGTPCSSCHVRGITCTGQPGAAPAPMVPQYNTNISIPDVSILSRLDKLEKAVFGAGNRHGPNQDLVSGRVKPNSTSPSYPATNSTTTPPSPAQYQDTERQQTVAFLDRTYTKNVHHVSMSTMIDSEDEQVATPRFDRLSFQIAPASSHYALLSHDVSLRKHLSRKALIMTQQEALELLRDFLDNPFHLMPIIYEPAARNMIINFYAQLAQGRDVDPSTAALILSIASCSASFYNQNSAIYHYFASTDEATDVSISWRDSALLILDDPDRHLSESLEEVQARAIIAYMVLNVEGCSARFRLLHASEIAVARDMSLHLVDSPARQDASDDCITREIKRRLWWHIASTDWLLGMVGGPLDGTYSVQARHCNVKRPRNLNDSDLKEHEETLTYPANTPTEMSSFIQRIRLSEIVRDAIDARDPWCPDIEITDFDTVTSLDRLFEQALADMPPFQKRTGPIPAGAPTLFAQQRDMIILAFHARRARLHRTFLINNSDDPRCEPARQQCVTSARTTLAIAIELLEGTNAAEHAIHAGLTGTHTTPGGTVIHPGDAASTEFQAEMNAKISRATRALTQAGEKSSFAATLVRNLTDVMKPQAYQNGHGEPPKDIPPPSEPVTNPMSQPSEPVMVDAVDHFVPFENIPDSFGFWNQFFTLMPEQESYDQMMPPPDSFRGPTQELWHMLDDQMGYS

SEQ ID NO: 10156 - DNA, 7828 bp, Muscodor strobelii
  misc_feature: SGI EST ID NO. CUFF.24640.1
  misc_feature: Variant of the nucleotide sequence at SEQ ID NO 10154
cgcctagtgtcctacctttttggcctcaggatctgacaagagcagatggtaactttgggcgagattgggtgcaggtgaagactcgaggagatacgagaacccaacacatgtcggatgatccacggagtgatttccctcggactgtcgacctcacgcacgagactccattgcttgcgcgggagcacgcatcggctggtcgcactgacttccggttctccgcggcagccggagtgtaacgcttgtcgacgcttaacgcgttgggagcgcgctaaaaatacaccagtatgaagcgcaaaacgcctgctgatcccccgccgcccgagtcgcaacggagtcgacggcagccccagacatcatgtctcaattgtaggctgaagaaactcaaatgtgaccgagggacgccttgctcgtcctgccatgtccgcggcatcacctgcaccggccagccgggggcggcccccgcgcccatggtgccccaatacaataccaacatctctatccccgacgtgtccatcctgtcgagattggacaaattagagaaggccgtgttcggtgctggcaatcgtcatgggcccaaccaggacctcgtttcaggaagagtgaaacccaactcaacgagtccctcatacccagcgaccaacagcaccaccacgccgccttctccggcgcaataccaggatacggaacgtcaacagacggttgctttcctggacagaacatatacaaagaatgtccaccacgttgctacgccccgattcgacaggctatcttttcaaattgctccggcttcttctcattatgcgcttctttcgcatgatgtttcccttcgaaaacacttaagccgcaaggcactcatcatgacccagcaggaggctctagaactactccgtgatttccttgacaatcccttccatctcatgcccataatctacgagccagctgcacgtaacatgataatcaatttctacgcgcagttggcgcagggcagagatgtagatccatccaccgcagccttgattctaagtatagcttcctgtagcgcctccttttacaaccagaatagtgcgatataccactattttgcgtcgaccgatgaggctaccgatgtctctatctcatggcgagactcggcactgctcatactcgacgatcctgatcgtcaccttagtgagagtctggaagaagttcaggcccgggcgatcattgcttatatggtgttgaatgtggagggctgttcagctcgtttcagattactacatgcttccgaaattgctgtggcacgcgacatgtcgctgcatcttgtagacagcccagctcggcaggatgcgtcagatgactgcataacaagagagataaagaggagactctggtggcacattgcatcgacagattggctgcttggcatggtgggtgggcctcttgatggtacctacagcgtacaggcgcgccactgcaacgtcaagcgtcctaggaatctgaacgacagcgatctgaaagagcatgaggagactctgacctacccggcgaacacgcccactgagatgtcctccttcatccagcggatacgtctcagcgagattgtaagagatgccatagatgcccgagacccgtggtgcccagatattgagattaccgacttcgatactgtcaccagcctggatcgcctgttcgagcaggccttggcagatatgccccctttccaaaagaggactggccctatccctgctggcgctcctactctcttcgctcagcaacgagatatgatcatcctcgccttccatgcccgaagagcgagacttcaccgaacattcttaatcaacaacagcgacgatccacgctgcgaaccggctcgccaacagtgcgtcacctcggctcgcaccacgctagccatcgctattgaactcctagaaggcacaaatgccgcggaacatggtcaaggcaccaaaatccactcgcatatcgcgttggtctcatcatcagctctatgttcatggcttgcgccatcctagctatccatgcggggctcactgggacccatacaacgcccggtggcaccgtaatacatcctggggatgccgcttctaccgaattccaagcggagatgaatgctaagatcagccgggctactcgtgcccttactcaggctggcgagaagtcatctttcgcagcgacgctagttcgcaatctcaccgatgttatgaaaccacaagcatatcagaatgggcatggagagccgcccaaggacattcctccacccagtgaaccagtcacgaatccaatgagtcagccaagcgagccagttatggtggacgctgttgatcatttcgtgccgtttgagaacattccggactcctttggcttctggaaccagttctttacgttgatgccggagcaagagagctatgatcagatgatgccacctccagacagcttccgtggcccaacacaggagctgtggcacatgcttgacgaccagatgggttacagctgatctgcccatactacacttatcctaatgaattgtccagtcaagcaggcaaacacaattgcatgataataccaggtcgatggatgtcaggatgagacgacttcgatctgattggtacttcgaaatgcaatgaaaccctataatagggcacccgccaatcagaccatgcgccttactgacacacataagggatcaacccgatcaagatcacgctcataggaccgcgcactttctatttcagcttggatagtcaaagaaaacgaattgaaaatcctataaaaaaaatctcaagtccgaatgattaccacgcgcacaggaacaaaatgcactcgttatgatactccatcacactttcccttctagcaccacaccacccgaactatttcattgatatcaaatctctagcctctcaaagccatgtatcaaaccattttacagcctgcaaaaatgcatcttccttaccaaatttctgtctcgggtctgatatgttggcactgactccaaaaccatgagacgtcccaccgtacagagacatcatgtacggctgtgtcgtgttcagcaataatgccatgacttgagcacgtctctcaggcggcatcatgctgtctgtttccgcagccgcaacgctgacagggccagtaattgcctcgatttcgccatcctcgagcagactcggatgcgcagtgaacccaacatctactcctctgcctgccgcaagcatccggaatgcatatcgcccgccaaagcagtatcccgttgtcgcgatccgagagatgtttcgcgtcgttcgcaggtagtcaatggtcgtctcaatgagtggatcggttacgtcgggaccatggtcctcaaggaacgcagttgtgttgaacgttgacgacggtttgtctatgtctgctggagcgggtgtcccattgaacagatcaggtgccactacgagatagcccgcacgcccaaaactatcggcgaggctataccctgttagcttccggacgatccagcgcacgttcgacgcacagcttgttttcgagttcctgtatgccaaatacgtttgtcagctctcggctcgtatcattcaccatgatctcgttccggctcgcatactcccattgtggacttcttccgtcccgactgggtcaccagagtgcgcgatgattgatacatcgcagtcatcacgttttgcactcctagccacgacgaaactcgtgcaccaaagagcaagaagggacgcgactttcagcatattcgcggtgggtaggacaatggtggttttagtgaaattaaatcatggaagacaatattcagagtgtgcaaggtacatatgtcaaacaaaacccattagatttcatatacatattttcaaatttgacacaatatacataccccaaaactttgaatttttacactgcatactgccgaggaaaaagccgtcagaacggaggcttcgtgaacgtctgccaagatataaccggtcggcgataggcagaatacacaggcaagacctccctccgttgctccgcgcaaacctctatattgcctatccagaaattccaaagcgctggtatatgactcaacaaatggaaaggtatcatagcgtctttctctgctatgacccacttgaagcgttcaattgatatacaatgagagctgacatagaagatatacgccccgaatcccacctactccaatatgtacaataacatcaaataacacccgtcccgacccctcgtctccacactctctcgaggctcatcaactactcaacaaaaacccaacaacaacagcgataatcaacaatagcacggcgtgtataagcgagaaaccaccccaacagagcacacaattagcgtaatccagaaacttcgaattcggcttcgaccattgcatcagattgctgtagaactcgtacccgaataggctctcgacatagcgctggaacattgttcgtttgggcggtggtactgattcctgtgcagcacattagttcgcgtcgcattccattttcttatctcgacatcttcttatcgtgtgactaaaagtcgcctccgggtgatatccatacctcaacgatggtatatacatcatatgcaagcacatcagcctcccagtctaacttgctacaatgatgcttgaatgcatcgacgagagtggtgaatgtagcgcgatggagttctatgccgcgccagaggaatttttgtccgtccgatgcgtcgagtcctcggtaggcgaggtaggttgagaaccagtcgcgaacctgggttggtgaggcttggagtcctggacaggattgaatgatctcttgccgggttggtgctgttgcgtacattttgggtgcgagttgggtgtgtggtggacgagggttagtcatggtgaggggatttgcacgggtcgtgctatggtggatgccatgatcgtgactcaattgctgagatcgggtctgagttattcttcatggtgatgcacaaggcacgtggagatgctattgtgttggcttattgttatttgtctctttatgatgagtctcgatgcggtatcgcgacaaagataggaatgaaatatcaagatcacaataggatcacaataggtaagcttgcttagacttggacattggacaaagagagtctggtccaagggacgaccagacagtgtcatgtctaaaaatctaacttgatggaaagccaccttctcacaatggtaacatgtggtcctcaggaagtataatcaaattctcaataaactgttcatttcaacccatctagtggtatattgcaatatgtgtattaataatcaaactacattgagccatcaatccattgctgctcagataaaccagcttcctcatacggcattcctgacaagacgctatcgaaaaacgccgcgtccactccttggaacgcgtagtcgctgacgccagccgctattgagggcgacagattgatgttgtcattaaaagaaggaatacattgtgtgtcggccgggtctccattagtcggcaatgcacctaactctttccttattggtgattggggtgacactgcattgttagcattgtgaaatgactcgagagagatagcccccaatctagcaatcctgataataccgagaaacggaactggcaagcgaagtgcttcattattttgatcttgatctttggcttcattgccgtccatcgcagtattaacatgcacggagacattctcagtggagtaggttgctccattagctgcatcctcctcgatctccagtaagcgacgaaccaggactgcacttttggtggttattggatcgtcattcatgttactgatcgcatccatcctttccaatgcctggtccagcaatgcgcggtcactgagccgatgatgggcgaggtaattgggagtatctggatgatggtgtgtatccagatgagcaagtaaaagcgtcatgctggcaataagcgcgatgaagtctacaggtctcgagcaagatgaaagagggttgaaggttcgatgtgttatgaaacgtgtcatgatttcacgacttgcattgacgcaagtgactttagaatatgcatcgcctgtcctattgccgaaatctatgaggaagggaagatggaggtgaattaatagaccgtagtagttgacatgagccactaaccggaccgtctcaagcaacgactcagcggaccctggaacttgattgtgaaaatttgccggacgccaaaaacttgtcggcatattctttgctaccatcaacaattctgcgtcaatagactgggtactagcaatgtcgttgatagacgtcgagtcttcattacggtccaacacatgtgatgcgatgacagtcagttgtctttcaaattgaccgagtggcggttcaccaagtaaggccgatggcgctccgatacttctgtcgtgggagccctgaggtagtccaagcatgaggcacaaatatcgatccatgtagacaatacggtaccacaagaatgcaggcttgacatcgagtgtcggatcgatgcgcttcagagcgggaacgggtgcccgagaacggtgtaaacccatcagctgtgctacagacatggccctgcggaatgctagccacgagcggcgaagattaccgctgttggcttcatatactccttctaacatgatgcatatcaggccatcaacggttccctgcatatgttctttcgtcgttacccatgtcgttgctgcatcgactaagcgatgcatcagtgggtcaagcggctcggaaagaactgccagattttctcgagccgggctttgtaaagtaagcgcaaagagaagcatctgcttggcgagaattacgggatgagtgtgaggaccaggagcctctgtatttgagatatgtgccgtgagcctctcgtatgtcagctcactgtatggttgagtattgagtaagagagcatataatgctggtatcaagctctcttgaagcaacagcctgacatcgtgatcagaaggaagagcctttaataattgaacagtagttgaatcggtcgtctcgttgatgctgttactgtctgcagcaagacatgacggtgggtttgggctatggttctgaagactctgagacgaggtaagtcgggtatttcggatgttggaatgcgagttttatgggttcttcacctcaggagagactggaagttgtgcattcaccggagtcagttcggtatgatatgcggttgaggcgacttgaccagctaggaagttttccatgaagtcttctacccttgaaatgcgatggcccaaatgtcgattcccgagccgtgccggagctagatgttcgggcagctcttgcgagacacatggtgtccgtcgttgctggcagccaaggcaatttgcattctcatcttcagcatctgtgaagatacattttgctttccttcttttacattcccaacacgaccgagttcctttgcgaacctttctccgcttcggtggcattcgtccgtcgtcagaagacatcaccgcgatattttgtgtgggtttctgctgcaatcgtcgcggtcctgtgacaatcgaaaattatcgttagatttcgcttaaagattctacacggcggaaatcatcgtactgcaccgcaactggtatgaagccatcaagtcgtttgtaataacttcgtatctccgccgccacggcgctacgatggcgctacgacctcaatacatcacggccaattgacagggggctatctccactaccaatcacccacgtcgttagtggaaagcccctaggctcgctgatgtcagtacctaaattccaccttcgccgccacggcgggataaaatcaaggcttgctggcgtagtcaagctatactcaaagcgttatagaatgaattcg

SEQ ID NO: 10157 - DNA, 1296 bp, Muscodor strobelii
  misc_feature: SGI cDNA ID NO. 563210
  misc_feature: Encodes the peptide sequence at SEQ ID NO 10158
atggcacctcacccacgtgccaagccgccggaggactatgacagtttccgatcatggcttgcagttgcaggtgcatcgctagtattatactgcactaatgggtttattaacgcttttggcgtctatgaggaatactacgcaactggtctcttgaaagaatatactgaatcagacatatcatggattggttcagtctctatctttctgctctatctggggtcgcccatagctggtgtcttgactgatagagtaggggctacaatcttgctcactattggcagtattggccagctactcgcgatattcctatcatcgctatgtactcagtactaccagctatttcttgcacaagcagttctcctcggggcaagtatgtccttgagttttgcacctagtattgcagttgtttcacgtcgaatgcctcatcgccgcggacttgcactagggtttgttatcggaggggcttcgatcggcggtttgatatggcccatcatgctggagcaacttctctatgccaacgacatcggctttgcgtggacccagcgagctgtgggatttgtcatgttaccattgttgggaatagcctgcctcacagttgtggatgtgccagttcaaacattgtcgacagcttcggtagaacctgcccggatttctaataagggtgaagactctgtcccacaaaatgaccggacgccgaaaacacagcatccgatcatagccgtgatgaagaacacaacattttccctgctttgctgcgggctctttgtcacataccttggcttcttcactccgttcttctacatttcttcgtatgcggtagccagaggcatctcttcttcgaccgggttttacctcatttcagcccttaatggtgcatctttcttcggacgagtccttcctggtcatctagcagatacttatggccacttcaatgttctaacagtgtcaatcctgctatcaggagtgattgggctgacgtggacagcggcttttaatttgcccgggatggtcatctggacgattgcttatggattcacttcaggtactgtgatcagtctccagagcgcatgcgcaggtaagatatcagggcgtgaacaccaaggcacagcagttggtctgttaccagggacattatccatacccggtctgataggaacacccgtcagcggacagattctgcttcagagcgggtatttaggattgtcgattttcacgggcattacaatcctcgctggtggcgtcatcttactgataacgagattgaaggcagatcgacgccttttggccaacatttga

SEQ ID NO: 10158 - protein, 431 aa, Muscodor strobelii
  misc_feature: SGI Peptide ID NO. 563210
  misc_feature (21)..(386): Pfam Id: PF07690 Pfam Desc: Major Facilitator Superfamily
  misc_feature (17)..(428): NCBI GI: 145604575 Blast Desc: MGG_07802 [Magnaporthe grisea 70-15] gi|145012576|gb|EDJ97230.1| MGG_07802 [Magnaporthe grisea 70-15]
  misc_feature (7)..(425): NCBI GI: 70989996 Blast Desc: MFS monocarboxylate transporter [Aspergillus fumigatus Af293] gi|66847479|gb|EAL87809.1| MFS monocarboxylate transporter, [Aspergillus fumigatus Af293]
  misc_feature (5)..(430): NCBI GI: 115385228 Blast Desc: conserved [Aspergillus terreus NIH2624] gi|114196853|gb|EAU38553.1| conserved [Aspergillus terreus NIH2624]
  misc_feature (5)..(428): NCBI GI: 238500948 Blast Desc: MFS monocarboxylate transporter, [Aspergillus flavus NRRL3357] gi|220691945|gb|EED48292.1| MFS monocarboxylate transporter, [Aspergillus flavus NRRL3357]
  misc_feature (1)..(431): NCBI GI: 119473981 Blast Desc: MFS monocarboxylate transporter, [Neosartorya fischeri NRRL 181] gi|119407019|gb|EAW16969.1| MFS monocarboxylate transporter, [Neosartorya fischeri NRRL 181]
  misc_feature (17)..(428): NCBI GI: 169781140 Blast Desc: [Aspergillus oryzae RIB40] gi|83773775|dbj|BAE63900.1| protein product [Aspergillus oryzae]
  misc_feature (8)..(431): NCBI GI: 240110512 Blast Desc: Major Facilitator Superfamily protein [Coccidioides posadasii C735 delta SOWgp]
  misc_feature (17)..(431): NCBI GI: 121712142 Blast Desc: MFS monocarboxylate transporter, [Aspergillus clavatus NRRL 1] gi|119401838|gb|EAW12260.1| MFS monocarboxylate transporter, [Aspergillus clavatus NRRL 1]
  misc_feature (5)..(397): NCBI GI: 255938508 Blast Desc: Pc14g00290 [Penicillium chrysogenum Wisconsin 54-1255] gi|211584645|emb|CAP74170.1| Pc14g00290 [Penicillium chrysogenum Wisconsin 54-1255]
  misc_feature (15)..(374): NCBI GI: 258575151 Blast Desc: [Uncinocarpus reesii 1704] gi|237902023|gb|EEP76424.1| [Uncinocarpus reesii 1704]
MAPHPRAKPPEDYDSFRSWLAVAGASLVLYCTNGFINAFGVYEEYYATGLLKEYTESDISWIGSVSIFLLYLGSPIAGVLTDRVGATILLTIGSIGQLLAIFLSSLCTQYYQLFLAQAVLLGASMSLSFAPSIAVVSRRMPHRRGLALGFVIGGASIGGLIWPIMLEQLLYANDIGFAWTQRAVGFVMLPLLGIACLTVVDVPVQTLSTASVEPARISNKGEDSVPQNDRTPKTQHPIIAVMKNTTFSLLCCGLFVTYLGFFTPFFYISSYAVARGISSSTGFYLISALNGASFFGRVLPGHLADTYGHFNVLTVSILLSGVIGLTWTAAFNLPGMVIWTIAYGFTSGTVISLQSACAGKISGREHQGTAVGLLPGTLSIPGLIGTPVSGQILLQSGYLGLSIFTGITILAGGVILLITRLKADRRLLANI

SEQ ID NO: 10159 - DNA, 1213 bp, Muscodor strobelii
  misc_feature: SGI EST ID NO. CUFF.24677.0
  misc_feature: Variant of the nucleotide sequence at SEQ ID NO 10157
tggcagtattggccagctactcgcgatattcctatcatcgctatgtactcagtactaccagctatttcttgcacaagcagttctcctcggggcaagtatgtccttgagttttgcacctagtattgcagttgtttcacgtcgaatgcctcatcgccgcggacttgcactagggtttgttatcggaggggcttcgatcggcggtttgatatggcccatcatgctggagcaacttctctatgccaacgacatcggctttgcgtggacccagcgagctgtgggatttgtcatgttaccattgttgggaatagcctgcctcacagttgtggatgtgccagttcaaacattgtcgacagcttcggtagaacctgcccggatttctaataagggtgaagactctgtcccacaaaatgaccggacgccgaaaacacagcatccgatcatagccgtgatgaagaacacaacattttccctgctttgctgcgggctctttgtcacataccttggcttcttcactccgttcttctacatttcttcgtatgcggtagccagaggcatctcttcttcgaccgggttttacctcatttcagcccttaatggtgcatctttcttcggacgagtccttcctggtcatctagcagatacttatggccacttcaatgttctaacagtgtcaatcctgctatcaggagtgattgggctgacgtggacagcggcttttaatttgcccgggatggtcatctggacgattgcttatggattcacttcaggtactgtgatcagtctccagagcgcatgcgcaggtaagatatcagggcgtgaacaccaaggcacagcagttggtctgttaccagggacattatccatacccggtctgataggaacacccgtcagcggacagattctgcttcagagcgggtatttaggattgtcgattttcacgggcattacaatcctcgctggtggcgtcatcttactgataacgagattgaaggcagatcgacgccttttggccaacatttgatcgtaatcaacgggagagaacgtgttgaattgccactttgcctgtacatccgaaattttcgctttctgcgactcataaataccccataaagacggattcggtatcctactataattaaacctaagcttgtgtaagtcaacttattaccatgggagtccacgctcagagatagacaatagaaccttgcccaaa

SEQ ID NO: 10160 - DNA, 801 bp, Muscodor strobelii
  misc_feature: SGI cDNA ID NO. 563211
  misc_feature: Encodes the peptide sequence at SEQ ID NO 10161
atggcggaaaggtttcagataggatggtatcggttcatacctttcctcggctatcatcatgtgttgatgatcttgatagcagtcacaatcatattgttatcactattattagcaggctgctcctcctcctcgccgctaatccccagcatcttcctcctctccatatactacaagcactacaccgcgcaccccgacaccgcacaagtcgactacaatgtcaacatcgccatctctaacatcgtcggcgacgcacgactgcaagcccgcgtgggctacttcggcatctgcatcaacccggacggcggttcgtggctatgctccaataacgcgacggcgctcgccaatgagattacagtcgatcaggacccgctgaatctcatttggcttgcaggacagttcaaggatatgattgtgtttccctacctcatcatcatcgccatcatctttgcgttcgtgtgcttcctactgttagccacgttcccaggttggcacgaggaggaagacagcgagggatcggagagagagatcaagccctttcctagcagacccgtctcccagatcgcgctcgccatcattttcatcgcgtcgattttcgtgctggtttcggtgctttggcagcatacggcgagtgtggcggcttcgatcattgcgcaagacttcggaaatggtagtgtcaagtctggagtcggcacaagtgcgatcgtcatgggttggtttagttttgcgctgctcatcatcgtcacgattggattgctcgtcatgatattgagtatcagggttttgacgcaactcgcggattga

SEQ ID NO: 10161 - protein, 266 aa, Muscodor strobelii
  misc_feature: SGI Peptide ID NO. 563211
  misc_feature (1)..(258): NCBI GI: 171679641 Blast Desc: protein product [Podospora anserina] gi|170939446|emb|CAP64674.1| protein product [Podospora anserina]
  misc_feature (4)..(266): NCBI GI: 261355100 Blast Desc: conserved [Verticillium albo-atrum VaMs.102]
  misc_feature (1)..(265): NCBI GI: 145610815 Blast Desc: MGG_11474 [Magnaporthe grisea 70-15] gi|145018169|gb|EDK02448.1| MGG_11474 [Magnaporthe grisea 70-15]
  misc_feature (3)..(264): NCBI GI: 46123849 Blast Desc: FG06302.1 [Gibberella zeae PH-1]
  misc_feature (1)..(264): NCBI GI: 85093136 Blast Desc: NCU02219 [Neurospora crassa OR74A] gi|28921078|gb|EAA30396.1| conserved [Neurospora crassa OR74A]
  misc_feature (13)..(264): NCBI GI: 256732930 Blast Desc: [Nectria haematococca mpVI 77-13-4]
  misc_feature (1)..(263): NCBI GI: 154308609 Blast Desc: BC1G_07727 [Botryotinia fuckeliana B05.10] gi|150852678|gb|EDN27870.1| BC1G_07727 [Botryotinia fuckeliana B05.10]
  misc_feature (1)..(266): NCBI GI: 169767644 Blast Desc: [Aspergillus oryzae RIB40] gi|238484553|ref|XP_002373515.1| conserved [Aspergillus flavus NRRL3357] gi|83766148|dbj|BAE56291.1| protein product oryzae]
  misc_feature (33)..(263): NCBI GI: 156050701 Blast Desc: SS1G_07938 [Sclerotinia sclerotiorum 1980] gi|154692338|gb|EDN92076.1| SS1G_07938 [Sclerotinia sclerotiorum 1980]
  misc_feature (19)..(266): NCBI GI: 116203473 Blast Desc: CHGG_09620 [Chaetomium globosum CBS 148.51] gi|88175748|gb|EAQ83216.1| CHGG_09620 [Chaetomium globosum CBS 148.51]
MAERFQIGWYRFIPFLGYHHVLMILIAVTIILLSLLLAGCSSSSPLIPSIFLLSIYYKHYTAHPDTAQVDYNVNIAISNIVGDARLQARVGYFGICINPDGGSWLCSNNATALANEITVDQDPLNLIWLAGQFKDMIVFPYLIIIAIIFAFVCFLLLATFPGWHEEEDSEGSEREIKPFPSRPVSQIALAIIFIASIFVLVSVLWQHTASVAASIIAQDFGNGSVKSGVGTSAIVMGWFSFALLIIVTIGLLVMILSIRVLTQLAD

SEQ ID NO: 10162 - DNA, 1974 bp, Muscodor strobelii
  misc_feature: SGI EST ID NO. CUFF.23966.0
  misc_feature: Variant of the nucleotide sequence at SEQ ID NO 10160
gctgcatcatcactttcaatgatcgtctccagtctgcaaacttggatgctgcatgtgtgcctgcctacctctctgaataatctcctgcatcttccatcctccagagatttggagtttgattcaatcttcgatcactgacaaataagcccacctttacaacaacaacatcaccgactttgacaaacaaaattgaacaacttcgaagtgccactgcggaaacgaagactagaattcctgttgacaaaccgctcatatcccgtaacaggttctttcttcattccagccagctttgtcattccttgtgactgcaaagcaatctgatcttcctaagttacaataccgtcatccacatacctcccacaccaccacataccatcacatcacccccattgctgagggcactattgatctgacagacacattgcaagacccgagatcttcggcgccgaccgcattccacgatctcgttacatcatcgttgcgaccgcccacggccacataccagcacctgctgctgtgtgcgctcccgcagaccacaccgtcgctcccagggaggacggaggtggattgagagacactgagtcagactaggacgacccggggagtacacatcacacacactctagaatggcggaaaggtttcagataggatggtatcggttcatacctttcctcggctatcatcatgtgttgatgatcttgatagcagtcacaatcatattgttatcactattattagcaggctgctcctcctcctcgccgctaatccccagcatcttcctcctctccatatactacaagcactacaccgcgcaccccgacaccgcacaagtcgactacaatgtcaacatcgccatctctaacatcgtcggcgacgcacgactgcaagcccgcgtgggctacttcggcatctgcatcaacccggacggcggttcgtggctatgctccaataacgcgacggcgctcgccaatgagattacagtcgatcaggacccgctgaatctcatttggcttgcaggacagttcaaggatatgattgtgtttccctacctcatcatcatcgccatcatctttgcgttcgtgtgcttcctactgttagccacgttcccaggttggcacgaggaggaagacagcgagggatcggagagagagatcaagccctttcctagcagacccgtctcccagatcgcgctcgccatcattttcatcgcgtcgattttcgtgctggtttcggtgctttggcagcatacggcgagtgtggcggcttcgatcattgcgcaagacttcggaaatggtagtgtcaagtctggagtcggcacaagtgcgatcgtcatgggttggtttagttttgcgctgctcatcatcgtcacgattggattgctcgtcatgatattgagtatcagggttttgacgcaactcgcggattgaggtggatgaaagaatgcaacgacgagttatggagatagagagtggacgaacttgtatatggaatgggcggaacacaacacgagacacgtctcgatctgcattggggccggagtttgcaaagaatggattggttgttaagggtttgggattttacccgtcatgtcatgtttctgttgccttctacgcctgtcacgttttcccgttacgacaagtggcgtacaccttgggatacaaaaagatacatggatggggtcgataattcatgaggcaacgaccagatttgtgcatcgatgttttttttgctttcgcgcgagcgagcggacgaaatggatgagatatgtcagatgggctggatccggtttcccgttcatatcgatgttgtctgtccgtgtgtagaaaatcttgtaatcaaaaattgaggagcatttggacttgggattacttgacttgttctgttgtgaaccgtgtttgtcgccagacgtgaagcgatgactggtcgcaacgggctcagtagatagattgaataaatacttttcataatcagaa

SEQ ID NO: 10163 - DNA, 318 bp, Muscodor strobelii
  misc_feature: SGI cDNA ID NO. 563212
  misc_feature: Encodes the peptide sequence at SEQ ID NO 10164
atgagtagttccatcaacccccaggtcacggccctagtcgtcgtatccacactgctaacgtcgatctctctcgtgatcgtggctacaagatgtgtcgtccgggttggaatgatgttcaactctggcatggacgattacatgatcatagggggtcttgtgctcacaataggctaccaagcaaccctctacgtattgcaactcgatggcggcatgggcataccgttcatgactttgactcttgacgaaataagcacattcctaaaactatctggcagagttttcggaaactatgttacggcaccaacatactccttgtag

SEQ ID NO: 10164 - protein, 105 aa, Muscodor strobelii
  misc_feature: SGI Peptide ID NO. 563212
MSSSINPQVTALVVVSTLLTSISLVIVATRCVVRVGMMFNSGMDDYMIIGGLVLTIGYQATLYVLQLDGGMGIPFMTLTLDEISTFLKLSGRVFGNYVTAPTYSL

SEQ ID NO: 10165 - DNA, 453 bp, Muscodor strobelii
  misc_feature: SGI EST ID NO. CUFF.23973.0
  misc_feature: Variant of the nucleotide sequence at SEQ ID NO 10163
gccacgtcaaactctaagaataaagtttaccaaagatgacttctggtccctttttataattgagggcccttgctgatccttcgtgaaacatttgcttgactatacacagatctttctccatcactccgcaatatgagtagttccatcaacccccaggtcacggccctagtcgtcgtatccacactgctaacgtcgatctctctcgtgatcgtggctacaagatgtgtcgtccgggttggaatgatgttcaactctggcatggacgattacatgatcatagggggtcttgtgctcacaataggctaccaagcaaccctctacgtattgcaactcgatggcggcatgggcataccgttcatgactttgactcttgacgaaataagcacattcctaaaagcaacattcgctgttgaactcctgtactacggaatcgtcttcttcgtcaaatcttca

SEQ ID NO: 10166 - DNA, 1098 bp, Muscodor strobelii
  misc_feature: SGI cDNA ID NO. 563213
  misc_feature: Encodes the peptide sequence at SEQ ID NO 10167
atgaatctggaggaagaggataatgccgggagagaaatggggagggcgctcaagtctaaggttcaaggcaaaccttcagatctcgctgaccaccaattgctctgcaatgatactatgaaagcccgatttagattcgccagagcacacttgcttcccttgggcaccttggacagcgtgcaagaggctcttgaccaattccagctgatgttgaacgacaatctcgtagacaccatgagagcaagggaccaagttccattcctgatgctgcgattggatctcgatcgagaatgttatagtttcatcgaatggtgggagactaacttcaactacatttcgatcgaagttcatcctgacccttcattcctgtggaaccccgatttcagcaacagcaccgctagcttagatagtcttgtctctatgctgctgctgaaactcaagctgcttgtcgatctcgcccgcttgaaggttgcccgaaagacgatcgaacagtacgaccttcctaccgaacttcgagatgaaatcgagtcgtatctaatgcggagtcccctgtctgtcaagattcagagacagggtacgacttgtatttacgatatgagttacaagttcttgaaacacgcacgccagctgggcgccaagattgacgagtacaacccctacttcatggagacgatttttaaccctgttaatgctctcgccgagccctacgctcgtgatcccggacgcggcacgagagaggaaatggtccagacaatgaagaactcatacagcgcttggttggagacggaaggtgtgctgaaccttctaaaagacgcacgtaacctcgcgatgagagacttgactggaagcgttgacgctgtcatgaacaacgaaaagatcagagaagggcgaggggcaaagcggttgctagcagacgctagcctgaacttgatctgggattacctacgtttggctgtcctgaatattacttacttaggccctcgttctgatcagctgtttgagtggccaggcaaatggactccagaatgtggaatggcggcatggaagacacgcgccagaacgggatttcctgtccctagatcgtatcatgcagagctgtag

SEQ ID NO: 10167 - protein, 365 aa, Muscodor strobelii
  misc_feature: SGI Peptide ID NO. 563213
  misc_feature (37)..(330): NCBI GI: 256724929 Blast Desc: NECHADRAFT_77121 [Nectria haematococca mpVI 77-13-4]
  misc_feature (39)..(325): NCBI GI: 169625783 Blast Desc: SNOG_16168 [Phaeosphaeria nodorum SN15] gi|111055232|gb|EAT76352.1| SNOG_16168 [Phaeosphaeria nodorum SN15]
  misc_feature (50)..(270): NCBI GI: 169597425 Blast Desc: SNOG_01498 [Phaeosphaeria nodorum SN15] gi|111070027|gb|EAT91147.1| SNOG_01498 [Phaeosphaeria nodorum SN15]
  misc_feature (39)..(271): NCBI GI: 256725157 Blast Desc: NECHADRAFT_55208 [Nectria haematococca mpVI 77-13-4]
  misc_feature (39)..(269): NCBI GI: 169865836 Blast Desc: CC1G_08894 [Coprinopsis cinerea okayama7#130] gi|116499387|gb|EAU82282.1| CC1G_08894 [Coprinopsis cinerea okayama7#130]
  misc_feature (39)..(273): NCBI GI: 255936959 Blast Desc: Pc13g10860 [Penicillium chrysogenum Wisconsin 54-1255] gi|211584126|emb|CAP92155.1| Pc13g10860 [Penicillium chrysogenum Wisconsin 54-1255]
  misc_feature (37)..(270): NCBI GI: 116179140 Blast Desc: CHGG_00198 [Chaetomium globosum CBS 148.51] gi|88184495|gb|EAQ91963.1| CHGG_00198 [Chaetomium globosum CBS 148.51]
  misc_feature (39)..(270): NCBI GI: 225554494 Blast Desc: conserved [Ajellomyces capsulatus G186AR]
  misc_feature (39)..(272): NCBI GI: 261355370 Blast Desc: conserved [Verticillium albo-atrum VaMs.102]
  misc_feature (36)..(286): NCBI GI: 256730423 Blast Desc: NECHADRAFT_82905 [Nectria haematococca mpVI 77-13-4]
MNLEEEDNAGREMGRALKSKVQGKPSDLADHQLLCNDTMKARFRFARAHLLPLGTLDSVQEALDQFQLMLNDNLVDTMRARDQVPFLMLRLDLDRECYSFIEWWETNFNYISIEVHPDPSFLWNPDFSNSTASLDSLVSMLLLKLKLLVDLARLKVARKTIEQYDLPTELRDEIESYLMRSPLSVKIQRQGTTCIYDMSYKFLKHARQLGAKIDEYNPYFMETIFNPVNALAEPYARDPGRGTREEMVQTMKNSYSAWLETEGVLNLLKDARNLAMRDLTGSVDAVMNNEKIREGRGAKRLLADASLNLIWDYLRLAVLNITYLGPRSDQLFEWPGKWTPECGMAAWKTRARTGFPVPRSYHAEL

SEQ ID NO: 10168 - DNA, 202 bp, Muscodor strobelii
  misc_feature: SGI EST ID NO. CUFF.23990.0
  misc_feature: Variant of the nucleotide sequence at SEQ ID NO 10166
cgctcgtgatcccggacgcggcacgagagaggaaatggtccagacaatgaagaactcatacagcgcttggttggagacggaaggtgtgctgaaccttctaaaagacgcacgtaacctcgcgatgagagacttgactggaagcgttgacgctgtcatgaacaacgaaaagatcagagaagggcgaggggcaaagcggttgcta

SEQ ID NO: 10169 - DNA, 1068 bp, Muscodor strobelii
  misc_feature: SGI cDNA ID NO. 563214
  misc_feature: Elevated expression when VOC is produced
  misc_feature: Encodes the peptide sequence at SEQ ID NO 10170
atgttcaaaggaccagcgcccgcgaaagtttcacatgtgagccacgatgatgccagggtcgaaggtcgattgtacgaccttggcagtgtgtcaccaaagacccgatcatacaaaattagaagcatcaagcgcttaggcaagagggttatattcaaggagaagtacgatggatgggaactggtcatattcagagccgaaccattgaaacccatggccgagatggcgcaggtgaaagcttcgccttcagccaataagagcaagacgcagggcttgatttcaaacgatcaaaaagagatcaacgctcgccgaaaaccaaagtcaaactataagcgtgaatcggatcgactacgtcagcgtgatagacgcattgcaaaacgtaatctaccgcaacaatccctgaccacgaaaagcgccatgtcgaaatctcaagaacaaacaaacaattccgagcagccctcgcctgcagccattgaagatctacaccccgtgaagcttgatgatacgacatcgagtatgcttgttcttctacacctagcgttcagcccgagaccagatctcaagaatgttctacctaccgcatcatactcagcagttcaaaagttcctagcagcacgcaaatcaccaatgcttttctcgaccgaccccgaaaagttagaatatattcaaataagagaaaatgagctggtggccttacgacgtctcatgaagaaactcccagcattgaatcgagaatgtcatgaagagttgggtaaacttctacgagagcaaaatggcatacaacgaggcacaaagagatacacagagttccaaaaaactcatatagagccgaagaaacactggttcatggtactccgatccgcctcagacatcatacctaagctcgcgtctgaaaacggaaccctgatccgtattctcaagacagaaattcgaacatctcaggaattgaggatcgataggcgatacgaaaattatcaacgatggatcgaacatctagttcccggctcagagacgtatgcagatttgggttccaagatagacaaagaaatgtcaagaaggaagctcggctaa

SEQ ID NO: 10170 - protein, 355 aa, Muscodor strobelii
  misc_feature: SGI Peptide ID NO. 563214
  misc_feature: Useful for introducing or modulating the production of volatile compounds
MFKGPAPAKVSHVSHDDARVEGRLYDLGSVSPKTRSYKIRSIKRLGKRVIFKEKYDGWELVIFRAEPLKPMAEMAQVKASPSANKSKTQGLISNDQKEINARRKPKSNYKRESDRLRQRDRRIAKRNLPQQSLTTKSAMSKSQEQTNNSEQPSPAAIEDLHPVKLDDTTSSMLVLLHLAFSPRPDLKNVLPTASYSAVQKFLAARKSPMLFSTDPEKLEYIQIRENELVALRRLMKKLPALNRECHEELGKLLREQNGIQRGTKRYTEFQKTHIEPKKHWFMVLRSASDIIPKLASENGTLIRILKTEIRTSQELRIDRRYENYQRWIEHLVPGSETYADLGSKIDKEMSRRKLG

SEQ ID NO: 10171 - DNA, 5228 bp, Muscodor strobelii
  misc_feature: SGI EST ID NO. CUFF.24003.0
  misc_feature: Variant of the nucleotide sequence at SEQ ID NO 10169
ctcagttaggtttggtggggaagaaacttggatgagcctccattgaggccttccttgtggctggtgttagcaggcgtccactggcagagcaccataccagctacctaccgggattcggggcgcgtccactatcgtggtcctcccgcatgagacagctaggtaagtgccgaaaagcttgcaaccgtcaacgctcaagacccatgacccgcgttaaccgtgtctgtggcccacgcttaattcaccattgatcaccttttttcttgtatgggctatattgtccattgccacattttgatgtctgccactcccaacacactcaaaggtcttgacgcttctccgagtgtccgttaccgatagatcaccattgaaaacgccacaacgtgaacagaattaattccctagttcaccgatgcgcgcatgcgcccgagttgagctgaatcatcgttttgcccagaacccgtttgttgactgaatgacgctgattttccaggcaaggctgccttatcgtattacgattcccaataactgtagcaagtgtgttgtggaagaccatatctcctttttgagccttggaataggtattcagtatgcaataatacagctcagggaccacaccagcaatgcgtcccagcaaagaccaccgtttgcatatgtacggccggcgcatcgcttgtactgctcaagctgtttgcgatactgtcctttctgcaatgtggcccgcggcagaacgttgtgcaatcttccatgtcaccacctttctatctgatactattggttttcttctgtctctgaatttgcctgagtgttgcaagccaacgggctgggctgtctcgctaactagcccaaagctagctgtgtcggttcatcaacttttcaccatagtggttcagggttgtcccttctttcaaattcgattcagaggcgaccgaccggtttatcttccgacgcagacgagtgacgccatgcatttattcagggtcccgactctaaggatcttcttagactcctagaccattagagttcggctcgcctcacctaaccttaaactattctcaggttctgatttcaagcaggtgttactacttgtcttcatggctagaatccatacatccttgcgtgcatgcgtcaacgtgtacaataaactcaggtctgagcgtaccgacagccaaggtacagatggatcatgggctttgccccccggaggacactttaatacaagatgtcaacttcatcggactctcagtcctgtaactattgctccggtcaagaaactacaccgaagatataaagccacaagacggccgtgcctcgaggagtctcggcactcgtcttagtccaacacgaatggaacacctattcaagatgctttgcgtaccacgttcgttgtctttgttattttttcagttacagctcttgcgttcctgttttgcgtcgagcgcgtccattcatgatgcttcgtggcaaccggagtatgttctttatgcaactcaagaagacttgattatagactgccagcagcgtccatcagtcgttttcaacggtacctcacctggtccgccactctacttgaaagaaggtcaaaccacatggatccgagtctacaatcaactaccagatctcaatcttacaactcactggcatggacttaccatgagaacggcacctttttcagatggaacggctcagattgcccaatggcctatcgcccctggcgaattcttcgattacgaaattcaccccgaaattggcgatgcgggcacttatttttatcattctcatatcggctttcaagcagtgacagcacatggtattttgtatgtggaggatgccgacacacctccgtaccaatatgacggagatctgtcgatgataatcggagatttctataagaagacagaccacgaggttgaaagcggacttcttgctgatcctttcatttggtccggagaaccggacgcattggtcattaatgataaaacaggaacttcgtccttcgacagtgcgccagacgattcatgcacgccatatgtgtttcttgtagatcccgaccaaacctaccgatttcgatttgttggcgccacagcgatctcctttgtgcaagtcggaatcgaggatcacaccaatttgacagtaatcagtgccgatggctactacacaaagcctgctgtcgtcgaccatattcaaattggaggcggtcagcgttacgacgtccttttaacgacgaagtcagaagcggaattagcctctgaaggccgtgatcaatattggatcagattcgaaagccggggccgtgctacggatctctcaggatatgctctgttgcaatatcgatcctcctcttcgttcaactcaacctctaagagagagcttatgatgcctcgatccccgcgacctttcggccaatcttaccacggtcagcggcctcgacacggacatcaacttccacataagtccccagtgactttaccgcccgatggccaactcactggctggctggaatacacgctcgaggctctcaatcccaagggcgtgtttccttcattatcagaagtgacgcgtactatatgtattactgtcgaggaaaagattatcaacggcgctgtagttggcgggaccatcacgggctcaatgatttgggtgaacaatgagcttacatggacagaaatggaagcggctgacctacattacactccgtacctgatagatgcctatgtcaacgggagaactcctgattatgacgcggcagtgaagaatggcggctgggatccagctactaaggctttccccgcagaggttggggaagtattagatatcgtgtggctaagtaactctggccccacgggcggctttcaataccacccaatgcacgcccacggtgaacattactatgatttggggtctgggaacgggacgtatgaccctatcgctaacgaggccaagttcgcgaattacactccggctaggcgcgacaccaccatgctctaccgctatgcatcacaggcccacacaaacactacggcaggttggagagcatggcgcattcgaattacggaaggtaatgtaggatcgtggatgatgcattgccatattctacagcatatgatcatgggtatgcagactgtctgggtatttggcgatgcggcgtcgattattaaagagatcccagagccttatgtccacggctatttagaatacggcggcagcgcttatggaaacgattcatatgatcctctggtgatgacgtactttgatgattgaagcggcactcatatagatccgggcaggtatgagtcgcaccatgttcagctttccatcttacttagcttcgagtcggcgggcgttttattgattccctgtgttactttgcatggtatggaaggtgtcatttcgttgtacgcttcaaatacgtaaatacgcgttatgatcgataaggtatacaggacgcaaaatttgtcattctgtatttaatttgaagtgccctgtttttgctagtttcggccaatattagggacagtgaggctcgcgtctttgttggcttctcgtacgtaacggtacgtacctccctatgtcggtgggctactcctccgtggatacctacatgtccatagcactccagcgcacatgcatctagggatatgccaccttacttgcagattcccctcaagctcgatcgggcatatgtttccatggatgtatacgtatatgtcctgtagctcagcctgtcttggcgtatcgattggctgtcataaatggcctagacctgtgactgcatgaatccatgcgccaacttcccccagttttgcaactctccactgacatagcgatcaactgcaactcagcaaagcgttcgtattaaaatctcgttttacttaaaaacttacctacaatattcgtctaaattgatttgttcaacatcgacaaaatggcgcatgatgagcaacgtatgaagcccctgaaacacaaggtgcctgaagacacgctccatcatttgtgccgccttgcttgggggcagggtttttattttagcttctttctggaagcgagtaaatactacgcgttgcatgtcaagatgttcaaaggaccagcgcccgcgaaagtttcacatgtgagccacgatgatgccagggtcgaaggtcgattgtacgaccttggcagtgtgtcaccaaagacccgatcatacaaaattagaagcatcaagcgcttaggcaagagggttatattcaaggagaagtacgatggatgggaactggtcatattcagagccgaaccattgaaacccatggccgagatggcgcaggtgaaagcttcgccttcagccaataagagcaagacgcagggcttgatttcaaacgatcaaaaagagatcaacgctcgccgaaaaccaaagtcaaactataagcgtgaatcggatcgactacgtcagcgtgatagacgcattgcaaaacgtaatctaccgcaacaatccctgaccacgaaaagcgccatgtcgaaatctcaagaacaaacaaacaattccgagcagccctcgcctgcagccattgaagatctacaccccgtgaagcttgatgatacgacatcgagtatgcttgttcttctacacctagcgttcagcccgagaccagatctcaagaatgttctacctaccgcatcatactcagcagttcaaaagttcctagcagcacgcaaatcaccaatgcttttctcgaccgaccccgaaaagttagaatatattcaaataagagaaaatgagctggtggccttacgacgtctcatgaagaaactcccagcattgaatcgagaatgtcatgaagagttgggtaaacttctacgagagcaaaatggcatacaacgaggcacaaagagatacacagagttccaaaaaactcatatagagccgaagaaacactggttcatggtactccgatccgcctcagacatcatacctaagctcgcgtctgaaaacggaaccctgatccgtattctcaagacagaaattcgaacatctcaggaattgaggatcgataggcgatacgaaaattatcaacgatggatcgaacatctagttcccggctcagagacgtatgcagatttgggttccaagatagacaaagaaatgtcaagaaggaagctcggctaatattatgaaaattttgacaacacacaaatatagctagttgattgacgataagtcgattgaaacaatccaatatactccatttctccgagat

SEQ ID NO: 10172 - DNA, 1896 bp, Muscodor strobelii
  misc_feature: SGI cDNA ID NO. 563215
  misc_feature: Elevated expression when VOC is produced
  misc_feature: Encodes the peptide sequence at SEQ ID NO 10173
atgctttgcgtaccacgttcgttgtctttgttattttttcagttacagctcttgcgttcctgttttgcgtcgagcgcgtccattcatgatgcttcgtggcaaccggagtatgttctttatgcaactcaagaagacttgattatagactgccagcagcgtccatcagtcgttttcaacggtacctcacctggtccgccactctacttgaaagaaggtcaaaccacatggatccgagtctacaatcaactaccagatctcaatcttacaactcactggcatggacttaccatgagaacggcacctttttcagatggaacggctcagattgcccaatggcctatcgcccctggcgaattcttcgattacgaaattcaccccgaaattggcgatgcgggcacttatttttatcattctcatatcggctttcaagcagtgacagcacatggtattttgtatgtggaggatgccgacacacctccgtaccaatatgacggagatctgtcgatgataatcggagatttctataagaagacagaccacgaggttgaaagcggacttcttgctgatcctttcatttggtccggagaaccggacgcattggtcattaatgataaaacaggaacttcgtccttcgacagtgcgccagacgattcatgcacgccatatgtgtttcttgtagatcccgaccaaacctaccgatttcgatttgttggcgccacagcgatctcctttgtgcaagtcggaatcgaggatcacaccaatttgacagtaatcagtgccgatggctactacacaaagcctgctgtcgtcgaccatattcaaattggaggcggtcagcgttacgacgtccttttaacgacgaagtcagaagcggaattagcctctgaaggccgtgatcaatattggatcagattcgaaagccggggccgtgctacggatctctcaggatatgctctgttgcaatatcgatcctcctcttcgttcaactcaacctctaagagagagcttatgatgcctcgatccccgcgacctttcggccaatcttaccacggtcagcggcctcgacacggacatcaacttccacataagtccccagtgactttaccgcccgatggccaactcactggctggctggaatacacgctcgaggctctcaatcccaagggcgtgtttccttcattatcagaagtgacgcgtactatatgtattactgtcgaggaaaagattatcaacggcgctgtagttggcgggaccatcacgggctcaatgatttgggtgaacaatgagcttacatggacagaaatggaagcggctgacctacattacactccgtacctgatagatgcctatgtcaacgggagaactcctgattatgacgcggcagtgaagaatggcggctgggatccagctactaaggctttccccgcagaggttggggaagtattagatatcgtgtggctaagtaactctggccccacgggcggctttcaataccacccaatgcacgcccacggtgaacattactatgatttggggtctgggaacgggacgtatgaccctatcgctaacgaggccaagttcgcgaattacactccggctaggcgcgacaccaccatgctctaccgctatgcatcacaggcccacacaaacactacggcaggttggagagcatggcgcattcgaattacggaaggtaatgtaggatcgtggatgatgcattgccatattctacagcatatgatcatgggtatgcagactgtctgggtatttggcgatgcggcgtcgattattaaagagatcccagagccttatgtccacggctatttagaatacggcggcagcgcttatggaaacgattcatatgatcctctggtgatgacgtactttgatgattga

SEQ ID NO: 10173 - protein, 631 aa, Muscodor strobelii
  misc_feature: SGI Peptide ID NO. 563215
  misc_feature (165)..(325): Pfam Id: PF00394 Pfam Desc: Multicopper oxidase
  misc_feature (450)..(594): Pfam Id: PF07731 Pfam Desc: Multicopper oxidase
  misc_feature (40)..(158): Pfam Id: PF07732 Pfam Desc: Multicopper oxidase
  misc_feature (8)..(630): NCBI GI: 256721255 Blast Desc: NECHADRAFT_70605 [Nectria haematococca mpVI 77-13-4]
  misc_feature (10)..(631): NCBI GI: 46110897 Blast Desc: FG02330.1 [Gibberella zeae PH-1]
  misc_feature (20)..(629): NCBI GI: 145615782 Blast Desc: MGG_14307 [Magnaporthe grisea 70-15] gi|145022927|gb|EDK06622.1| MGG_14307 [Magnaporthe grisea 70-15]
  misc_feature (2)..(630): NCBI GI: 255955891 Blast Desc: Pc21g16980 [Penicillium chrysogenum Wisconsin 54-1255] gi|211590409|emb|CAP96595.1| Pc21g16980 [Penicillium chrysogenum Wisconsin 54-1255]
  misc_feature (1)..(630): NCBI GI: 238500552 Blast Desc: laccase, [Aspergillus flavus NRRL3357] gi|220691747|gb|EED48094.1| laccase, [Aspergillus flavus NRRL3357]
  misc_feature (6)..(625): NCBI GI: 115386908 Blast Desc: conserved [Aspergillus terreus NIH2624] gi|114190993|gb|EAU32693.1| conserved [Aspergillus terreus NIH2624]
  misc_feature (15)..(631): NCBI GI: 212531115 Blast Desc: multi-copper oxidase, [Penicillium marneffei ATCC 18224] gi|210071078|gb|EEA25167.1| multi-copper oxidase, [Penicillium marneffei ATCC 18224]
  misc_feature (10)..(583): NCBI GI: 2780359 Blast Desc: ascorbate oxidase [Acremonium sp. HI-25]
  misc_feature (24)..(628): NCBI GI: 67900804 Blast Desc: AN7389.2 [Aspergillus nidulans FGSC A4] gi|40742570|gb|EAA61760.1| AN7389.2 [Aspergillus nidulans FGSC A4] gi|259483250|tpe|CBF78480.1| TPA: conserved [Aspergillus FGSC
  misc_feature (12)..(631): NCBI GI: 116201793 Blast Desc: CHGG_08781 [Chaetomium globosum CBS 148.51] gi|88177299|gb|EAQ84767.1| CHGG_08781 [Chaetomium globosum CBS 148.51]
  misc_feature (23)..(601): SWISSPROT Homolog: EC 1.10.3.3 L-ascorbate oxidase
  misc_feature: Useful for introducing or modulating the production of volatile compounds
MLCVPRSLSLLFFQLQLLRSCFASSASIHDASWQPEYVLYATQEDLIIDCQQRPSVVFNGTSPGPPLYLKEGQTTWIRVYNQLPDLNLTTHWHGLTMRTAPFSDGTAQIAQWPIAPGEFFDYEIHPEIGDAGTYFYHSHIGFQAVTAHGILYVEDADTPPYQYDGDLSMIIGDFYKKTDHEVESGLLADPFIWSGEPDALVINDKTGTSSFDSAPDDSCTPYVFLVDPDQTYRFRFVGATAISFVQVGIEDHTNLTVISADGYYTKPAVVDHIQIGGGQRYDVLLTTKSEAELASEGRDQYWIRFESRGRATDLSGYALLQYRSSSSFNSTSKRELMMPRSPRPFGQSYHGQRPRHGHQLPHKSPVTLPPDGQLTGWLEYTLEALNPKGVFPSLSEVTRTICITVEEKIINGAVVGGTITGSMIWVNNELTWTEMEAADLHYTPYLIDAYVNGRTPDYDAAVKNGGWDPATKAFPAEVGEVLDIVWLSNSGPTGGFQYHPMHAHGEHYYDLGSGNGTYDPIANEAKFANYTPARRDTTMLYRYASQAHTNTTAGWRAWRIRITEGNVGSWMMHCHILQHMIMGMQTVWVFGDAASIIKEIPEPYVHGYLEYGGSAYGNDSYDPLVMTYFDD

SEQ ID NO: 10174 - DNA, 5228 bp, Muscodor strobelii; identical to SEQ ID NO: 10171
  misc_feature: SGI EST ID NO. CUFF.24003.0
  misc_feature: Variant of the nucleotide sequence at SEQ ID NO 10172

SEQ ID NO: 10175 - DNA, 1152 bp, Muscodor strobelii
  misc_feature: SGI cDNA ID NO. 563216
  misc_feature: Elevated expression when VOC is produced
  misc_feature: Encodes the peptide sequence at SEQ ID NO 10176
atgaatggaacacactccaatggccatgtgaatggccatactaatggtatcaccaatggcgatgcatctaaatacagaaacccatctttgcaagtcacggcggaccacaggataaaacttgtcgatgcaccaatcgaggagcctggcccaggtgaggtcactcttcaagtcaaatgctccggaatctgtggatcagatatgcacctgtggaagtcagggcggataggttctcttgaggtcaagggtgattgtattttgggccacgaggcagcgggagttgtcctcaaatgcggcgagggcgtaacgtctctcaaagttggtgaccgagttggcatcgagccgcaagagccttgtgaaaaatgcttcttatgtatggaaggccgatataatctctgtgataatgtcaaattctctggaatatggccagatagtggcacaatccagagattcaagcgccatccggcgaagtggctgtacaagatccccgacaacttgacatattctgaaggcgcactactagaaccattgagtgttattctgcatggaattaatggtgctaacgtccgtttgggtcgccctgccttaatttgtggtgccggtcctatcggcctcgttgccctggctgctgctcgggcttctggcgcacatccattggtggtgacagatattgatgccgggcgcctgaaatttgcgaaggaatttgttccacattgccagacgtaccttgtaaacacaaagatgagtgccgaggaaaacgccaagcaaatcagaaaactgtacggcgacgatgaatactcgcaaccagcatcagtcatggaatgtaccggtgttgaaagcagtatctgcacagctgcctacagcgtgagaagaggaggcactctaatggtaatcggcgtaggccgaccggtcatgaacaatatcccgttcatgcatttgtcgctagcagagatcgatcttaggtttatcaaccgatatcgggatacttggccggccgccatacaatgccttagtggcggagtaatggatctgaacaagatggtaacgcacaaattcccgctggagaaggcagttgaagcttttgagttagcagccgatgctagtaacctcagtatcaagatacatattgtggatgaggtagaagggatgctgtaa

SEQ ID NO: 10176 - protein, 383 aa, Muscodor strobelii
  misc_feature: SGI Peptide ID NO. 563216
  misc_feature (50)..(161): Pfam Id: PF08240 Pfam Desc: Alcohol dehydrogenase GroES-like domain
  misc_feature (190)..(338): Pfam Id: PF00107 Pfam Desc: Zinc-binding dehydrogenase
  misc_feature (23)..(383): NCBI GI: 212538995 Blast Desc: alcohol dehydrogenase, [Penicillium marneffei ATCC 18224] gi|210069395|gb|EEA23486.1| alcohol dehydrogenase, [Penicillium marneffei ATCC 18224]
  misc_feature (11)..(378): NCBI GI: 255938488 Blast Desc: Pc14g00190 [Penicillium chrysogenum Wisconsin 54-1255] gi|211584635|emb|CAP74160.1| Pc14g00190 [Penicillium chrysogenum Wisconsin 54-1255]
  misc_feature (6)..(380): NCBI GI: 256732592 Blast Desc: [Nectria haematococca mpVI 77-13-4]
  misc_feature (18)..(383): NCBI GI: 169772873 Blast Desc: [Aspergillus oryzae RIB40] gi|83768766|dbj|BAE58903.1| protein product [Aspergillus oryzae]
  misc_feature (18)..(383): NCBI GI: 238490778 Blast Desc: alcohol dehydrogenase, [Aspergillus flavus NRRL3357] gi|220697039|gb|EED53380.1| alcohol dehydrogenase, [Aspergillus flavus NRRL3357]
  misc_feature (27)..(383): NCBI GI: 145249274 Blast Desc: An14g03510 [Aspergillus niger] gi|134081654|emb|CAK46588.1| protein product [Aspergillus niger]
  misc_feature (27)..(380): NCBI GI: 46125227 Blast Desc: FG06991.1 [Gibberella zeae PH-1]
  misc_feature (27)..(378): NCBI GI: 67903130 Blast Desc: AN8552.2 [Aspergillus nidulans FGSC A4] gi|40747821|gb|EAA66977.1| AN8552.2 [Aspergillus nidulans FGSC A4] gi|259484506|tpe|CBF80785.1| TPA: alcohol dehydrogenase, FGSC
  misc_feature (25)..(377): NCBI GI: 50410808 Blast Desc: DEHA0B00583g [Debaryomyces hansenii CBS767] gi|49652658|emb|CAG84975.1| DEHA2B00594p [Debaryomyces hansenii]
  misc_feature (26)..(317): NCBI GI: 159128395 Blast Desc: alcohol dehydrogenase, [Aspergillus fumigatus A1163]
  misc_feature (22)..(373): SWISSPROT Homolog: EC 1.1.1.14 L-iditol 2-dehydrogenase
  misc_feature: Useful for introducing or modulating the production of volatile compounds
MNGTHSNGHVNGHTNGITNGDASKYRNPSLQVTADHRIKLVDAPIEEPGPGEVTLQVKCSGICGSDMHLWKSGRIGSLEVKGDCILGHEAAGVVLKCGEGVTSLKVGDRVGIEPQEPCEKCFLCMEGRYNLCDNVKFSGIWPDSGTIQRFKRHPAKWLYKIPDNLTYSEGALLEPLSVILHGINGANVRLGRPALICGAGPIGLVALAAARASGAHPLVVTDIDAGRLKFAKEFVPHCQTYLVNTKMSAEENAKQIRKLYGDDEYSQPASVMECTGVESSICTAAYSVRRGGTLMVIGVGRPVMNNIPFMHLSLAEIDLRFINRYRDTWPAAIQCLSGGVMDLNKMVTHKFPLEKAVEAFELAADASNLSIKIHIVDEVEGML

SEQ ID NO: 10177 - DNA, 2285 bp, Muscodor strobelii
  misc_feature: SGI EST ID NO. CUFF.24030.2
  misc_feature: Variant of the nucleotide sequence at SEQ ID NO 10175
cgcgggctacgcatatggagatccaatggagtctagtgacatgcggtgggcagttgtcccttaccccagattcaccaatgtggggatccgccgatcgcctggcgaaattcgaaacaaaattatgggatttgagatcattgggcacaattacgattattatgtgataatattgttcgaaatctgtcaccggatctgtcctcggttcacgtcccccacaaaggccgccctgccatacttcactattggagttcctacagtgcggagcatcacaactagcgaagatcctcgagaagaccatcaacggtatttcctaatgcggtaacccgctagacatctaagagagcgctctgtcgtgtcgtgtcatgtccgattacgattcggcttggagtagttacgcgacgctctatttggtgagaagtactagagtatatctaccatcttctattgattcgaagattctggtatgctcctatattcatcatagagtcataatattcggaccctcaaacagacgcgcttctttattccaagatcacaacaccaggagatcggttctgaatatcagagatgaatggaacacactccaatggccatgtgaatggccatactaatggtatcaccaatggcgatgcatctaaatacagaaacccatctttgcaagtcacggcggaccacaggataaaacttgtcgatgcaccaatcgaggagcctggcccaggtgaggtcactcttcaagtcaaatgctccggaatctgtggatcagatatgcacctgtggaagtcagggcggataggttctcttgaggtcaagggtgattgtattttgggccacgaggcagcgggagttgtcctcaaatgcggcgagggcgtaacgtctctcaaagttggtgaccgagttggcatcgagccgcaagagccttgtgaaaaatgcttcttatgtatggaaggccgatataatctctgtgataatgtcaaattctctggaatatggccagatagtggcacaatccagagattcaagcgccatccggcgaagtggctgtacaagtaggtagcactgataagaacgttccaacaactcagggttgactggctggctaggatccccgacaacttgacatattctgaaggcgcactactagaaccattgagtgttattctgcatggaattaatggtgctaacgtccgtttgggtcgccctgccttaatttgtggtgccggtcctatcggcctcgttgccctggctgctgctcgggcttctggcgcacatccattggtggtgacagatattgatgccgggcgcctgaaatttgcgaaggaatttgttccacattgccagacgtaccttgtaaacacaaagatgagtgccgaggaaaacgccaagcaaatcagaaaactgtacggcgacgatgaatactcgcaaccagcatcagtcatggaatgtaccggtgttgaaagcagtatctgcacagctgcctacagcgtgagaagaggaggcactctaagtaagtcatgacttcattctcacaactcttccagtgcttgtctcgtgaatgccttccacttcagggacattcgcgcattggtggcgttcgtaccgagacatgttgtttttaggaaagtaagtgacagaggctgactcagtctacagtggtaatcggcgtaggccgaccggtcatgaacaatatcccgttcatgcatttgtcgctagcagagatcgatcttaggtttatcaaccgatatcgggatacttggccggccgccatacaatgccttagtggcggagtaatggatctgaacaagatggtaacgcacaaattcccgctggagaaggcagttgaagcttttgagttagcagccgatgctagtaacctcagtatcaagatacatattgtggatgaggtagaagggatgctgtaaggtgtataatgactagtgactacgaggtattgagaacactccaaatggggaattgtaataacaaagcttcgacttgaatgttgaatttgtgtcccaatcaccgctttctgctgcatcagaaggttccttctcgtgagacacagcatgagagcgacgcctagcttcatcattggaacagtgtgtcaagcggtcatctgctcgcgtgccggtgaacacgcatagtcgcacaacttatccgcgtatccgtcacgttgaggccagaaactccggccccgagcatgacacccttcacgcggtatttccagctcgtatcggtggtgtcagtgttagtgttcgtgtaatcgtgcttcttgataggaataacaa

SEQ ID NO: 10178 - DNA, 882 bp, Muscodor strobelii
  misc_feature: SGI cDNA ID NO. 563217
  misc_feature: Encodes the peptide sequence at SEQ ID NO 10179
atggagtcctttggcatcactaagcagcacgcaccttatcctgcgatcgacccgtctcgcccagagttgtcacagggtggtcgtgtggtcctggtcactggaagttccagcggtataggtttctacatcgcgagagcgtttgcgaaagccaaagcggcggcagtaatcttgatgggtcgtcaagaaaacgccgtcaccgctgcagtcgaaagtctgactaaagactatccagatacccagatcatcggcaaaacgctcgacttcacagactcggcagccgtcaagcaaatgtggagtgagttcgagaaagacgggcttgtaatcgaagttctggtattgagcgcttcgcggatccagtttgaaaaatcttctcttctcaagtacggctacgctgaggtttctacggattttgctgcgaacgtcggctccaacttacaattcgtcgactacttctattatcagaagaaccgaaatccgtcactgaagctaaacttgatcaacgtatctaccttcagtatctataacttcgagatcaacaaagcaacgcctagttacggcctatcgaagaatgcagccgcgttggcccttcagttgattgctatggatgtctccgctagtgatatgcagattataagcttccatcctggcttcatcttcacaaactcggcaaagcagatgggatataccgatccgactctcccatgggatcatgatgatttaccgggccattacgccgtttgggcagcatctcaggagtctgcgttccttcacggacggtttactttcacggattgggatgttactgaactgcagtcgggaaagatcagagagaagattgagaatgatcccaaattcttgagattgggaatgcatggactttga

SEQ ID NO: 10179 - protein, 293 aa, Muscodor strobelii
  misc_feature: SGI Peptide ID NO. 563217
  misc_feature (28)..(73): Pfam Id: PF00106 Pfam Desc: short chain dehydrogenase
  misc_feature (3)..(293): NCBI GI: 238495098 Blast Desc: short-chain dehydrogenase, [Aspergillus flavus NRRL3357] gi|220695435|gb|EED51778.1| short-chain dehydrogenase, [Aspergillus flavus NRRL3357]
  misc_feature (3)..(293): NCBI GI: 256726987 Blast Desc: NECHADRAFT_91096 [Nectria haematococca mpVI 77-13-4]
  misc_feature (7)..(293): NCBI GI: 156056454 Blast Desc: SS1G_05581 [Sclerotinia sclerotiorum 1980] gi|154703363|gb|EDO03102.1| SS1G_05581 [Sclerotinia sclerotiorum 1980]
  misc_feature (13)..(293): NCBI GI: 256721782 Blast Desc: NECHADRAFT_53268 [Nectria haematococca mpVI 77-13-4]
  misc_feature (3)..(293): NCBI GI: 119473989 Blast Desc: NADP(+)-dependent dehydrogenase, [Neosartorya fischeri NRRL 181] gi|119407023|gb|EAW16973.1| NADP(+)-dependent dehydrogenase, [Neosartorya fischeri NRRL 181]
  misc_feature (12)..(293): NCBI GI: 256723821 Blast Desc: NECHADRAFT_92278 [Nectria haematococca mpVI 77-13-4]
  misc_feature (6)..(293): NCBI GI: 46112781 Blast Desc: FG02892.1 [Gibberella zeae PH-1]
  misc_feature (7)..(290): NCBI GI: 154320856 Blast Desc: BC1G_01900 [Botryotinia fuckeliana B05.10] gi|150853589|gb|EDN28781.1| BC1G_01900 [Botryotinia fuckeliana B05.10]
  misc_feature (13)..(293): NCBI GI: 46139675 Blast Desc: FG11352.1 [Gibberella zeae PH-1]
  misc_feature (6)..(293): NCBI GI: 145607964 Blast Desc: MGG_09785 [Magnaporthe grisea 70-15] gi|145015432|gb|EDJ99968.1| MGG_09785 [Magnaporthe grisea 70-15]
MESFGITKQHAPYPAIDPSRPELSQGGRVVLVTGSSSGIGFYIARAFAKAKAAAVILMGRQENAVTAAVESLTKDYPDTQIIGKTLDFTDSAAVKQMWSEFEKDGLVIEVLVLSASRIQFEKSSLLKYGYAEVSTDFAANVGSNLQFVDYFYYQKNRNPSLKLNLINVSTFSIYNFEINKATPSYGLSKNAAALALQLIAMDVSASDMQIISFHPGFIFTNSAKQMGYTDPTLPWDHDDLPGHYAVWAASQESAFLHGRFTFTDWDVTELQSGKIREKIENDPKFLRLGMHGL

SEQ ID NO: 10180 - DNA, 1482 bp, Muscodor strobelii
  misc_feature: SGI cDNA ID NO. 563218
  misc_feature: Encodes the peptide sequence at SEQ ID NO 10181
atggaaactcataaaaaggcggtacagcgcatcggggagattgtgcacacgctttacaaaagaaaagaaagctttcgcgtattccacggctcaacgaatacgactcgacctcagcaccatcagcgcacagtcgacatcagtgctctgaataacatactcagtgtcgacaagaaaggccagaccatgctcgttgagccaaatgttccgatggacaaactagtcgccactgccttaaaatatggtttagtcccacctgtcgttatggaatttccagggatcacagttggtggaggattcgccggcactgctggagagagcagttcgttcaaacatggatatttcagtgatactatcaatcgaattgagatgatactaggtaatggctctattgtgagggcttcaaaatgcgaaaatccggatttgttcaaaggcgctgctggggccctggggacactcggaatcatcacactgcttgaacttagactcattactgccaagaaattcgtccgcgtatcttatcacaacgcaagtagtatggctggtaccatcgacattgtaaagagagaggttgataatgtgaataacgacttcgttgacggtgtcctattctcgagatctcagggcctcgtcatggttgggaagatgactgatgacataccttctacgaaggcggcccttaggttcagtcgaccttgggattcttggtattacctccacttgcaggacaaagcagcattatcttacagatctcacaattgtgatgagtacatcccgttgggagaatacctctttcgatgggatcgtggtgggttctgggttggccgacatgcatttacctggggaatgatccctttcaattggtttacgcgatggcttcttaatgattttatgcatactcgtatgctttatcaagctcttcgaggtagcgaacaatactttgagctcatcatccaggatctagctgtgccatatagtaccgccgagtcattcatgaaaaacgcagcgcgcgagttggaaatatggccaatttggctatgtccgcttcgccaaacaacaggcccaacttttcacccatattcgagacccaaccgtgagccaatgctgaaccttgggctatggggccaaggaccccgtgaaccacgagcatatttgcaacagaatcgtcggctaaagaaagtactgcaagagctaggaggaaagaaggtcttatactctcagagcttttatacggaagatcaattttggaagctttatgataaagaatggtatgatgaccttagaatgcgatatcatggcgaatcgatgccttctatctacgaaaagattacgacatccatggaagtaccagtactatcacaagatctcagcgcgcgagcaaaacgcatctggccacttcctggcttaataggggcgtataatggcgttcgaagcagagattatctagcctatagacgtctgcaatggcgggagaatgctccctag

SEQ ID NO: 10181 - protein, 493 aa, Muscodor strobelii
  misc_feature: SGI Peptide ID NO. 563218
  misc_feature (7)..(134): Pfam Id: PF01565 Pfam Desc: FAD binding domain
  misc_feature (43)..(134): Pfam Id: PF01565 Pfam Desc: FAD binding domain
  misc_feature (1)..(490): NCBI GI: 154311026 Blast Desc: BC1G_06631 [Botryotinia fuckeliana B05.10] gi|150851035|gb|EDN26228.1| BC1G_06631 [Botryotinia fuckeliana B05.10]
  misc_feature (2)..(491): NCBI GI: 145608504 Blast Desc: MGG_06580 [Magnaporthe grisea 70-15] gi|145015977|gb|EDK00467.1| MGG_06580 [Magnaporthe grisea 70-15]
  misc_feature (1)..(492): NCBI GI: 189207601 Blast Desc: 24-dehydrocholesterol reductase precursor [Pyrenophora tritici-repentis Pt-1C-BFP] gi|187976227|gb|EDU42853.1| 24-dehydrocholesterol reductase precursor [Pyrenophora Pt-1C-BFP]
  misc_feature (1)..(489): NCBI GI: 46134251 Blast Desc: FG09265.1 [Gibberella zeae PH-1]
  misc_feature (1)..(489): NCBI GI: 39973647 Blast Desc: MGG_01030 [Magnaporthe grisea 70-15] gi|145018014|gb|EDK02293.1| MGG_01030 [Magnaporthe grisea 70-15]
  misc_feature (1)..(489): NCBI GI: 169765354 Blast Desc: [Aspergillus oryzae RIB40] gi|83765003|dbj|BAE55146.1| protein product [Aspergillus oryzae]
  misc_feature (1)..(490): NCBI GI: 240281699 Blast Desc: FAD binding domain-containing protein [Ajellomyces capsulatus H143]
  misc_feature (1)..(489): NCBI GI: 256727157 Blast Desc: [Nectria haematococca mpVI 77-13-4]
  misc_feature (1)..(490): NCBI GI: 225558825 Blast Desc: FAD binding domain-containing protein [Ajellomyces capsulatus G186AR]
  misc_feature (1)..(491): NCBI GI: 261359659 Blast Desc: FAD binding domain-containing protein [Verticillium albo-atrum VaMs.102]
METHKKAVQRIGEIVHTLYKRKESFRVFHGSTNTTRPQHHQRTVDISALNNILSVDKKGQTMLVEPNVPMDKLVATALKYGLVPPVVMEFPGITVGGGFAGTAGESSSFKHGYFSDTINRIEMILGNGSIVRASKCENPDLFKGAAGALGTLGIITLLELRLITAKKFVRVSYHNASSMAGTIDIVKREVDNVNNDFVDGVLFSRSQGLVMVGKMTDDIPSTKAALRFSRPWDSWYYLHLQDKAALSYRSHNCDEYIPLGEYLFRWDRGGFWVGRHAFTWGMIPFNWFTRWLLNDFMHTRMLYQALRGSEQYFELIIQDLAVPYSTAESFMKNAARELEIWPIWLCPLRQTTGPTFHPYSRPNREPMLNLGLWGQGPREPRAYLQQNRRLKKVLQELGGKKVLYSQSFYTEDQFWKLYDKEWYDDLRMRYHGESMPSIYEKITTSMEVPVLSQDLSARAKRIWPLPGLIGAYNGVRSRDYLAYRRLQWRENAP

SEQ ID NO: 10182 - DNA, 1299 bp, Muscodor strobelii
  misc_feature: SGI cDNA ID NO. 563219
  misc_feature: Encodes the peptide sequence at SEQ ID NO 10183
atgctcgttgagccaaatgttccgatggacaaactagtcgccactgccttaaaatatggtttagtcccacctgtcgttatggaatttccagggatcacagttggtggaggattcgccggcactgctggagagagcagttcgttcaaacatggatatttcagtgatactatcaatcgaattgagatgatactaggtaatggctctattgtgagggcttcaaaatgcgaaaatccggatttgttcaaaggcgctgctggggccctggggacactcggaatcatcacactgcttgaacttagactcattactgccaagaaattcgtccgcgtatcttatcacaacgcaagtagtatggctggtaccatcgacattgtaaagagagaggttgataatgtgaataacgacttcgttgacggtgtcctattctcgagatctcagggcctcgtcatggttgggaagatgactgatgacataccttctacgaaggcggcccttaggttcagtcgaccttgggattcttggtattacctccacttgcaggacaaagcagcattatcttacagatctcacaattgtgatgagtacatcccgttgggagaatacctctttcgatgggatcgtggtgggttctgggttggccgacatgcatttacctggggaatgatccctttcaattggtttacgcgatggcttcttaatgattttatgcatactcgtatgctttatcaagctcttcgaggtagcgaacaatactttgagctcatcatccaggatctagctgtgccatatagtaccgccgagtcattcatgaaaaacgcagcgcgcgagttggaaatatggccaatttggctatgtccgcttcgccaaacaacaggcccaacttttcacccatattcgagacccaaccgtgagccaatgctgaaccttgggctatggggccaaggaccccgtgaaccacgagcatatttgcaacagaatcgtcggctaaagaaagtactgcaagagctaggaggaaagaaggtcttatactctcagagcttttatacggaagatcaattttggaagctttatgataaagaatggtatgatgaccttagaatgcgatatcatggcgaatcgatgccttctatctacgaaaagattacgacatccatggaagtaccagtactatcacaagatctcagcgcgcgagcaaaacgcatctggccacttcctggcttaataggggcgtataatggcgttcgaagcagagattatctagcctatagacgtctgcaatggcgggagaatgctccctag

SEQ ID NO: 10183 - protein, 432 aa, Muscodor strobelii
  misc_feature: SGI Peptide ID NO. 563219
  misc_feature (3)..(73): Pfam Id: PF01565 Pfam Desc: FAD binding domain
  misc_feature (2)..(429): NCBI GI: 154311026 Blast Desc: BC1G_06631 [Botryotinia fuckeliana B05.10] gi|150851035|gb|EDN26228.1| BC1G_06631 [Botryotinia fuckeliana B05.10]
  misc_feature (2)..(430): NCBI GI: 145608504 Blast Desc: MGG_06580 [Magnaporthe grisea 70-15] gi|145015977|gb|EDK00467.1| MGG_06580 [Magnaporthe grisea 70-15]
  misc_feature (2)..(431): NCBI GI: 189207601 Blast Desc: 24-dehydrocholesterol reductase precursor [Pyrenophora tritici-repentis Pt-1C-BFP] gi|187976227|gb|EDU42853.1| 24-dehydrocholesterol reductase precursor [Pyrenophora Pt-1C-BFP]
  misc_feature (2)..(428): NCBI GI: 46134251 Blast Desc: FG09265.1 [Gibberella zeae PH-1]
  misc_feature (2)..(428): NCBI GI: 169765354 Blast Desc: [Aspergillus oryzae RIB40] gi|83765003|dbj|BAE55146.1| protein product [Aspergillus oryzae]
  misc_feature (2)..(429): NCBI GI: 240281699 Blast Desc: FAD binding domain-containing protein [Ajellomyces capsulatus H143]
  misc_feature (2)..(428): NCBI GI: 256727157 Blast Desc: [Nectria haematococca mpVI 77-13-4]
  misc_feature (2)..(429): NCBI GI: 225558825 Blast Desc: FAD binding domain-containing protein [Ajellomyces capsulatus G186AR]
  misc_feature (2)..(428): NCBI GI: 39973647 Blast Desc: MGG_01030 [Magnaporthe grisea 70-15] gi|145018014|gb|EDK02293.1| MGG_01030 [Magnaporthe grisea 70-15]
  misc_feature (3)..(431): NCBI GI: 242787939 Blast Desc: galactose-1-phosphate uridylyltransferase [Talaromyces stipitatus ATCC 10500] gi|218721266|gb|EED20685.1| galactose-1-phosphate uridylyltransferase [Talaromyces stipitatus
MLVEPNVPMDKLVATALKYGLVPPVVMEFPGITVGGGFAGTAGESSSFKHGYFSDTINRIEMILGNGSIVRASKCENPDLFKGAAGALGTLGIITLLELRLITAKKFVRVSYHNASSMAGTIDIVKREVDNVNNDFVDGVLFSRSQGLVMVGKMTDDIPSTKAALRFSRPWDSWYYLHLQDKAALSYRSHNCDEYIPLGEYLFRWDRGGFWVGRHAFTWGMIPFNWFTRWLLNDFMHTRMLYQALRGSEQYFELIIQDLAVPYSTAESFMKNAARELEIWPIWLCPLRQTTGPTFHPYSRPNREPMLNLGLWGQGPREPRAYLQQNRRLKKVLQELGGKKVLYSQSFYTEDQFWKLYDKEWYDDLRMRYHGESMPSIYEKITTSMEVPVLSQDLSARAKRIWPLPGLIGAYNGVRSRDYLAYRRLQWRENAP

SEQ ID NO: 10184 - DNA, 1653 bp, Muscodor strobelii
  misc_feature: SGI cDNA ID NO. 563220
  misc_feature: Encodes the peptide sequence at SEQ ID NO 10185
atgggaggcgaggaaaataccgaggctctgaaagccacagaaacgggcgctgaccccaaatacgagaatggcaccgtggatgcgcctggtgagattcgtctcacttcaggtcatcaactgcagcgtggcttgaagagcaggcacattcagttcctggcgctcggcggcgcgatcgggacgggcctcttcgttggctctggtgcgatcctcgcgaccgtcggaccggcgccgttgtttatggcatatctcagtatgatgatcgtggtgtgggtggtgatgaacaatctcgctgaaatgacgacctatctacctatgagaggaatctcgatcccgtacttcgtaaatcgattcgttgatccaagtctcgccttcgctgccggatggaattactggtatgcttatgccattctagttgcggccgaatgtacggcaggtgccattgtcgtgcagtattggacgcatgtcgttcccgtggctgtatggatcgccatacagctccttgttatcttgttcctgaatatcgttgctgtttcctggtttggcgaagctgagttttggttcgccagcgtaaagctcataacaattttagggttgatcatcctaggtatcgtacttttcttcggcggtggtccaacccacgaccctctgtatttcaagaactggcaagatccgccgggcgcatttgtagagtatctcgtgggcgggagtactggtcgtttccttgcatattggactgcattcgttcgagcaggattctctttcataacatcgccagagctcatcgctctgtcggctggtgagacggtcgcacctcgccgcaatatccctaaagcagcacggcggttcgtctggcgtttggcggtcttttacggcttcggttcactcgtcattggcgttctagtgcccaacgacaacgaccagctcctctctggcgactcgaacgcctcagccagtcccttcgtgatagggatccagaaggcgggtatcaagggcttgaatcacgtcattaacgcggcgatcctaacatctgcttggtccgcgggcaatgcattctgctactctggctctcgtgtgctctattcaatggctttgagtggccaggcaccaaagtggttcgcgataacttcgaagcgtggcgtgccctatgtggctgtcgtatttacacttgcaatcggctcgttagcgttccttaacgtttctgaatccggcgcgtcggcattcaactggttcgcaaatatctccacgatatcaggatacatcgcgtggattgtggtcatgatcacctatctacgattccgcaaagcccttgaatctcatggcatgctgcaaagcttaccttttcgcacaccactgcaaccatacgcaacttacgttgttttgttcataattactattttgacgctcacaaacggattccaagtcttcttccctaagaactggtcgggagcgaattttgtagctgcctatatcacgatacccatatttcttgcgctttaccttgggcacaaggtctggttcagaacgcggtttgcgatcaggacggatgatgtagatgttatgacgggcaaaaaggagatggacgaactagaggaaatggacgagaagcctgttccaaagaattgggctcaaaaagcttggttttggattgcttga

SEQ ID NO: 10185 - protein, 550 aa, Muscodor strobelii
  misc_feature: SGI Peptide ID NO. 563220
  misc_feature (48)..(515): Pfam Id: PF00324 Pfam Desc: Amino acid permease
  misc_feature (48)..(511): Pfam Id: PF00324 Pfam Desc: Amino acid permease
  misc_feature (4)..(550): NCBI GI: 189203019 Blast Desc: amino-acid permease inda1 [Pyrenophora tritici-repentis Pt-1C-BFP] gi|187984944|gb|EDU50432.1| amino-acid permease inda1 [Pyrenophora tritici-repentis
  misc_feature (1)..(550): NCBI GI: 256727082 Blast Desc: NECHADRAFT_99332 [Nectria haematococca mpVI 77-13-4]
  misc_feature (11)..(550): NCBI GI: 261360371 Blast Desc: proline-specific permease [Verticillium albo-atrum VaMs.102]
  misc_feature (36)..(533): NCBI GI: 169603363 Blast Desc: SNOG_04691 [Phaeosphaeria nodorum SN15] gi|160706377|gb|EAT88451.2| SNOG_04691 [Phaeosphaeria nodorum SN15]
  misc_feature (30)..(550): NCBI GI: 85113614 Blast Desc: proline-specific permease [Neurospora crassa OR74A] gi|28926341|gb|EAA35319.1| proline-specific permease [Neurospora crassa OR74A]
  misc_feature (6)..(550): NCBI GI: 171695642 Blast Desc: protein product [Podospora anserina] gi|170948063|emb|CAP60227.1| protein product [Podospora anserina]
  misc_feature (1)..(550): NCBI GI: 116181298 Blast Desc: CHGG_01277 [Chaetomium globosum CBS 148.51] gi|88185574|gb|EAQ93042.1| CHGG_01277 [Chaetomium globosum CBS 148.51]
  misc_feature (1)..(550): NCBI GI: 39970865 Blast Desc: MGG_02899 [Magnaporthe grisea 70-15] gi|149210371|ref|XP_001522560.1| MGCH7_ch7g663 [Magnaporthe grisea 70-15] gi|86196618|gb|EAQ71256.1| MGCH7_ch7g663 grisea
  misc_feature (8)..(550): NCBI GI: 256727270 Blast Desc: NECHADRAFT_32512 [Nectria haematococca mpVI 77-13-4]
  misc_feature (11)..(549): NCBI GI: 3929399 Blast Desc: PUTX_EMENI RecName: Full=Proline-specific permease; AltName: Full=Proline transport protein gi|1030723|emb|CAA56191.1| proline permease [Emericella nidulans]
MGGEENTEALKATETGADPKYENGTVDAPGEIRLTSGHQLQRGLKSRHIQFLALGGAIGTGLFVGSGAILATVGPAPLFMAYLSMMIVVWVVMNNLAEMTTYLPMRGISIPYFVNRFVDPSLAFAAGWNYWYAYAILVAAECTAGAIVVQYWTHVVPVAVWIAIQLLVILFLNIVAVSWFGEAEFWFASVKLITILGLIILGIVLFFGGGPTHDPLYFKNWQDPPGAFVEYLVGGSTGRFLAYWTAFVRAGFSFITSPELIALSAGETVAPRRNIPKAARRFVWRLAVFYGFGSLVIGVLVPNDNDQLLSGDSNASASPFVIGIQKAGIKGLNHVINAAILTSAWSAGNAFCYSGSRVLYSMALSGQAPKWFAITSKRGVPYVAVVFTLAIGSLAFLNVSESGASAFNWFANISTISGYIAWIVVMITYLRFRKALESHGMLQSLPFRTPLQPYATYVVLFIITILTLTNGFQVFFPKNWSGANFVAAYITIPIFLALYLGHKVWFRTRFAIRTDDVDVMTGKKEMDELEEMDEKPVPKNWAQKAWFWIA

SEQ ID NO: 10186 - DNA, 2491 bp, Muscodor strobelii
  misc_feature: SGI EST ID NO. CUFF.24289.0
  misc_feature: Variant of the nucleotide sequence at SEQ ID NO 10184
tggtaatcaattgatgatgcctcatgctcatgaatggttgattatgagttgttggagattggtgagctagtgcgtttatctacgaggctggcccgagaactctattgagatttgacttctactatttgctctatctcatcgccaatccttacctaattagttgccccctagccctctttcgctccgaatctcaaccgaccttccttgttccgtcgtagatactgcgagggtgcgcgtgagatataagttcaagggagaccgctttcaaagcgcacatctcaagacgagccgacatatctgacttacagaagattgcgggaagatgggaggcgaggaaaataccgaggctctgaaagccacagaaacgggcgctgaccccaaatacgagaatggcaccgtggatgcgcctggtgagattcgtctcacttcaggtcatcaactgcagcgtggcttgaagagcaggcacattcagttcctggcgctcggcggcgcgatcgggacgggcctcttcgttggctctggtgcgatcctcgcgaccgtcggaccggcgccgttgtttatggcatatctcagtatgatgatcgtggtgtgggtggtgatgaacaatctcgctgaaatgacgacctatctacctatgagaggaatctcgatcccgtacttcgtaaatcgattcgttgatccaagtctcgccttcgctgccggatggaattactggtatgcttatgccattctagttgcggccgaatgtacggcaggtgccattgtcgtgcagtattggacgcatgtcgttcccgtggctgtatggatcgccatacagctccttgttatcttgttcctgaatatcgttgctgtttcctggtttggcgagtgagtctggctgtacatcctacctatgatcacgaaaacatcgctaacgactgaatagagctgagttttggttcgccagcgtaaagctcataacaattttagggttgatcatcctaggtatcgtacttttcttcggcggtggtccaacccacgaccctctgtatttcaagaactggcaagatccgccgggcgcatttgtagagtatctcgtgggcgggagtactggtcgtttccttgcatattggactgcattcgttcgagcaggattctctttcataacatcgccagagctcatcgctctgtcggctggtgagacggtcgcacctcgccgcaatatccctaaagcagcacggcggttcgtctggcgtttggcggtcttttacggcttcggttcactcgtcattggcgttctagtgcccaacgacaacgaccagctcctctctggcgactcgaacgcctcagccagtcccttcgtgatagggatccagaaggcgggtatcaagggcttgaatcacgtcattaacgcggcgatcctaacatctgcttggtccgcgggcaatgcattctgctactctggctctcgtgtgctctattcaatggctttgagtggccaggcaccaaagtggttcgcgataacttcgaagcgtggcgtgccctatgtggctgtcgtatttacacttgcaatcggctcgttagcgttccttaacgtttctgaatccggcgcgtcggcattcaactggttcgcaaatatctccacgatatcaggatacatcgcgtggattgtggtcatgatcacctatctacgattccgcaaagcccttgaatctcatggcatgctgcaaagcttaccttttcgcacaccactgcaaccatacgcaacttacgttgttttgttcataattactattttgacgctcacaaacggattccaagtcttcttccctaagaactggtcgggagcgaattttgtagctgcctatatcacgatacccatatttcttgcgctttaccttgggcacaaggtctggttcagaacgcggtttgcgatcaggacggatgatgtagatgttatgacgggcaaaaaggagatggacgaactagaggaaatggacgagaagcctgttccaaagaattgggctcaaaaagcttggttttggattgcttgatgcacttcttcacacgtcgaaggttttgtagcgtatgctagataccaaagcgaagtcgaaagtgcgtttgctcattccacacgggagcaagccccctgatagcagcagccatacgagcatgtcccagctctgcatacacgtcataccccaaatagttccaaaagggcaatcattcatcttgcttcatcgccggtagcccaaaatatcactcatggatcaagataagcatcttcgcattgtattattatgcttctctctgtgtccatcttgacattctgatacatctatcattcttctcgtccgcaggctggattgctgtcaaaatcgggcgaggtccaaaggaccgagctgtttagaaggtttacaacaccgccacagtagttctgtggcgctttcactactaaataggctagtccaaattatgcgctaagcccaataaagtgatatgtcaatcgccc

SEQ ID NO: 10187 - DNA, 1065 bp, Muscodor strobelii
  misc_feature: SGI cDNA ID NO. 563221
  misc_feature: Reduced expression when VOC is produced
  misc_feature: Encodes the peptide sequence at SEQ ID NO 10188
atgccatcctccagcagcgagaaacgtgccggcttccctcgcgtcatcccggattccaacagggtcacttttgacggtccccctgagacccttgatgtcgatggtgctcctaatgaaaatggagaaggcgatgggatcggaattggtggcagtactgccgcagctaatgctatcaaatatgaggacgtgaatgatcttaatgctatcactcgtgctcagattcaacaggacttactcgcctaccgctacgatctggacttctgtcaatctcagatcaggagtcaagagaaccttagtccagaggaggtccgcaagcttcaatttcgcattctagactgcagccacagcatccgccattgcaagcaccgcctcgagaccagcgatgctcagacccgtcgatacggtgttccctatggtgccggccccgctgttatgggctacgcgggccgacgcaacacctctacgggtcgtcccagacaaactaagaagcgcaagattgaccatgtcactagaggtagctccgaggctgaagatgacgtcgctaatagagatgccaatggagatggtaatagaggcgccaatggagatgctggcaattccacgctttctggcgaggcagaggcagaggcaaaggcagagacatcgcaaatgggcggcgctaatgagagtattgtcattgccgacgacgacgatgacgcctctgctgaatctctccagcgattggggttctggaactgccgtctgtgtcaatcccggaagtacgctgaagctggctttaacaaagtccccagtgctccttccaagtggccgttgaaggatattgccaagatgatcaaccattttctcagtcttcacactgagcacactccagctgagcgctgcattgagcttggtgatgcgttggctagaaatcgcggaccctttaagtactggctcacccgtacgaagaatatgtctgataccactcccgtcaatgaattcatttccgagctgcgtgccggtagcctccctcagagcatgcgccccctacttcctgctgccaagatctttcccaataccacttag

SEQ ID NO: 10188 - protein, 354 aa, Muscodor strobelii
  misc_feature: SGI Peptide ID NO. 563221
  misc_feature (59)..(341): NCBI GI: 116203399 Blast Desc: CHGG_09583 [Chaetomium globosum CBS 148.51] gi|88175711|gb|EAQ83179.1| CHGG_09583 [Chaetomium globosum CBS 148.51]
  misc_feature (3)..(341): NCBI GI: 171679717 Blast Desc: protein product [Podospora anserina] gi|170939484|emb|CAP64712.1| protein product [Podospora anserina]
  misc_feature (216)..(351): NCBI GI: 85092608 Blast Desc: NCU02316 [Neurospora crassa OR74A] gi|28920911|gb|EAA30243.1| [Neurospora crassa OR74A]
  misc_feature (236)..(332): NCBI GI: 261354685 Blast Desc: [Verticillium albo-atrum VaMs.102]
  misc_feature: Useful for introducing or modulating the production of volatile compounds
MPSSSSEKRAGFPRVIPDSNRVTFDGPPETLDVDGAPNENGEGDGIGIGGSTAAANAIKYEDVNDLNAITRAQIQQDLLAYRYDLDFCQSQIRSQENLSPEEVRKLQFRILDCSHSIRHCKHRLETSDAQTRRYGVPYGAGPAVMGYAGRRNTSTGRPRQTKKRKIDHVTRGSSEAEDDVANRDANGDGNRGANGDAGNSTLSGEAEAEAKAETSQMGGANESIVIADDDDDASAESLQRLGFWNCRLCQSRKYAEAGFNKVPSAPSKWPLKDIAKMINHFLSLHTEHTPAERCIELGDALARNRGPFKYWLTRTKNMSDTTPVNEFISELRAGSLPQSMRPLLPAAKIFPNTT

SEQ ID NO: 10189 - DNA, 2047 bp, Muscodor strobelii
  misc_feature: SGI EST ID NO. CUFF.24474.1
  misc_feature: Variant of the nucleotide sequence at SEQ ID NO 10187
gaaaaaagaaaggaaaagggaaaggtgcaaagacgaaatgaaacaaccaggcgaaaaccaaaaactacatctccgcgaccatcatacgtcctccttcctctgcttgtccgtccattccaacctcatgcaatgcttagcaatcacatcgtagattaaatgctagttcatgccttgtaacctgccgattgcccggctcccagcgccaaacgccttcatcgcgcattgtttgctacgtctcacccatcccatccacgccaccctcaccacccgctaacgtaattgcggcttcattgacgtctttcttctatcgtgcctcatccacgaaaacgtcgcgggcgacgcgatttcacagtcgttcgtaacccccaattagctttgctccaaataccgacacaaacccattcttcgctacattttgtcgcgtcttctttctctatccccacgaactcgcagctttgcttgtgtttcaccccggttaggttggtctcgacccaccaaaggtgaatacttgtaactatgccatcctccagcagcgagaaacgtgccggcttccctcgcgtcatcccggattccaacagggtcacttttgacggtccccctgagacccttgatgtcgatggtgctcctaatgaaaatggagaaggcgatgggatcggaattggtggcagtactgccgcagctaatgctatcaaatatgaggacgtgaatgatcttaatgctatcactcgtgctcagattcaacaggacttactcgcctaccgctacgatctggacttctgtcaatctcagatcaggagtcaagagaaccttagtccagaggaggtccgcaagcttcaatttcgcattctagactgcagccacagcatccgccattgcaagcaccgcctcgagaccagcgatgctcagacccgtcgatacggtgttccctatggtgccggccccgctgttatgggctacgcgggccgacgcaacacctctacgggtcgtcccagacaaactaagaagcgcaagattgaccatgtcactagaggtagctccgaggctgaagatgacgtcgctaatagagatgccaatggagatggtaatagaggcgccaatggagatgctggcaattccacgctttctggcgaggcagaggcagaggcaaaggcagagacatcgcaaatgggcggcgctaatgagagtattgtcattgccgacgacgacgatgacgcctctgctgaatctctccagcgattggggttctggaactgccgtctgtgtcaatcccggaagtacgctgaagctggctttaacaaagtccccagtgctccttccaagtggccgttgaaggatattgccaagatgatcaaccattttctcagtcttcacactgagcacactccagctgagcgctgcattgagcttggtgatgcgttggctagaaatcgcggaccctttaagtactggctcacccgtacgaagaatatgtctgataccactcccgtcaatgaattcatttccgagctgcgtgccggtagcctccctcagagcatgcgccccctacttcctgctgccaagatctttcccaataccacttaggcttcttacgctatgagaagaggacgcgcacacatttgtatattaggggcatgagcgcaacacatcgctatatatgcttaaccgtggaactttctccggctcggctgcggtattgaccaaggaagggacttgcaggcacaaggtgctgtgaagggctcaggctaccactgtgacagtggaagaatcttgctcgctgggagtctgatgctgcaacacacaataatctgcagctcacgctgcgaaattgatcatgaaagaatcatcgctagttagagataaatggctgccttgagagtacataggagggggctgaaagactccgacgtacctatcaagctcaagcatcccaaatcaggatgctaatgatggatcatagcttggacagcaaagcaagtagctagctaatgagtggcaattgatgcgcttccgtaattgactacttaatacagtatcagaagtctccagg

SEQ ID NO: 10190 - DNA, 738 bp, Muscodor strobelii
  misc_feature: SGI cDNA ID NO. 563222
  misc_feature: Elevated expression when VOC is produced
  misc_feature: Encodes the peptide sequence at SEQ ID NO 10191
atgtacaagacagtcctctccgtcgcggcagcagccggcgccgtcgccacccctctcagcagccgccaagttattcccaactacccaccatcctcaacctcaacaggcttcaagctaatcgccaacgtcaccgacccatcaactgatctcaccccctcagtcgacggctgggaattcctcggcatccacaccggcgccggcctcaacgacgccgtcctctctaacgaatatgttggcgagatcttctaccacaacggcaccgccgaagaaatccactacggctacggcagcgtcgtgaccgaccagggctccaaccccttcccggtcggcatctatgtgcaatccgaagacgagttcgaccagacctaccccgctgagcacaatgtgcacatcaacgtcggctcgggcaccatcggcgtctctctgtctgccttcccagacccatacttccctctcacgggacccgccctcggatcctacatggcatgcacgcgtatcgtcccttactacgacagcgagtggaccgtcgttcgttatgcttacgatgtttataacgaggagactggtctctatgagcctgttatccctgaggggtgcactgctattactttgatccctcagtgcgatacgctccccgccctgcctaagaatggcagtatcagcagccatgagtttgcggctgagagcaggtgctatgctgatgttgctagcattaactggcctgagtatggaccctag

SEQ ID NO: 10191 - protein, 245 aa, Muscodor strobelii
  misc_feature: SGI Peptide ID NO. 563222
  misc_feature (1)..(242): NCBI GI: 261361426 Blast Desc: conserved [Verticillium albo-atrum VaMs.102]
  misc_feature (1)..(245): NCBI GI: 46123505 Blast Desc: FG06130.1 [Gibberella zeae PH-1]
  misc_feature (26)..(245): NCBI GI: 256731050 Blast Desc: NECHADRAFT_105345 [Nectria haematococca mpVI 77-13-4]
  misc_feature (32)..(231): NCBI GI: 116192587 Blast Desc: CHGG_06011 [Chaetomium globosum CBS 148.51] gi|88181924|gb|EAQ89392.1| CHGG_06011 [Chaetomium globosum CBS 148.51]
  misc_feature (1)..(240): NCBI GI: 145601495 Blast Desc: [Magnaporthe grisea 70-15] gi|145009561|gb|EDJ94217.1| [Magnaporthe grisea 70-15]
  misc_feature (1)..(243): NCBI GI: 170940323 Blast Desc: protein product [Podospora anserina]
  misc_feature (22)..(244): NCBI GI: 171679860 Blast Desc: protein product [Podospora anserina] gi|170939556|emb|CAP64783.1| protein product [Podospora anserina]
  misc_feature (16)..(238): NCBI GI: 156034781 Blast Desc: SS1G_13326 [Sclerotinia sclerotiorum 1980] gi|154698729|gb|EDN98467.1| SS1G_13326 [Sclerotinia sclerotiorum 1980]
  misc_feature (5)..(243): NCBI GI: 154293094 Blast Desc: [Botryotinia fuckeliana B05.10] gi|150845646|gb|EDN20839.1| [Botryotinia fuckeliana B05.10]
  misc_feature (29)..(218): NCBI GI: 85091590 Blast Desc: NCU09029 [Neurospora crassa OR74A] gi|28920370|gb|EAA29740.1| [Neurospora crassa OR74A]
  misc_feature: Useful for introducing or modulating the production of volatile compounds
MYKTVLSVAAAAGAVATPLSSRQVIPNYPPSSTSTGFKLIANVTDPSTDLTPSVDGWEFLGIHTGAGLNDAVLSNEYVGEIFYHNGTAEEIHYGYGSVVTDQGSNPFPVGIYVQSEDEFDQTYPAEHNVHINVGSGTIGVSLSAFPDPYFPLTGPALGSYMACTRIVPYYDSEWTVVRYAYDVYNEETGLYEPVIPEGCTAITLIPQCDTLPALPKNGSISSHEFAAESRCYADVASINWPEYGP

SEQ ID NO: 10192 - DNA, 1375 bp, Muscodor strobelii
  misc_feature: SGI EST ID NO. CUFF.24023.0
  misc_feature: Variant of the nucleotide sequence at SEQ ID NO 10190
ggcgatatcaagagtcaattgtgggtaacataaaaatgtctttctaccaaaaggccacaaacagagctgagcgtagggcaaccaaccaaatcccgattgccagcggcagcgtggggaccgacccggcaagaacggtacacagggcagtaaagctgctaaattaatctcgtgttgctgatgccaagtccttaggtaacactcgtaacggcaacagcaaagacgatctcgcctccaccactacccaaacttgacgatgggtcatgggtgaattggtaattgaactgagatcatgtactttagttatggataccggatcttttgttgatgttgtcgatgtcgaaaatatgttaaatatcgagcacttcgctcgttgaatgaaaggaattcatcacagcatcatcacatcgtcctctcatcctcaacagctctctcatatcacatctcaaaccccgagaataatatctaatatcaacctccaacctccaaaatgtacaagacagtcctctccgtcgcggcagcagccggcgccgtcgccacccctctcagcagccgccaagttattcccaactacccaccatcctcaacctcaacaggcttcaagctaatcgccaacgtcaccgacccatcaactgatctcaccccctcagtcgacggctgggaattcctcggcatccacaccggcgccggcctcaacgacgccgtcctctctaacgaatatgttggcgagatcttctaccacaacggcaccgccgaagaaatccactacggctacggcagcgtcgtgaccgaccagggctccaaccccttcccggtcggcatctatgtgcaatccgaagacgagttcgaccagacctaccccgctgagcacaatgtgcacatcaacgtcggctcgggcaccatcggcgtctctctgtctgccttcccagacccatacttccctctcacgggacccgccctcggatcctacatggcatgcacgcgtatcgtcccttactacgacagcgagtggaccgtcgttcgttatgcttacgatgtttataacgaggagactggtctctatgagcctgttatccctgaggggtgcactgctattactttgatccctcagtgcgatacgctccccgccctgcctaagaatggcagtatcagcagccatgagtttgcggctgagagcaggtgctatgctgatgttgctagcattaactggcctgagtatggaccctagatatgggattgatgagaagtttggatataatggtgctttggatatagatatttcgaatgggttagacaaggtagaaataggcattagatgttgttgatagatgtaattatttaatgttatagaaaagcgagaaaatgatttatactcaac

SEQ ID NO: 10193 - DNA, 954 bp, Muscodor strobelii
  misc_feature: SGI cDNA ID NO. 563223
  misc_feature: Encodes the peptide sequence at SEQ ID NO 10194
atgaacacagacggcgttaaacgtgattcgcttgtgaagattctagattacaccgtcaatctagagtgcgaggacccgagggatagaatctttgcgattcttccagttgttgactggcagcaggaggaactggagcccattgtccctgattatactatcgacagttacgatctccttatggcaattataccatggttgtggtcaacactcaaccaagtacatccctacagacactacttcggccgatgccgaatgctcataaaggccctggagctggagcccggcaatcataaatttcaacgtgctatcgagcagagatatcgcagttttacggtgggggatgccacagagatagggcttgaccattgccgactcgctccggttagttttcgaggatttcagatcgttcacaagaatggagcgcctcgacttactatcctttcctatgatggtgagcatcatgacaaagatcacctgataaattatgacgagtaccaaccctcttggcggtcttccaaatacaaagaactttgcgagtctatcaccccatcgaagaggcctctgctggtcttcagttgggatgataacttttctgtcgtggtgccgcatcatgctcgagccggggactggctgattgcagatgaaggcagatctaacatcaatattcttattctaagagagcagcaacaggggaagttccatattattggcgaagccctaccccttgtgtatccggatatgttctatcggaaggttggcaccaggttcctagtccacttcgacgctgccgatttcatggtactctgccgagacagagctaccaaactgtacctgacgcacgatgtgagcgaaaagtatccgagcgaaatgcatacgagcgaaatggatttgcaaagactcgaaaaccacgtgtgcggctctccgggatcatcctacgcggagttcgcgacgtga

SEQ ID NO: 10194 - protein, 317 aa, Muscodor strobelii
  misc_feature: SGI Peptide ID NO. 563223
  misc_feature (2)..(60): NCBI GI: 156043723 Blast Desc: SS1G_10865 [Sclerotinia sclerotiorum 1980] gi|154695252|gb|EDN94990.1| SS1G_10865 [Sclerotinia sclerotiorum 1980]
MNTDGVKRDSLVKILDYTVNLECEDPRDRIFAILPVVDWQQEELEPIVPDYTIDSYDLLMAIIPWLWSTLNQVHPYRHYFGRCRMLIKALELEPGNHKFQRAIEQRYRSFTVGDATEIGLDHCRLAPVSFRGFQIVHKNGAPRLTILSYDGEHHDKDHLINYDEYQPSWRSSKYKELCESITPSKRPLLVFSWDDNFSVVVPHHARAGDWLIADEGRSNINILILREQQQGKFHIIGEALPLVYPDMFYRKVGTRFLVHFDAADFMVLCRDRATKLYLTHDVSEKYPSEMHTSEMDLQRLENHVCGSPGSSYAEFAT

SEQ ID NO: 10195 - DNA, 4219 bp, Muscodor strobelii
  misc_feature: SGI EST ID NO. CUFF.24227.0
  misc_feature: Variant of the nucleotide sequence at SEQ ID NO 10193
gggcaatgaacacagacggcgttaaacgtgattcgcttgtgaagattctagattacaccgtcaatctagagtgcgaggacccgagggatagaatctttgcgattcttccagttgttgactggcagcaggaggaactggagcccattgtccctgattatactatcgacagttacgatctccttatggcaattataccatggttgtggtcaacactcaaccaagtacatccctacagacactacttcggccgatgccgaatgctcataaaggccctggagctggagcccggcaatcataaatttcaacgtgctatcgagcagagatatcgcagttttacggtgggggatgccacagagatagggcttgaccattgccgactcgctccggttagttttcgaggatttcagatcgttcacaagaatggagcgcctcgacttactatcctttcctatgatggtgagcatcatgacaaagatcacctgataaattatgacgagtaccaaccctcttggcggtcttccaaatacaaagaactttgcgagtctatcaccccatcgaagaggcctctgctggtcttcagttgggatgataacttttctgtcgtggtgccgcatcatgctcgagccggggactggctgattgcagatgaaggcagatctaacatcaatattcttattctaagagagcagcaacaggggaagttccatattattggcgaagccctaccccttgtgtatccggatatgttctatcggaaggttggcaccaggttcctagtccacttcgacgctgccgatttcatggtactctgccgagacagagctaccaaactgtacctgacgcacgatgtgagcgaaaagtatccgagcgaaatgcatacgagcgaaatggatttgcaaagactcgaaaaccacgtgtgcggctctccgggatcatcctacgcggagttcgcgacgtgatatgaaatacagtcgaattatctgttagaagcgaactaggctcatgttgaatcatgagattttatgagatctaatgcgtatgaggaaatgtcctttgcgagcgaaagcgagtagaaatgaaattgcccagaatcaggactgtcaagtctccatgataggtccattgaaatccgcaacacgtcgacagatcatacatatcacatgaatgtctgatgctgatcaatggcatgatttagccccttgatgtagaagatctcatctcggtaacggctcgagaagcacagacaaacgcaacactctgaagaaagacacaagaatggtagacttcgactgataattcgataatagacggaatagtttgctaatactgtagagatatattgctggagctgttaggtgtcgatagcagtaagtgtgtcttctacctatttcgttggtcgcctagcaggggcgcttgaggtggagaggagcacctgcagagatctgtgcgttgccccctaacaacggaaggtccacctgctgtgggaagacgcggtttccatttgtgtaggcgccctgcattccttgggactagtgtatctagccccattgcgcccactgtcactggctgtagacgctggaatcataacactgcgccaaacattctcaacaccaccatcacggggccataatactgccattattgctgctccgagcttggtcctcgagcttcacgacaccttacgacacttctcccccgtgttctctcctcctcctcattactagacgtgtcaattggctcccgtcaccagtcaattgcatggcatcatgtcggtaagagtcgtggcgcgtatccgtccgctcctggagaaggagctcgacaaagacactatcgtccgcgccgccagcaacgacgatagccacacgagcaatgtcgtcaagatcccgaaccccaagaacgaggccgaggagttctcctttgcgttcaacagcgtctacgaccaggctgtcacccaggaagagctgttcactgccgaagttgctcctcacctcaagtctctcttccagggactcgacgtcaccatatttgcttatggcgtaacggggaccggcaagactcacacgatgcgcgggggtctgaagctcgccgaacggggcgtcatccctcgactcctcagcggtgtcttccgtagggccaagaagatcaccaaggactccgagggcaacacctccgtcgtcgtcgccctctcctactacgaaatctacaacgacaaagtattcgacctgctcgagccacccgacaagcgaacaccctccggcttacccctccgtgccgaagccaacggcaagaccgtcgtcgctggtctgtccgaacgcccctgccaagacctcaaggactttgagcgactgtacatcgaagccaacacgaaccgcgtcaccgccgccaccaagctcaatgctcacagcagtagaagtcacgccatcctccgcgtcaaggtcacacaggtcacaggagacatgatccgcgagagcactgcttcagccatcgacttggctggatcagaagacaaccggcgtacagacaatggcaaggaacgtctgatcgagtctgctgccatcaacaagagcctgttcgtgttgagccagtgtatcgatgccatatccagaggcgagaagcgcataccgttcagggaatccaagatgacccgaattctgtcgctcggtcagaacaacggcatcactatcatgatcctcaacctggctcccctccgcagctaccacctcgataccttgagtagtctgaatgtcagctcacgtgccaagcggatcgaggttcgtgagatcgagaacgagattgtctacaagtcggcacctcgacctgccagtaatggtatctcaaacatcgcccgccagcccctccgacctctcgcgaatgcgcataatatcgctactgggacagctgccgcagcatccagcaaaccggcagctgaccgaccagtgaaagccttcaacgtctacaccgacaagctgaagccagtcccttcttcccgaccctccaatatcgctgtcaaacgatctcccaaccccaaagggcacaacaagcgtccttccgattccaacattgacagtcgaccctccaagattggccgtcccgagctacctcgacctgttccaatcgcacgacagatgaagcctctagagctatcccagccccccaagacatccgatccatcgatatccgccgctttgatcgaagctatggtagagaaaaaggtcagtgaaatcttggcggcgcgaacagaggcagctgcccctccacgagaggtgaatgaggatgtacagaagcgtctggaggcactcgagcgacgcattgaagagggacgcgacgacgaggcacgatcagagggcctgcgttttctgctaatggcgcggcagcacaaggagagaggcgaagacagcagtgcccttaagatgtatgagctggcgctgccctactttcccagccaggtcaaactccttggcaagatcgagaagctcaaggctcgcatggccgccaagcgcgcaaatgaccatgtgtctatggaagagccaagtttatccaccactgagcgctggacaccgcggaagagcaagaagtcgcggcagccacaatttgaggcagatgatgattactatggtgctgaagcggatgatgacgatgagagctacatgggcgagaagcagaggaaagtgaagaagcctacacgaaaggcgaaggccagtcccgaaccggtgatagaggagggactgatctcgcagaccctgctagacattgtcaactcgagaaacatctccatgattatggggctccagggctttgggcccaagaaggcaaaagacttggtgcaatatcttgacgcggagctcgacggcggcgatgtcgagtcccttacgcagctccgagctttccctggaatgggtggccggagcgtggatcgcgcttacgagggcctcgtagccggcggcgcttgttagtccgcatgcttgcttgcttttcctttgtggtgcgcgcttgcatagcctgtcttgctggtatgttcttgcatgagaagcagcatttaggaaaaagcgggttattttcttatatacccttggtacggtataccattcatcgcctcccgcgtatggttggctgggtctgcattggcatggcgtttggacttggaattttgatagcatctagcttttcttgctagcttatatgaagggaataggaacttcccacatcctttaagtcgctg

SEQ ID NO: 10196 - DNA, 2187 bp, Muscodor strobelii
  misc_feature: SGI cDNA ID NO. 563224
  misc_feature: Encodes the peptide sequence at SEQ ID NO 10197
atgtcggtaagagtcgtggcgcgtatccgtccgctcctggagaaggagctcgacaaagacactatcgtccgcgccgccagcaacgacgatagccacacgagcaatgtcgtcaagatcccgaaccccaagaacgaggccgaggagttctcctttgcgttcaacagcgtctacgaccaggctgtcacccaggaagagctgttcactgccgaagttgctcctcacctcaagtctctcttccagggactcgacgtcaccatatttgcttatggcgtaacggggaccggcaagactcacacgatgcgcgggggtctgaagctcgccgaacggggcgtcatccctcgactcctcagcggtgtcttccgtagggccaagaagatcaccaaggactccgagggcaacacctccgtcgtcgtcgccctctcctactacgaaatctacaacgacaaagtattcgacctgctcgagccacccgacaagcgaacaccctccggcttacccctccgtgccgaagccaacggcaagaccgtcgtcgctggtctgtccgaacgcccctgccaagacctcaaggactttgagcgactgtacatcgaagccaacacgaaccgcgtcaccgccgccaccaagctcaatgctcacagcagtagaagtcacgccatcctccgcgtcaaggtcacacaggtcacaggagacatgatccgcgagagcactgcttcagccatcgacttggctggatcagaagacaaccggcgtacagacaatggcaaggaacgtctgatcgagtctgctgccatcaacaagagcctgttcgtgttgagccagtgtatcgatgccatatccagaggcgagaagcgcataccgttcagggaatccaagatgacccgaattctgtcgctcggtcagaacaacggcatcactatcatgatcctcaacctggctcccctccgcagctaccacctcgataccttgagtagtctgaatgtcagctcacgtgccaagcggatcgaggttcgtgagatcgagaacgagattgtctacaagtcggcacctcgacctgccagtaatggtatctcaaacatcgcccgccagcccctccgacctctcgcgaatgcgcataatatcgctactgggacagctgccgcagcatccagcaaaccggcagctgaccgaccagtgaaagccttcaacgtctacaccgacaagctgaagccagtcccttcttcccgaccctccaatatcgctgtcaaacgatctcccaaccccaaagggcacaacaagcgtccttccgattccaacattgacagtcgaccctccaagattggccgtcccgagctacctcgacctgttccaatcgcacgacagatgaagcctctagagctatcccagccccccaagacatccgatccatcgatatccgccgctttgatcgaagctatggtagagaaaaaggtcagtgaaatcttggcggcgcgaacagaggcagctgcccctccacgagaggtgaatgaggatgtacagaagcgtctggaggcactcgagcgacgcattgaagagggacgcgacgacgaggcacgatcagagggcctgcgttttctgctaatggcgcggcagcacaaggagagaggcgaagacagcagtgcccttaagatgtatgagctggcgctgccctactttcccagccaggtcaaactccttggcaagatcgagaagctcaaggctcgcatggccgccaagcgcgcaaatgaccatgtgtctatggaagagccaagtttatccaccactgagcgctggacaccgcggaagagcaagaagtcgcggcagccacaatttgaggcagatgatgattactatggtgctgaagcggatgatgacgatgagagctacatgggcgagaagcagaggaaagtgaagaagcctacacgaaaggcgaaggccagtcccgaaccggtgatagaggagggactgatctcgcagaccctgctagacattgtcaactcgagaaacatctccatgattatggggctccagggctttgggcccaagaaggcaaaagacttggtgcaatatcttgacgcggagctcgacggcggcgatgtcgagtcccttacgcagctccgagctttccctggaatgggtggccggagcgtggatcgcgcttacgagggcctcgtagccggcggcgcttgttag

SEQ ID NO: 10197 - protein, 728 aa, Muscodor strobelii
  misc_feature: SGI Peptide ID NO. 563224
  misc_feature (8)..(335): Pfam Id: PF00225 Pfam Desc: Kinesin motor domain
  misc_feature (1)..(722): NCBI GI: 46123913 Blast Desc: FG06334.1 [Gibberella zeae PH-1]
  misc_feature (1)..(725): NCBI GI: 261354695 Blast Desc: kinesin heavy chain [Verticillium albo-atrum VaMs.102]
  misc_feature (1)..(722): NCBI GI: 171680628 Blast Desc: protein product [Podospora anserina] gi|170939941|emb|CAP65167.1| protein product [Podospora anserina]
  misc_feature (1)..(724): NCBI GI: 256732459 Blast Desc: [Nectria haematococca mpVI 77-13-4]
  misc_feature (1)..(723): NCBI GI: 156042468 Blast Desc: SS1G_11031 [Sclerotinia sclerotiorum 1980] gi|154695418|gb|EDN95156.1| SS1G_11031 [Sclerotinia sclerotiorum 1980]
  misc_feature (1)..(722): NCBI GI: 154291982 Blast Desc: BC1G_14918 [Botryotinia fuckeliana B05.10] gi|150846337|gb|EDN21530.1| BC1G_14918 [Botryotinia fuckeliana B05.10]
  misc_feature (4)..(722): NCBI GI: 29421240 Blast Desc: kinesin [Botryotinia fuckeliana]
  misc_feature (1)..(723): NCBI GI: 29421284 Blast Desc: kinesin [Gibberella moniliformis]
  misc_feature (1)..(724): NCBI GI: 39973337 Blast Desc: MGG_07963 [Magnaporthe grisea 70-15] gi|145012782|gb|EDJ97436.1| MGG_07963 [Magnaporthe grisea 70-15]
  misc_feature (67)..(723): NCBI GI: 116178756 Blast Desc: CHGG_00006 [Chaetomium globosum CBS 148.51] gi|88184303|gb|EAQ91771.1| CHGG_00006 [Chaetomium globosum CBS 148.51]
MSVRVVARIRPLLEKELDKDTIVRAASNDDSHTSNVVKIPNPKNEAEEFSFAFNSVYDQAVTQEELFTAEVAPHLKSLFQGLDVTIFAYGVTGTGKTHTMRGGLKLAERGVIPRLLSGVFRRAKKITKDSEGNTSVVVALSYYEIYNDKVFDLLEPPDKRTPSGLPLRAEANGKTVVAGLSERPCQDLKDFERLYIEANTNRVTAATKLNAHSSRSHAILRVKVTQVTGDMIRESTASAIDLAGSEDNRRTDNGKERLIESAAINKSLFVLSQCIDAISRGEKRIPFRESKMTRILSLGQNNGITIMILNLAPLRSYHLDTLSSLNVSSRAKRIEVREIENEIVYKSAPRPASNGISNIARQPLRPLANAHNIATGTAAAASSKPAADRPVKAFNVYTDKLKPVPSSRPSNIAVKRSPNPKGHNKRPSDSNIDSRPSKIGRPELPRPVPIARQMKPLELSQPPKTSDPSISAALIEAMVEKKVSEILAARTEAAAPPREVNEDVQKRLEALERRIEEGRDDEARSEGLRFLLMARQHKERGEDSSALKMYELALPYFPSQVKLLGKIEKLKARMAAKRANDHVSMEEPSLSTTERWTPRKSKKSRQPQFEADDDYYGAEADDDDESYMGEKQRKVKKPTRKAKASPEPVIEEGLISQTLLDIVNSRNISMIMGLQGFGPKKAKDLVQYLDAELDGGDVESLTQLRAFPGMGGRSVDRAYEGLVAGGAC

SEQ ID NO: 10198 - DNA, 4219 bp, Muscodor strobelii; identical to SEQ ID NO: 10195
  misc_feature: SGI EST ID NO. CUFF.24227.0
  misc_feature: Variant of the nucleotide sequence at SEQ ID NO 10196

SEQ ID NO: 10199 - DNA, 735 bp, Muscodor strobelii
  misc_feature: SGI cDNA ID NO. 563225
  misc_feature: Encodes the peptide sequence at SEQ ID NO 10200
atgagaaccctctgcgaaatcatcggaatccccttcggagctacagcgcaagacatggacaccgccctacgtcagcacctcatcgcagctggaagatctcctttcggcgaaatctctgaagtctccagtgaggtcgcagaagcatacaagatcctgagctacatattcacgcgcggagtccacaaccgggaactcttcttcctgacacacgtcaggacagataactccgggatcctcaaccccaaagaggacagcaacgaggccgattcgccagctacgctagagagcgagccagctgagctggagaccgccgatgatcttaagccgcgcatccagagggccgtgaataagctagacgagctctacgatctagatatcgtaggacatgaaaagcactgcgatgaactgcacagggcacttaaccacgtaggcggggagtggcacatcttccgcaaccgtagacttggtccctttcagaagtcatcgaagccttacacgtacccccagaaattcgccctctggtgcgaactaatagccttccgctcctgcatcgccagactcgaagcctacatctcgaccctatcccaaacacgcgaccacatccttcagcaggtgccaggtgcgatcgacacataccactcacaaaaacaggagtcccgcaggatgctccgcgagtgtcgagctgtcgaggattatttggagtggcggacttttaggtatgataatgggcactag

SEQ ID NO: 10200 - protein, 244 aa, Muscodor strobelii
  misc_feature: SGI Peptide ID NO. 563225
MRTLCEIIGIPFGATAQDMDTALRQHLIAAGRSPFGEISEVSSEVAEAYKILSYIFTRGVHNRELFFLTHVRTDNSGILNPKEDSNEADSPATLESEPAELETADDLKPRIQRAVNKLDELYDLDIVGHEKHCDELHRALNHVGGEWHIFRNRRLGPFQKSSKPYTYPQKFALWCELIAFRSCIARLEAYISTLSQTRDHILQQVPGAIDTYHSQKQESRRMLRECRAVEDYLEWRTFRYDNGH

SEQ ID NO: 10201 - DNA, 768 bp, Muscodor strobelii
  misc_feature: SGI cDNA ID NO. 563226
  misc_feature: Encodes the peptide sequence at SEQ ID NO 10202
atgacaaccaacatcaccaaaatgcccaacttctacgaagttctaggcgtgcagcatgacgcgagcctcgagatgattacctcagcattctatgaaattaggctttcacactcgctcggctcaaatactatcaacgatatcgatatctctgagaagatggcatctgatcggtcgtactatgtcgctcttcaggcctatctgactctatgtcatccagtttggcaaggccgatacgatacccacctcaccaacagtgagaatgactcagcaaatagtagtcagagccagcccgaggatgagctcaccgagaagcatgctgctgttcacgccgagctgctcaagtgtgaggacctcaccgatcgctttaataaaatgatcgataatctcaatattgacgagtataagcatatgactttcgctttgtccgcatatttggctgcagtgtgtactaggatggccgtgtaccaatccctatgggacggcttctggagccttcttgttagccctcatctgcttgggcgggctgtaccgtgcgctgttgacaagctagatggatactgtgctagtctcgtgaagaaatatcgtcacatgctgaaggtgctgataacatttgagcgactcataagagacataaccaaagtccagacgcaagtaaacgcagccatcgacaggttcaatactgagatcgatggcatgttttcagaagatggggtagaatggttagaaagattagaggacatgctctgtgaggagggaatcgacgaatag

SEQ ID NO: 10202 - protein, 255 aa, Muscodor strobelii
  misc_feature: SGI Peptide ID NO. 563226
  misc_feature (10)..(31): Pfam Id: PF00226 Pfam Desc: DnaJ domain
MTTNITKMPNFYEVLGVQHDASLEMITSAFYEIRLSHSLGSNTINDIDISEKMASDRSYYVALQAYLTLCHPVWQGRYDTHLTNSENDSANSSQSQPEDELTEKHAAVHAELLKCEDLTDRFNKMIDNLNIDEYKHMTFALSAYLAAVCTRMAVYQSLWDGFWSLLVSPHLLGRAVPCAVDKLDGYCASLVKKYRHMLKVLITFERLIRDITKVQTQVNAAIDRFNTEIDGMFSEDGVEWLERLEDMLCEEGIDE

SEQ ID NO: 10203 - DNA, 843 bp, Muscodor strobelii
  misc_feature: SGI cDNA ID NO. 563227
  misc_feature: Encodes the peptide sequence at SEQ ID NO 10204
atggcaacagctacacaagaacacaatgattattacgaaagacttggcatatcgggcaacgccaaagccgatgacatcgaagaggcatatctcgtactcaaattaaagcacgatctcgactacgtggatgtggccgatccaggcgacaatgatcaatcgttcactcttgcacagcaagcctatgatgtcctgagcaacccgtttctgcgacacttatatgataagtatacctctacttctgagagtgatatggacgaggagattccatcgggaaaagaatccccagacaatgaaaataagcagtcacaaatccagatcgaagatagttatgccgaaatgcacgccaaggtacttcagtgtgaggatctcgctgaccgtatcgagagaataaactggcctatctacgaatacgggaagtcatacagtatatcgtgcataaacaggtcatcttatgcaatcgaattcgaatatcttgatctagagacgacctggcctctcttctggcattttaacttgcggcctcaccaattaggcgaaaacccttgtactccggagacatcagaccgctgctctctgatacttgaagtatacgagaggtgcgtaaagtctctagaagtttacgaagaatattgtaggaaatacgaggaaactattgaggcttttctcagctctattcaaccagagtttgagagaatggcggatgatgtggaaaatacgtatcgatggcgcggaaagttgcacaagttatggtttccggatcaagaaagctcacccgagccttcaacggatggaaatcagtctgaagaggaaggggagcagattcaagaggatgatggacaatga

SEQ ID NO: 10204 - protein, 280 aa, Muscodor strobelii
  misc_feature: SGI Peptide ID NO. 563227
  misc_feature (10)..(74): Pfam Id: PF00226 Pfam Desc: DnaJ domain
  misc_feature (9)..(74): NCBI GI: 256832773 Blast Desc: chaperone DnaJ domain protein [Jonesia denitrificans DSM 20603] gi|256686304|gb|ACV09197.1| chaperone DnaJ domain protein [Jonesia denitrificans DSM 20603]
  misc_feature (7)..(82): NCBI GI: 167752893 Blast Desc: ALIPUT_01155 [Alistipes putredinis DSM 17216] gi|167659962|gb|EDS04092.1| ALIPUT_01155 [Alistipes putredinis DSM 17216]
  misc_feature (5)..(76): NCBI GI: 257440033 Blast Desc: chaperone protein DnaJ [Faecalibacterium prausnitzii A2-165] gi|257197385|gb|EEU95669.1| chaperone protein DnaJ [Faecalibacterium prausnitzii A2-165]
  misc_feature (7)..(75): NCBI GI: 261417300 Blast Desc: chaperone protein DnaJ [Fibrobacter succinogenes subsp. succinogenes S85] gi|261373756|gb|ACX76501.1| chaperone protein DnaJ [Fibrobacter succinogenes subsp. succinogenes S85]
  misc_feature (5)..(76): NCBI GI: 160944957 Blast Desc: FAEPRAM212_02472 [Faecalibacterium prausnitzii M21/2] gi|158442688|gb|EDP19693.1| FAEPRAM212_02472 [Faecalibacterium prausnitzii M21/2]
  misc_feature (10)..(74): NCBI GI: 145347402 Blast Desc: [Ostreococcus lucimarinus CCE9901] gi|144578385|gb|ABO96449.1| [Ostreococcus lucimarinus CCE9901]
  misc_feature (7)..(76): NCBI GI: 253574639 Blast Desc: chaperone DnaJ [Paenibacillus sp. oral taxon 786 str. D14] gi|251845685|gb|EES73693.1| chaperone DnaJ [Paenibacillus sp. oral taxon 786 str. D14]
  misc_feature (10)..(76): NCBI GI: 255284520 Blast Desc: chaperone protein DnaJ [Bryantella formatexigens DSM 14469] gi|255264933|gb|EET58138.1| chaperone protein DnaJ [Bryantella formatexigens DSM 14469]
  misc_feature (9)..(75): NCBI GI: 213959475 Blast Desc: chaperone protein DnaJ 1 [Propionibacterium acnes SK137] gi|213957228|gb|EEB68527.1| chaperone protein DnaJ 1 [Propionibacterium acnes SK137]
  misc_feature (4)..(82): NCBI GI: 116626520 Blast Desc: chaperone DnaJ domain-containing protein [Solibacter usitatus Ellin6076] gi|116229682|gb|ABJ88391.1| chaperone DnaJ domain protein [Candidatus Solibacter usitatus Ellin6076]
MATATQEHNDYYERLGISGNAKADDIEEAYLVLKLKHDLDYVDVADPGDNDQSFTLAQQAYDVLSNPFLRHLYDKYTSTSESDMDEEIPSGKESPDNENKQSQIQIEDSYAEMHAKVLQCEDLADRIERINWPIYEYGKSYSISCINRSSYAIEFEYLDLETTWPLFWHFNLRPHQLGENPCTPETSDRCSLILEVYERCVKSLEVYEEYCRKYEETIEAFLSSIQPEFERMADDVENTYRWRGKLHKLWFPDQESSPEPSTDGNQSEEEGEQIQEDDGQ

SEQ ID NO: 10205 - DNA, 1308 bp, Muscodor strobelii
  misc_feature: SGI cDNA ID NO. 563228
  misc_feature: Encodes the peptide sequence at SEQ ID NO 10206
atgcgtggatatctcagcttggccgtagccactgttgctacattcattacgagctcagtgggcatccctatcgtcgttcacccgggaagtgccaacgacattgttatcacggctgacaacacgatgaatacgacgacaacgaatgccaaacaagcaagtggcagcaatcccatgcagttagatatcgtgaataattttgggagtgacggaatgtacgtctacgtcgatggccacgatgccaacaatgtcccctgcctcttgggaacagacggcaccttcttctatccggacgccgctgggtctgctgttcccattcccatcaacgccagtattgcgtctcctcttggggccatgggctcgactacaactattacccttccagacttcctacaatccgcacgtatctgggttagcgacggccagcttacatttttcactgttgctgatgctatgggaggttcagcaatcgtggaaccggctgtcaccaatcccgaagatccttcggctaatgtcccatggggcttcgtagagttcaatttcatgaacggaactatttacgccaacattagctacgtcgactgggtgggtttagctatgggaatggctttgaccctcgcctccggcgaaacacagacagtaccaggtctgtcatcagacgcactcgacaagatctgcaacgatttgaagactcaagacggcctagacagcgctggatggggtaacctatgcgttgcggatgccaatggaaagacgcttcgtgtcctttctcctaatctctacgtctccgcgaacccatccgcattccaaacctattatgacgactacatcaaccaagtctggacgaaatatgccagcgagccattgatgatcaacacccagatcggaggaaataacacagtctcttgcaaagtggttgacgaccagctcatgtgcgacaacgacaaccgtggctaccctgccccgaccgtagccgacatctggggttgcaattccggcccctttgccatcattgacggtgataacgacatccacagagccattgtaccccgtctctgtgctgcgtttacacgtagcacccttctgttggacggcggaaacatcacaccaaatttaggatcaacgagctactacggcgccgaccccacgaaccattactcccgaattgtgcacaattatgagacgaacaacatcggctatgccttctcatacgacgatgtcagtcccgctggcgagaatgccgccggtgaggtagccggtgatagccctacactcatgcgcattactgtcggtggatggaccgacgcgtaa

SEQ ID NO: 10206 - protein, 435 aa, Muscodor strobelii
  misc_feature: SGI Peptide ID NO. 563228
  misc_feature (24)..(430): NCBI GI: 256726304 Blast Desc: NECHADRAFT_94692 [Nectria haematococca mpVI 77-13-4]
  misc_feature (1)..(431): NCBI GI: 212526330 Blast Desc: conserved [Penicillium marneffei ATCC 18224] gi|210072720|gb|EEA26807.1| conserved [Penicillium marneffei ATCC 18224]
  misc_feature (6)..(431): NCBI GI: 242780568 Blast Desc: conserved [Talaromyces stipitatus ATCC 10500] gi|218719770|gb|EED19189.1| conserved [Talaromyces stipitatus ATCC 10500]
  misc_feature (23)..(431): NCBI GI: 242774018 Blast Desc: glucan endo-1,3-beta-glucosidase precursor, [Talaromyces stipitatus ATCC 10500] gi|218721977|gb|EED21395.1| glucan endo-1,3-beta-glucosidase precursor, [Talaromyces ATCC
  misc_feature (24)..(431): NCBI GI: 46111053 Blast Desc: FG02408.1 [Gibberella zeae PH-1]
  misc_feature (1)..(433): NCBI GI: 255931147 Blast Desc: Pc12g02400 [Penicillium chrysogenum Wisconsin 54-1255] gi|211581749|emb|CAP79867.1| Pc12g02400 [Penicillium chrysogenum Wisconsin 54-1255]
  misc_feature (4)..(431): NCBI GI: 261361626 Blast Desc: glucanase B [Verticillium albo-atrum VaMs.102]
  misc_feature (1)..(431): NCBI GI: 212531815 Blast Desc: glucan endo-1,3-beta-glucosidase precursor, [Penicillium marneffei ATCC 18224] gi|210071428|gb|EEA25517.1| glucan endo-1,3-beta-glucosidase precursor, [Penicillium ATCC
  misc_feature (58)..(431): NCBI GI: 242761177 Blast Desc: conserved [Talaromyces stipitatus ATCC 10500] gi|218723326|gb|EED22743.1| conserved [Talaromyces stipitatus ATCC 10500]
  misc_feature (58)..(431): NCBI GI: 169600283 Blast Desc: SNOG_02972 [Phaeosphaeria nodorum SN15] gi|111068583|gb|EAT89703.1| SNOG_02972 [Phaeosphaeria nodorum SN15]
  misc_feature (60)..(406): SWISSPROT Homolog: EC 3.2.1.39 Glucan endo-1,3-beta-D-glucosidase
MRGYLSLAVATVATFITSSVGIPIVVHPGSANDIVITADNTMNTTTTNAKQASGSNPMQLDIVNNFGSDGMYVYVDGHDANNVPCLLGTDGTFFYPDAAGSAVPIPINASIASPLGAMGSTTTITLPDFLQSARIWVSDGQLTFFTVADAMGGSAIVEPAVTNPEDPSANVPWGFVEFNFMNGTIYANISYVDWVGLAMGMALTLASGETQTVPGLSSDALDKICNDLKTQDGLDSAGWGNLCVADANGKTLRVLSPNLYVSANPSAFQTYYDDYINQVWTKYASEPLMINTQIGGNNTVSCKVVDDQLMCDNDNRGYPAPTVADIWGCNSGPFAIIDGDNDIHRAIVPRLCAAFTRSTLLLDGGNITPNLGSTSYYGADPTNHYSRIVHNYETNNIGYAFSYDDVSPAGENAAGEVAGDSPTLMRITVGGWTDA

SEQ ID NO: 10207 - DNA, 2224 bp, Muscodor strobelii
  misc_feature: SGI EST ID NO. CUFF.24039.0
  misc_feature: Variant of the nucleotide sequence at SEQ ID NO 10205
cagaaccgcatttggcatcactcccgagagcccctgtcgtcccgagggcgatctttgaaaccagaaacaaagtcgaaataaagtccctgtctagtgcgatttcgcagcgcaaggcgtgaagttaagcctatccgctgtggcacggtaatatcgaagtcacaatgcgcaagtttcaaaccacaacgcttcccctggccagaacaggaaggtaagggacgtttttcggtacctcatcctgcaaccacatatcagcaaagacgatggtaaagagaaacgaagagggcgacggggacatggcaggcaacgtttcttacagcctcgcgctgtacgtacccctggctctgtgtgcaaatttaccgctgcacatatattgtacggctgtcctccatccccagatggaatcctatccctttcttggtgtatccgcgagtcgttgtcgacgatagttcttgtttagaactgccactcattgctgctgagctcgctcagcttgtcattcttttaccaagggcgtaccgtgtaccccgatatatacgaaatatactacatacaagaaaagtatatacaccacattctttatcgacaaacgtctggaacatttattcaaaaatgcgtggatatctcagcttggccgtagccactgttgctacattcattacgagctcagtgggcatccctatcgtcgttcacccgggaagtgccaacgacattgttatcacggctgacaacacgatgaatacgacgacaacgaatgccaaacaagcaagtggcagcaatcccatgcagttagatatcgtgaataattttgggagtgacggaatgtacgtctacgtcgatggccacgatgccaacaatgtcccctgcctcttgggaacagacggcaccttcttctatccggacgccgctgggtctgctgttcccattcccatcaacgccagtattgcgtctcctcttggggccatgggctcgactacaactattacccttccagacttcctacaatccgcacgtatctgggttagcgacggccagcttacatttttcactgttgctgatgctatgggaggttcagcaatcgtggaaccggctgtcaccaatcccgaagatccttcggctaatgtcccatggggcttcgtagagttcaatttcatgaacggaactatttacgccaacattagctacgtcgactgggtgggtttagctatgggaatggctttgaccctcgcctccggcgaaacacagacagtaccaggtctgtcatcagacgcactcgacaagatctgcaacgatttgaagactcaagacggcctagacagcgctggatggggtaacctatgcgttgcggatgccaatggaaagacgcttcgtgtcctttctcctaatctctacgtctccgcgaacccatccgcattccaaacctattatgacgactacatcaaccaagtctggacgaaatatgccagcgagccattgatgatcaacacccagatcggaggaaataacacagtctcttgcaaagtggttgacgaccagctcatgtgcgacaacgacaaccgtggctaccctgccccgaccgtagccgacatctggggttgcaattccggcccctttgccatcattgacggtgataacgacatccacagagccattgtaccccgtctctgtgctgcgtttacacgtagcacccttctgttggacggcggaaacatcacaccaaatttaggatcaacgagctactacggcgccgaccccacgaaccattactcccgaattgtgcacaattatgagacgaacaacatcggctatgccttctcatacgacgatgtcagtcccgctggcgagaatgccgccggtgaggtagccggtgatagccctacactcatgcgcattactgtcggtggatggaccgacgcgtaaaggaggcaatatctaattagtcaaagaggacttggggtttcattgcacagtttgctggggcaggttgttgtatcatcactggggtctcatgcatcacttggagttgtatacctacatcgcatggggggcacagagaacggccccgggctggtttgtcattcattgtacatataggatcttgcatcgagcaagggctgcattcggtacatactagaatcggtacataaattcgcggcttggaaatgccaatgaacatatttctccatataatgcgcacattgctgtgtccgttttgcgctttgtattg

SEQ ID NO: 10208 - DNA, 1293 bp, Muscodor strobelii
  misc_feature: SGI cDNA ID NO. 563229
  misc_feature: Elevated expression when VOC is produced
  misc_feature: Encodes the peptide sequence at SEQ ID NO 10209
atggcaccggcaattccagatctatcgagcctcacgcccgctcaacaagaggcgcttctaaacgggccagcccttgcgcccccggcaggcgtaacgcctgatttcaatcatcccccaaatcaaaattggataggcatatttgccgttgtcgtgtgcctccttgcgactgtcgtggctgctacgctgagggcatacgccaaaatcgtgtgcttgaagaaagttcgcatcgaagattatctagcagctgctgtattagggacctatggtggcagcatctactgctgcttgtggatagtcgacaatacgggcctcttcgtacatcagtgggatgtgcgattaaaagttataccagatatgctctatatattccacattggagcaaacctatgcgcagtcaccatcttggtcttgaaagccgcaatactgttagaatggatccggattttcgtgccatacgggactcgaaactctttcttctggacttgctcgactgttatgattcttcatacagtgttccacgcagcttggatcattactgagaacctggcctgttttccacatgaaaagatctggaacgtactcattccttatggaacgtgcatagacgtcaatggtctgtatgcccctgctgcggcagtcaatcttgccgcggatatcgtcatcttcgtccttccgcagaaggctatctggtccttgcagatgtcaaggaagaacaagattggcgtatcgatgatgttcactatcgggtttcttgcttgtttagctgctacactacgattatacgcatccattattttctatcgttcagatgatcaaaactacacagcggctgcaatgtacctttgggtccttgctgaaatgacatgcctattcctggtgtactgcattcccgcgatccccaaggcattctccgatcatttagaccttcgaagtagagtcaggacactcatcccattgtctttctccggttggcacacaaagtcggatgacacaggctctggattctccagacaaaaaagctttatcaggaggccgcctgctgcgggtttctatcgccaatacggtgagaatgttagtgacatcttgaagacgccctctatcaagtccaccaggggtcccatcacggagatcagggcgaataaccacggtcatgatggtcgcacgtatcggggtccggttggaatactctgcaccacggaatttacagcggagattactcgagcgaatgatttttccactgttactgaagggaacaatacgtatcagcagtatcagtggtccatgatgcattga

SEQ ID NO: 10209 - protein, 430 aa, Muscodor strobelii
  misc_feature: SGI Peptide ID NO. 563229
  misc_feature (20)..(425): NCBI GI: 46118221 Blast Desc: FG04693.1 [Gibberella zeae PH-1]
  misc_feature (20)..(305): NCBI GI: 256727941 Blast Desc: NECHADRAFT_26479 [Nectria haematococca mpVI 77-13-4]
  misc_feature (15)..(337): NCBI GI: 145607555 Blast Desc: MGG_04339 [Magnaporthe grisea 70-15] gi|145015080|gb|EDJ99648.1| MGG_04339 [Magnaporthe grisea 70-15]
  misc_feature (11)..(406): NCBI GI: 169781106 Blast Desc: [Aspergillus oryzae RIB40] gi|83773758|dbj|BAE63883.1| protein product [Aspergillus oryzae]
  misc_feature (29)..(406): NCBI GI: 238500906 Blast Desc: conserved [Aspergillus flavus NRRL3357] gi|220691924|gb|EED48271.1| conserved [Aspergillus flavus NRRL3357]
  misc_feature (10)..(419): NCBI GI: 256731204 Blast Desc: NECHADRAFT_85215 [Nectria haematococca mpVI 77-13-4]
  misc_feature (15)..(302): NCBI GI: 212534224 Blast Desc: conserved [Penicillium marneffei ATCC 18224] gi|210069667|gb|EEA23757.1| conserved [Penicillium marneffei ATCC 18224]
  misc_feature (98)..(349): NCBI GI: 238505010 Blast Desc: conserved [Aspergillus flavus NRRL3357] gi|220689848|gb|EED46198.1| conserved [Aspergillus flavus NRRL3357]
  misc_feature (86)..(301): NCBI GI: 145248463 Blast Desc: An13g03450 [Aspergillus niger] gi|134081233|emb|CAK41741.1| protein product [Aspergillus niger]
  misc_feature (24)..(405): NCBI GI: 156057637 Blast Desc: SS1G_04550 [Sclerotinia sclerotiorum 1980] gi|154702335|gb|EDO02074.1| SS1G_04550 [Sclerotinia sclerotiorum 1980]
  misc_feature: Useful for introducing or modulating the production of volatile compounds
MAPAIPDLSSLTPAQQEALLNGPALAPPAGVTPDFNHPPNQNWIGIFAVVVCLLATVVAATLRAYAKIVCLKKVRIEDYLAAAVLGTYGGSIYCCLWIVDNTGLFVHQWDVRLKVIPDMLYIFHIGANLCAVTILVLKAAILLEWIRIFVPYGTRNSFFWTCSTVMILHTVFHAAWIITENLACFPHEKIWNVLIPYGTCIDVNGLYAPAAAVNLAADIVIFVLPQKAIWSLQMSRKNKIGVSMMFTIGFLACLAATLRLYASIIFYRSDDQNYTAAAMYLWVLAEMTCLFLVYCIPAIPKAFSDHLDLRSRVRTLIPLSFSGWHTKSDDTGSGFSRQKSFIRRPPAAGFYRQYGENVSDILKTPSIKSTRGPITEIRANNHGHDGRTYRGPVGILCTTEFTAEITRANDFSTVTEGNNTYQQYQWSMMH

SEQ ID NO: 10210 - DNA, 2966 bp, Muscodor strobelii
  misc_feature: SGI EST ID NO. CUFF.24060.0
  misc_feature: Variant of the nucleotide sequence at SEQ ID NO 10208
ggagcataccatctttgggttgctctgttaatgtcaccatgtccttgcgtccgtagaaaaccatcaagcactggtgatcaagactcacataacggattcggtgcccttcacattccaccaaaccttcatcgagcaacgacatccttgaatgtctcgtgatggttgggggcggaccaactgcagaatgcagttgcattcctctacccacagcgtcgaaagtccaacgctctgaacaccgacaagatacggcaaagtgccaatctcaagaaatcaagaacgcaatacgatcggaatgaaggcaacaataatgattattcatggttctaatgccggggttatttgagaatagtggattaggttgtggtcgtatcattcggatatgtatgtagatgctgttggaattagaattgttcgcgtcggtgctctctggactattgtgtacagcttggcgggtaattctgtatcgacatggacggacctcacgagcgattcaaggccaattgcgacaaaacaaagacgaaactgagtgatggcaccggcaattccagatctatcgagcctcacgcccgctcaacaagaggcgcttctaaacgggccagcccttgcgcccccggcaggcgtaacgcctgatttcaatcatcccccaaatcaaaattggataggcatatttgccgttgtcgtgtgcctccttgcgactgtcgtggctgctacgctgagggcatacgccaaaatcgtgtgcttgaagaaagttcgcatcgaagattatctagcagctgctgtattagggacctatggtggcagcatctactgctgcttgtggatagtcgacaatacgggcctcttcgtacatcagtgggatgtgcgattaaaagttataccagatatgctctatatattccacattggagcaaacctatgcgcagtcaccatcttggtcttgaaagccgcaatactgttagaatggatccggattttcgtgccatacgggactcgaaactctttcttctggacttgctcgactgttatgattcttcatacagtgttccacgcagcttggatcattactgagaacctggcctgttttccacatgaaaagatctggaacgtactcattccttatggaacgtgcatagacgtcaatggtctgtatgcccctgctgcggcagtcaatcttgccgcggatatcgtcatcttcgtccttccgcagaaggctatctggtccttgcagatgtcaaggaagaacaagattggcgtatcgatgatgttcactatcgggtttcttgcttgtttagctgctacactacgattatacgcatccattattttctatcgttcagatgatcaaaactacacagcggctgcaatgtacctttgggtccttgctgaaatgacatgcctattcctggtgtactgcattcccgcgatccccaaggcattctccgatcatttagaccttcgaagtagagtcaggacactcatcccattgtctttctccggttggcacacaaagtcggatgacacaggctctggattctccagacaaaaaagctttatcaggaggccgcctgctgcgggtttctatcgccaatacggtgagaatgttagtgacatcttgaagacgccctctatcaagtccaccaggggtcccatcacggagatcagggcgaataaccacggtcatgatggtcgcacgtatcggggtccggttggaatactctgcaccacggaatttacagcggagattactcgagcgaatgatttttccactgttactgaagggaacaatacgtatcagcagtatcagtggtccatgatgcattgagagccctgcactgcgattcaccttcttaccggactgaattcgagtcatacgacttatcgatctgtgttagcataggttagcatttgcaactatcggtgattcttggcattcatcattaaaatcatcttgaatgatatgctaaatgctaagatgctctgggctgcttaaagctgggcgaccgcaagaaatcgtgacaagcagctcagctcgtaatacgctacgtttgaaataatgctagacacaagccaccgaaccgcctgctattcagcgtcaagcgatttgctacgttgttcatgctcctcggagatctcgagcagctgaagcccttctcttggcattgaccgttggcgaatgtcaatgccccaagcgcctatgacgccaaaagcgccattggtgcgagcggcggccgacacctccaagcggccaatagctgcaaaccttataacaaaatttctatttcgggtcgatcttccatgatcaagtggcttttcaagcgggatggatgtgcgacggttcccgttcacttacctgggtatctggttgagcaacgggcggattagctacgaagcaatcaagcaaggcatgtgaagtgggacaacgttgcgattcaacgatttgagattgggtttatagaactgcttggaatgtgacaccaattcatcgctaattcgttgtttagtaggtgtcttgaagactaaggtgaggagtaagttcaaggccaagactgatagcccatatcgctgaaacgtttcttcaacgttctttgtggccaacattcagcccccgatctccatattctcttggctgtggtcgtctagctcggatgaaaaccattattcgagactccgcggaacttacgttgcacataatcgcgggtgagaggtgaagatgggacgacaaagcgggatcctcgccatccccacagacggacagacagactgaaggacgttcaagatgctgctggcgtacgcgattgcaactcgggggctagaaattgggaattgttcaaccatcatacgattcgatgcataacatccaatcgcagctttggagatcatggtgataccagatgtgctgcgatatgacactgcatgtcagattctttaacgaggctcctcatactgcacctagtgctatttattcg

SEQ ID NO: 10211 - DNA, 1674 bp, Muscodor strobelii
  misc_feature: SGI cDNA ID NO. 563230
  misc_feature: Elevated expression when VOC is produced
  misc_feature: Encodes the peptide sequence at SEQ ID NO 10212
atggcgacgtcgacgacatccagagccacctctctgttggattccaacgcaagtatcaacagtattgagaagctccgggaacgaaacccatcggcagacgaggcccaacggaagccagaggtagaatggcagccttccagacatgaaaagatcatcatatttaccatggctataacaagccttgttgtggcacttgatgcctctatcatcataacaccactttccaccattatccagagcctcggaggaaacgccactcaagcattctggataggtacatcgtacttactcgtcaatgccgtcacgatgccagtcatctgcgccattagcgacgtaatcgggcgccccatatgtttgatattttcgctcatcgcatttaccattggcaccgctctctgtgcgacctcacacaacgttggacagatgctcgttggtcgatcaatccaaggagttgggggtggtggcattcacagtctgggcctcgtcattcaaacggatatcgtgccattgcgttttcgacctaagtggtacggcgtaacacttggcttctgggctctgggacttgctgttggaccgatcatcggcggcgctgttgtggacagaactacctggagatggatattctatctcatgttccccatcttggccttcggattggtcgctgtcccgttcctgctcactctgaagcccagagaggcaacggtcaaggaaaaaattgctcgaatcgactggattggttcagtgatattcaccggatctgcaacttccttcttgattgcagtttcttggggtggtacagagtacgattggcaaagcgttcagactcttgtcccactcattgtcggcttccttggtttggtcacaaccgttgtgtacgaggccaaatgggcacagaacccgtttctgcggcgtagtctgtatcatgacacatcttctactattgtgtatgtggcaggatgtgttcaaggactcgtgatgtacggtttgctgtattacggccccttttacttcttgtcggtcaagcaattttctccacttttgactggcgtcgccatggctcccgccacgttgacagtttcgactggaggaatcatttgcggtcgcctggtgacacggttcaacaactatcgctggtttgttgttataggctggcttgtagctagtatcggcgcaggtctctttgtcgtctggccatacaataatagcgcgccggtttgggtcatctcataccttgtcaccggcaccggtcatggcctagtcctcaatgcacaaaactttgcctcgcaagctaactgcaagccgggtgacgaggcatcagctgctgcaatgtatgcctttgcccgccaatttgggatggcacttggcgttggcattggaggcacgacatttcagaatgttatgtcgctcaagctgcgatggctaggcctccccaccgagattgcaaaggacgcagagggttatgtgagcgtcatccctacgctgtctggcgaattcaagagccatatcattgatgcctataattatggcttcatgggcgtatactctttctatctcgccatttctgtggtggcgctcgtcatcgctacactgttcatcaagaactatgacctgacgcgcgctcaacaaagcgagcacacactcaagccggtcagacggttgtcaattcgcaaataa

SEQ ID NO: 10212 - protein, 557 aa, Muscodor strobelii
  misc_feature: SGI Peptide ID NO. 563230
  misc_feature (56)..(456): Pfam Id: PF07690 Pfam Desc: Major Facilitator Superfamily
  misc_feature (108)..(156): Pfam Id: PF00083 Pfam Desc: Sugar (and other) transporter
  misc_feature (16)..(548): NCBI GI: 164425733 Blast Desc: NCU10910 [Neurospora crassa OR74A] gi|157071040|gb|EDO65171.1| [Neurospora crassa OR74A]
  misc_feature (36)..(557): NCBI GI: 225558258 Blast Desc: conserved [Ajellomyces capsulatus G186AR]
  misc_feature (27)..(548): NCBI GI: 212539462 Blast Desc: conserved [Penicillium marneffei ATCC 18224] gi|210067185|gb|EEA21277.1| conserved [Penicillium marneffei ATCC 18224]
  misc_feature (4)..(514): NCBI GI: 171679820 Blast Desc: protein product [Podospora anserina] gi|170939536|emb|CAP64763.1| protein product [Podospora anserina]
  misc_feature (31)..(549): NCBI GI: 242804434 Blast Desc: efflux pump antibiotic resistance protein, [Talaromyces stipitatus ATCC 10500] gi|218717719|gb|EED17140.1| efflux pump antibiotic resistance protein, [Talaromyces ATCC
  misc_feature (75)..(548): NCBI GI: 171678719 Blast Desc: protein product [Podospora anserina] gi|170937429|emb|CAP62087.1| protein product [Podospora anserina]
  misc_feature (25)..(547): NCBI GI: 116204167 Blast Desc: CHGG_09967 [Chaetomium globosum CBS 148.51] gi|88176095|gb|EAQ83563.1| CHGG_09967 [Chaetomium globosum CBS 148.51]
  misc_feature (1)..(552): NCBI GI: 67525613 Blast Desc: AN3264.2 [Aspergillus nidulans FGSC A4] gi|40743983|gb|EAA63165.1| AN3264.2 [Aspergillus nidulans FGSC A4] gi|259485769|tpe|CBF83072.1| TPA: MFS multidrug transporter,
  misc_feature (20)..(554): NCBI GI: 261197782 Blast Desc: MFS multidrug transporter [Ajellomyces dermatitidis SLH14081] gi|239595256|gb|EEQ77837.1| MFS multidrug transporter [Ajellomyces dermatitidis SLH14081]
  misc_feature (37)..(550): NCBI GI: 240277213 Blast Desc: MFS multidrug transporter [Ajellomyces capsulatus H143]
  misc_feature: Useful for introducing or modulating the production of volatile compounds
MATSTTSRATSLLDSNASINSIEKLRERNPSADEAQRKPEVEWQPSRHEKIIIFTMAITSLVVALDASIIITPLSTIIQSLGGNATQAFWIGTSYLLVNAVTMPVICAISDVIGRPICLIFSLIAFTIGTALCATSHNVGQMLVGRSIQGVGGGGIHSLGLVIQTDIVPLRFRPKWYGVTLGFWALGLAVGPIIGGAVVDRTTWRWIFYLMFPILAFGLVAVPFLLTLKPREATVKEKIARIDWIGSVIFTGSATSFLIAVSWGGTEYDWQSVQTLVPLIVGFLGLVTTVVYEAKWAQNPFLRRSLYHDTSSTIVYVAGCVQGLVMYGLLYYGPFYFLSVKQFSPLLTGVAMAPATLTVSTGGIICGRLVTRFNNYRWFVVIGWLVASIGAGLFVVWPYNNSAPVWVISYLVTGTGHGLVLNAQNFASQANCKPGDEASAAAMYAFARQFGMALGVGIGGTTFQNVMSLKLRWLGLPTEIAKDAEGYVSVIPTLSGEFKSHIIDAYNYGFMGVYSFYLAISVVALVIATLFIKNYDLTRAQQSEHTLKPVRRLSIRK

SEQ ID NO: 10213 - DNA, 2724 bp, Muscodor strobelii
  misc_feature: SGI EST ID NO. CUFF.24072.0
  misc_feature: Variant of the nucleotide sequence at SEQ ID NO 10211
ggttccattacatcagctaagacgttgtgctaagaccttcgaataagctgaacccgactagctcgtatgcacagatacacctacgaccaaaattccacaacgttcatcccaaaatatcaaaacgtggagaaaagcatccgtgaatcccgttgcaccgctgcacggattagatttccacttgcagacatgatgatggaaacctacttgtacttcccagcaagggttgtctgggaccactcatgctcacatgtgataccttgtaccgataccagtaattgtgcgttgagccaactggcgatacccatgcacaaagaactaatagacagacccacggagtagcctggacaatatcttagccacgaagttaaagggcatccattgtatctcgggctatagagacatgatataataacctgagcctcttcccactcaagctaccaggaacgagtgtttcaaagatgaagtcataaacttaccttataagctccgactcacctgcacgattaccattgagcttcgtcttcactgcatgcatcgtagtcatggcgacgtcgacgacatccagagccacctctctgttggattccaacgcaagtatcaacagtattgagaagctccgggaacgaaacccatcggcagacgaggcccaacggaagccagaggtagaatggcagccttccagacatgaaaagatcatcatatttaccatggctataacaagccttgttgtggcacttgatgcctctatcatcataacaccactttccaccattatccagagcctcggaggaaacgccactcaagcattctggataggtacatcgtacttactcgtcaatgccgtcacgatgccagtcatctgcgccattagcgacgtaatcgggcgccccatatgtttgatattttcgctcatcgcatttaccattggcaccgctctctgtgcgacctcacacaacgttggacagatgctcgttggtcgatcaatccaaggagttgggggtggtggcattcacagtctgggcctcgtcattcaaacggatatcgtgccattgcgttttcgacctaagtggtacggcgtaacacttggcttctgggctctgggacttgctgttggaccgatcatcggcggcgctgttgtggacagaactacctggagatggatattctatctcatgttccccatcttggccttcggattggtcgctgtcccgttcctgctcactctgaagcccagagaggcaacggtcaaggaaaaaattgctcgaatcgactggattggttcagtgatattcaccggatctgcaacttccttcttgattgcagtttcttggggtggtacagagtacgattggcaaagcgttcagactcttgtcccactcattgtcggcttccttggtttggtcacaaccgttgtgtacgaggccaaatgggcacagaacccgtttctgcggcgtagtctgtatcatgacacatcttctactattgtgtatgtggcaggatgtgttcaaggactcgtgatgtacggtttgctgtattacggccccttttacttcttgtcggtcaagcaattttctccacttttgactggcgtcgccatggctcccgccacgttgacagtttcgactggaggaatcatttgcggtcgcctggtgacacggttcaacaactatcgctggtttgttgttataggctggcttgtagctagtatcggcgcaggtctctttgtcgtctggccatacaataatagcgcgccggtttgggtcatctcataccttgtcaccggcaccggtcatggcctagtcctcaatgcacaaaactttgcctcgcaagctaactgcaagccgggtgacgaggcatcagctgctgcaatgtatgcctttgcccgccaatttgggatggcacttggcgttggcattggaggcacgacatttcagaatgttatgtcgctcaagctgcgatggctaggcctccccaccgagattgcaaaggacgcagagggttatgtgagcgtcatccctacgctgtctggcgaattcaagagccatatcattgatgcctataattatggcttcatgggcgtatactctttctatctcgccatttctgtggtggcgctcgtcatcgctacactgttcatcaagaactatgacctgacgcgcgctcaacaaagcgagcacacactcaagccggtcagacggttgtcaattcgcaaataagatagatatggcacaaaaaagagtgacttcagtttcaagatgcggcgagcatggtggatataccgacacggcgtcttttggattatatgattgggagatgactgcagaattatatttcctgaggtcgagtttcgagcattaaaacacgtagagaatagttagaaacaagacttactaagatgaaggtattctctacagttgccacaggtgcgctcatccctactgggaagcttctactgacccgtagattaactaaagtgcagtaagtgaaggatttcgttccaaaacaatctcgcctctgtcattccgcaacatcacactctactgtgagatgagaaagtggggccgtgtcgcgtggctcgcgcccgttaggcttcggtccgtgccactatcatcccctacctagcctagaacccgaagaccctatgccaaagtcaagctgttggataccagtactctgccacaagaggtgcgaccataatctagaccgaccccatggctctttgtg

SEQ ID NO: 10214 - DNA, 546 bp, Muscodor strobelii
  misc_feature: SGI cDNA ID NO. 563231
  misc_feature: Encodes the peptide sequence at SEQ ID NO 10215
atggcgcccttagagttgctctctgagctaggtcggcgagatcaggtgttgattggcatcggtggtatcttgattgcgatttgggtcattcaacagctcttcttcacgattcgttacccatcaaatcttcctcgcttcggtagccgctggaaataccacactgacactctcgggctatacagacaagtctgggagaactactcaaagaaaggcaaaacggtcctggtacccggcctgctttttcacgacgatgtgttggttccgccttccgcaatgcgatggttgacacgccagcctgagagtctcatttcagcgtctgccgcgcaggtggaattgctgcaaccaggctatggcttcggacatgataagttgattgatgatccatggcatgctatgctggtcaagacggatctgaacgcaatcttagaaaatgtctgcgctgctatgaccgatgaattgggcgtcgcaatcgatagtcactttggcacggacactaacgactggacggagttctctctcttctgccgactattcggcggatcgtag

SEQ ID NO: 10215 - protein, 181 aa, Muscodor strobelii
  misc_feature: SGI Peptide ID NO. 563231
  misc_feature (29)..(174): NCBI GI: 115395914 Blast Desc: conserved [Aspergillus terreus NIH2624] gi|114193165|gb|EAU34865.1| conserved [Aspergillus terreus NIH2624]
  misc_feature (15)..(173): NCBI GI: 261355409 Blast Desc: cytochrome P450 [Verticillium albo-atrum VaMs.102]
  misc_feature (17)..(174): NCBI GI: 67526079 Blast Desc: AN3497.2 [Aspergillus nidulans FGSC A4] gi|40739868|gb|EAA59058.1| AN3497.2 [Aspergillus nidulans FGSC A4] gi|259481991|tpe|CBF76034.1| TPA: cytochrome P450, (Eurofung)
  misc_feature (37)..(173): NCBI GI: 256720602 Blast Desc: NECHADRAFT_50293 [Nectria haematococca mpVI 77-13-4]
  misc_feature (17)..(173): NCBI GI: 46134111 Blast Desc: FG09195.1 [Gibberella zeae PH-1]
  misc_feature (4)..(173): NCBI GI: 118026356 Blast Desc: [Cordyceps bassiana]
  misc_feature (18)..(173): NCBI GI: 225554652 Blast Desc: cytochrome P450 [Ajellomyces capsulatus G186AR]
  misc_feature (21)..(173): NCBI GI: 240280621 Blast Desc: conserved [Ajellomyces capsulatus H143]
  misc_feature (21)..(173): NCBI GI: 154277996 Blast Desc: [Ajellomyces capsulatus NAm1] gi|150413410|gb|EDN08793.1| [Ajellomyces capsulatus NAm1]
  misc_feature (21)..(173): NCBI GI: 225560834 Blast Desc: conserved [Ajellomyces capsulatus G186AR]
MAPLELLSELGRRDQVLIGIGGILIAIWVIQQLFFTIRYPSNLPRFGSRWKYHTDTLGLYRQVWENYSKKGKTVLVPGLLFHDDVLVPPSAMRWLTRQPESLISASAAQVELLQPGYGFGHDKLIDDPWHAMLVKTDLNAILENVCAAMTDELGVAIDSHFGTDTNDWTEFSLFCRLFGGS

SEQ ID NO: 10216 - DNA, 651 bp, Muscodor strobelii
  misc_feature: SGI cDNA ID NO. 563232
  misc_feature: Encodes the peptide sequence at SEQ ID NO 10217
atgccaacgcgcgacgactacgaagcagcgggcaaagtgagccttgcaacaccagaggatatcgatgcattaattcccatattctgggaggcgttcagcggaccagccgagtcgaccttccctcacacagacggcgggcgtcgatggctagagcgcagtttcgaaaattttcttgggcgacagagttactttcggcctgagtgtcgagtccccgttgtacgaaatgctaatgggcggccggtgtcgttcgcgatcatccacattgtgaagccggggcaaacagtcgtaggcaactcatggaagcgccgctggagtcgtgccgaggacctaaaaggtgttagtgaggagcggctgactgcgttctttgagcctatggctagggcgcatcatcttgttgtagggaaggagggacatgtgttcgtcgaattgttggtcacaaaagccaactcgcggaacaaagggtatgcctccgcgctcatgggctgggtagtgaagctcgcagacgagcttgactatggcgcgtatctggatggtggtggacgaggcatgcatatttgtgagcgcgctggattcaaggtcgaagatatagaggctcgatacggaggcccgccgccgtgccttcctcttttgaggccgcacaagattaagtaa

SEQ ID NO: 10217 - protein, 216 aa, Muscodor strobelii
  misc_feature: SGI Peptide ID NO. 563232
  misc_feature (72)..(192): Pfam Id: PF00583 Pfam Desc: Acetyltransferase (GNAT) family
  misc_feature (9)..(191): NCBI GI: 145611542 Blast Desc: MGG_00308 [Magnaporthe grisea 70-15] gi|145018811|gb|EDK03090.1| MGG_00308 [Magnaporthe grisea 70-15]
  misc_feature (10)..(201): NCBI GI: 256731591 Blast Desc: NECHADRAFT_85185 [Nectria haematococca mpVI 77-13-4]
  misc_feature (13)..(191): NCBI GI: 255941430 Blast Desc: Pc16g11840 [Penicillium chrysogenum Wisconsin 54-1255] gi|211586107|emb|CAP93854.1| Pc16g11840 [Penicillium chrysogenum Wisconsin 54-1255]
  misc_feature (12)..(199): NCBI GI: 238490860 Blast Desc: conserved [Aspergillus flavus NRRL3357] gi|220697080|gb|EED53421.1| conserved [Aspergillus flavus NRRL3357]
  misc_feature (12)..(191): NCBI GI: 169772931 Blast Desc: [Aspergillus oryzae RIB40] gi|83768795|dbj|BAE58932.1| protein product [Aspergillus oryzae]
  misc_feature (16)..(193): NCBI GI: 70983686 Blast Desc: acetyltransferase, GNAT family family [Aspergillus fumigatus Af293] gi|66844996|gb|EAL85332.1| acetyltransferase, GNAT family family [Aspergillus fumigatus Af293]
  misc_feature (16)..(211): NCBI GI: 256719809 Blast Desc: NECHADRAFT_65036 [Nectria haematococca mpVI 77-13-4] gi|256730431|gb|EEU43783.1| NECHADRAFT_73792 [Nectria haematococca mpVI 77-13-4]
  misc_feature (12)..(196): NCBI GI: 145234893 Blast Desc: An03g01940 [Aspergillus niger] gi|134057771|emb|CAK38166.1| protein product [Aspergillus niger]
  misc_feature (16)..(202): NCBI GI: 119484944 Blast Desc: acetyltransferase, GNAT family family [Neosartorya fischeri NRRL 181] gi|119410270|gb|EAW20217.1| acetyltransferase, GNAT family family [Neosartorya fischeri NRRL 181]
  misc_feature (12)..(211): NCBI GI: 145259344 Blast Desc: An04g09830 [Aspergillus niger] gi|134074962|emb|CAK39042.1| protein product [Aspergillus niger]
MPTRDDYEAAGKVSLATPEDIDALIPIFWEAFSGPAESTFPHTDGGRRWLERSFENFLGRQSYFRPECRVPVVRNANGRPVSFAIIHIVKPGQTVVGNSWKRRWSRAEDLKGVSEERLTAFFEPMARAHHLVVGKEGHVFVELLVTKANSRNKGYASALMGWVVKLADELDYGAYLDGGGRGMHICERAGFKVEDIEARYGGPPPCLPLLRPHKIK

SEQ ID NO: 10218 - DNA, 2805 bp, Muscodor strobelii
  misc_feature: SGI EST ID NO. CUFF.24118.0
  misc_feature: Variant of the nucleotide sequence at SEQ ID NO 10216
gggcggacactaccacaatggtcatcccaccatcttcgaactctaaaatcatcttgaaacgagcaaaagagcaggtcgaagttctgggttggttgctggcttcgaaaacagggcgcatcgcgttcgatgacgacgttgcagtagcggctcttctcttttgactacaagggtgacgcccatgcctaggttagaatcttggaaattcaagccacattttgaacggtttctcaagagtaattccactagagttggggggtatattacattgcctactttgaaactcgtcgttgactatgtacctttaatgcctgtgaccttttccgaatcctcgataccgctacttgaagccgtggaatagcgcaaattgcgttctctcagactatttcgaggaattgaccatgccaacgcgcgacgactacgaagcagcgggcaaagtgagccttgcaacaccagaggatatcgatgcattaattcccatattctgggaggcgttcagcggaccagccgagtcgaccttccctcacacagacggcgggcgtcgatggctagagcgcagtttcgaaaattttcttgggcgacagagttactttcggcctgagtgtcgagtccccgttgtacgaaatgctaatgggcggccggtgtcgttcgcgatcatccacattgtgaagccggggcaaacagtcgtaggcaactcatggaagcgccgctggagtcgtgccgaggacctaaaaggtgttagtgaggagcggctgactgcgttctttgagcctatggctagggcgcatcatcttgttgtagggaaggagggacatgtgttcgtcgaattgttggtcacaaaagccaactcgcggaacaaagggtatgcctccgcgctcatgggctgggtagtgaagctcgcagacgagcttgactatggcgcgtatctggatggtggtggacgaggcatgcatatttgtgagcgcgctggattcaaggtcgaagatatagaggctcgatacggaggcccgccgccgtgccttcctcttttgaggccgcacaagattaagtaagagcgaggaaagattttggcagaagagcacaagctcgtatgaatgctatccgcttgtagaagttgcgatgttttgggatgacaagaagaagcaataccaatgaggaatatgccggcttggagaagaatcatggcaatactaataattcgaccgtttcttcatcgctgggtgtgatggtctggaaggcatgaggagctcatctagcaacagagatacgagtaatgagttttataatcggtatcatattgaatcgtcagacctgttgtctgttcctagcgatcattgtcgctgttctgtcgccttaagcatacacgacgccgagggtataactctacctctagatgcaccaaatggccatccataacacgccatttgcccaaacccgctcttcatgctgacttccttcgctgggaatgcgaccgctccaaaataaatgcagatgaacatgtgctattccacgacgccacccgtactgggtaagtgttaaaggactattagtacgccggtcacgccaagtatccctcatatccaagattccacagtgttgtacaccatcacgctttttgctcgcaaggagaataatgcatctctcatgcgtcatgaaaattttgttgtttttgtgttctcctttgttgtgtttgagttcgtagtagaagggtgaagtcatgaggttatgagtcgactcgaacttctagtcggcgaacgacatcatcgtacatgccatccactttggcgaggagcagcgccattcctgcttcctggcgataacccttatgaaaggcgcggtattgtgaggatggtagcggactttgtggcacttctttgcccgtcacgatatcccgagcgacatcatcgaaggcagcgctcttggatcgagggcggccataaaggcttaaattgcttggcttcttgagaatgccctttggcgatgatggtggtgagttggataacgagtacattgtgtgtatgaggaggcacttgtatgagtgtctgttgattgtcttgcaaggccttgttgcctgagcttgatgactcctgggctgggtgtgataatagataatatatttataggataatgttgccagagatagtagaagacacaaggaccagggctcttaagttcgtgaagaccgttaattattatggaattgtacaatgggctactgaatgtccatcatctgacaacgtggatacctaagaacagcaagaactgataatcggtgctctgggacgtgatacgttatattgtactacgaccccgcgtgattgtcgtcctgtcgttccgggattggatcgtggtcgcagagatcggtgatgctcataggacgatgatgcaatgggtagcgctgcagcgggatgagtagaagagaagaagcatcagggtccaattggaccggagggactgaggtgcctggcgggttttgttggggagccatgcatgtgctggattcccatttctgccctgtttctgacgtggctgtctatctgacgtcgcccgggcttgggtcggaaagccatgccgctattccagggtctcattgacgacggctgagtggtccagaccatgatcactcaagacacgccattcccactggaccatctggtagtcagggacccagaggcacacgagcacccttggcatccttcctctacctacttcctatccccaagtacgctctgaggagtgggctgttgaccacacgtggcggggtcaggaccattggggtaaacgtcggccctcggttggagactgcag

SEQ ID NO: 10219 - DNA, 288 bp, Muscodor strobelii
  misc_feature: SGI cDNA ID NO. 563233
  misc_feature: Encodes the peptide sequence at SEQ ID NO 10220
atgtactcgttatccaactcaccaccatcatcgccaaagggcattctcaagaagccaagcaatttaagcctttatggccgccctcgatccaagagcgctgccttcgatgatgtcgctcgggatatcgtgacgggcaaagaagtgccacaaagtccgctaccatcctcacaataccgcgcctttcataagggttatcgccaggaagcaggaatggcgctgctcctcgccaaagtggatggcatgtacgatgatgtcgttcgccgactagaagttcgagtcgactcataa

SEQ ID NO: 10220 - protein, 95 aa, Muscodor strobelii
  misc_feature: SGI Peptide ID NO. 563233
MYSLSNSPPSSPKGILKKPSNLSLYGRPRSKSAAFDDVARDIVTGKEVPQSPLPSSQYRAFHKGYRQEAGMALLLAKVDGMYDDVVRRLEVRVDS

SEQ ID NO: 10221 - DNA, 2760 bp, Muscodor strobelii
  misc_feature: SGI cDNA ID NO. 563234
  misc_feature: Encodes the peptide sequence at SEQ ID NO 10222
atgcttcgcctccgacgatatcgatactacgtcttcttcgctgccatcgttgtttttcttctgtttcgtgttgctcagaatagcggacaatgggagaccgtctcagcctctttcggtcctataggggctccgcgcaagtcactttctaagacaggttcgactaccgtcactaagaaaccgtacgatgggatgggcagtgaagatgccgatctgccccaacagattctagacaacacgggtcacaacaagtatccgacacacggccccgacgagacgttggttcaactagatgcaaccgatgagaaacccgagaaaccccttcgtccggcagccatcgacgagaaccaggtactcgcgtacgatcaagatgaagcgacaaaggttactgtgcctcccgtcatcgacgttccaaacaaatcggtcggtaaaggtgccaagacaaccagcgttcattgggagaagcccaccgagaatttccccgtgtctaaaggcgaaatcattcccctaccgaccggtaaacccaacaaaatacctacgatacaacatccattcaagaaagagtcggtcgaggcgaaagagaagcgcgaactgcgtcaagacaaggtgaagaatgaaatgaagagggcatgggctggctacatgacatatgcgaagggtcatgatgagctgagcccggttaccaaaaagttccgcgaccccttttgcggatgggccgccactttggtagattcactagatacgctatggatcatgggcatggtggaggaattcgaagatgcccttctcgaagtagaaaagattgatttcacgactagtacacgaaccgaaatacccgtctttgaaactacaattcgatatctcggaggcttaatagctgcttatgatgttagtggtggtaaaaagggcaaatacgacattcttctcgataaagccattgaattggccgagatattaatgggcgtattcgacacgccgaaccgtatgccaattttgtactataattggaagcctgcctactcgtcgcaacctaagagagcgacaaccggcggcagcgtggctgagctcggttcgctggcgatggagttcactcgacttgcgcaaatcacgaaggagaacaagtactacgatgctgtcgcgcgtattactgatgccttctacgaatggcagcagagaggtacttccatacccggcatcttccccgagcgagttgatttgagcggttgcaaccagactgcccaaaatgaattggaggcggctcgcagcgctcaaatcaaagccgaagccgacgaagcttcagacgatactgaactcgattcgagcaaagccgataagctgtacaagcgtggtggtaatgagctcaagctgaatcggcagaagaatccggtcaccggacaaatggacgttgttgtcgagaaggatatccataccttacctgagtgtgtttcccaagggttaacgtcaggtggttggggctcggaacaatacagcatgggcggttcgcaagactcgacgtatgaatactggcctaaacagtggctccttctgggtggcctcgagccaaaatacaaggaactgcatctcgagaccgtcaaggctgtcaaaaagtggcttctgttcaagcccatggttccggatgatcgcgatatcctcttttccggcaaggtgactactcgcggagagccggagaccgatgccaacacggactacgaagtgacccatcttacatgttttatcggtggcatgttcggtatgggaggcagaattttcgatattccagctgatgttgagatggcggagaggctcactgatggctgtgtttgggcgtatgagagcacggctaccggtattatgcctgagtatgcgcatgttgccacatgtgccgatcctgagaattgttcctggaaccaaactgcgtactatcaccagttagatcctcaatacaatactcgtgatacccaaattaagaattactacaagcgaaaagcgaagcttgccgccgagaagctcgaaaaagaggaggcggaaagagtcaaggctgcggaattcgccgcgaccaaggacaagattactgagctcaaaaagacgaacttggaatattcggactctttgagcgagaagaccaaggatcttgacgacgaatataccgggcttcggaagagagcacctacgtcatttagtgaagacgacgaagatgacgaagacagtgattcggcgtcgggattcaaggtgacgatcacgggcacacaaaaaccgcttgtgccctcagaagatagcgaggaatggaaagacccttcgcggccactcactcatgaggagtttgtcgcaaacaggatcgaaaaggagagtttaccagaggggttcgtgagtgtgacttcgaagtcgtatatcttgcgacccgaggctatcgaatccgtgtggtatatgtaccgcataacgggagatagaaagtggcaagacaaggggtggaagatgttccagtccattgtcaaatataccgcgacggaggtgggcaacagtgccatcgataacgtcttggatacagaaacgactcaaaataacgagatggagagtttctggactgctgagaccttgaaatacttttatttgctatattctgatcccgatctgatcagcttggacgactgggttttgaataccgaggcgcatcccttcaaaaaggccaacggccgcatttgggaaatgaatgcgtacttggtcatagtaacgacaattgtagcgatgcgaagaaactgcacttag

SEQ ID NO: 10222 - protein, 919 aa, Muscodor strobelii
  misc_feature: SGI Peptide ID NO. 563234
  misc_feature (205)..(893): Pfam Id: PF01532 Pfam Desc: Glycosyl hydrolase family 47
  misc_feature (206)..(384): Pfam Id: PF01532 Pfam Desc: Glycosyl hydrolase family 47
  misc_feature (788)..(893): Pfam Id: PF01532 Pfam Desc: Glycosyl hydrolase family 47
  misc_feature (2)..(893): NCBI GI: 85092679 Blast Desc: NCU02235 [Neurospora crassa OR74A] gi|28920928|gb|EAA30258.1| NCU02235 [Neurospora crassa OR74A]
  misc_feature (1)..(893): NCBI GI: 156050663 Blast Desc: SS1G_07919 [Sclerotinia sclerotiorum 1980] gi|154692319|gb|EDN92057.1| SS1G_07919 [Sclerotinia sclerotiorum 1980]
  misc_feature (147)..(893): NCBI GI: 116203471 Blast Desc: CHGG_09619 [Chaetomium globosum CBS 148.51] gi|88175747|gb|EAQ83215.1| CHGG_09619 [Chaetomium globosum CBS 148.51]
  misc_feature (1)..(893): NCBI GI: 256732474 Blast Desc: NECHADRAFT_106029 [Nectria haematococca mpVI 77-13-4]
  misc_feature (1)..(894): NCBI GI: 46123855 Blast Desc: FG06305.1 [Gibberella zeae PH-1]
  misc_feature (1)..(893): NCBI GI: 212534686 Blast Desc: class I alpha-mannosidase 1A [Penicillium marneffei ATCC 18224] gi|210069898|gb|EEA23988.1| class I alpha-mannosidase 1A [Penicillium marneffei ATCC 18224]
  misc_feature (1)..(892): NCBI GI: 119194767 Blast Desc: CIMG_01758 [Coccidioides immitis RS]
  misc_feature (1)..(892): NCBI GI: 240105168 Blast Desc: Glycosyl hydrolase family 47 protein [Coccidioides posadasii C735 delta SOWgp]
  misc_feature (1)..(893): NCBI GI: 242790873 Blast Desc: class I alpha-mannosidase 1A [Talaromyces stipitatus ATCC 10500] gi|218718232|gb|EED17652.1| class I alpha-mannosidase 1A [Talaromyces stipitatus ATCC 10500]
  misc_feature (1)..(893): NCBI GI: 169618160 Blast Desc: SNOG_12268 [Phaeosphaeria nodorum SN15] gi|111059560|gb|EAT80680.1| SNOG_12268 [Phaeosphaeria nodorum SN15]
MLRLRRYRYYVFFAAIVVFLLFRVAQNSGQWETVSASFGPIGAPRKSLSKTGSTTVTKKPYDGMGSEDADLPQQILDNTGHNKYPTHGPDETLVQLDATDEKPEKPLRPAAIDENQVLAYDQDEATKVTVPPVIDVPNKSVGKGAKTTSVHWEKPTENFPVSKGEIIPLPTGKPNKIPTIQHPFKKESVEAKEKRELRQDKVKNEMKRAWAGYMTYAKGHDELSPVTKKFRDPFCGWAATLVDSLDTLWIMGMVEEFEDALLEVEKIDFTTSTRTEIPVFETTIRYLGGLIAAYDVSGGKKGKYDILLDKAIELAEILMGVFDTPNRMPILYYNWKPAYSSQPKRATTGGSVAELGSLAMEFTRLAQITKENKYYDAVARITDAFYEWQQRGTSIPGIFPERVDLSGCNQTAQNELEAARSAQIKAEADEASDDTELDSSKADKLYKRGGNELKLNRQKNPVTGQMDVVVEKDIHTLPECVSQGLTSGGWGSEQYSMGGSQDSTYEYWPKQWLLLGGLEPKYKELHLETVKAVKKWLLFKPMVPDDRDILFSGKVTTRGEPETDANTDYEVTHLTCFIGGMFGMGGRIFDIPADVEMAERLTDGCVWAYESTATGIMPEYAHVATCADPENCSWNQTAYYHQLDPQYNTRDTQIKNYYKRKAKLAAEKLEKEEAERVKAAEFAATKDKITELKKTNLEYSDSLSEKTKDLDDEYTGLRKRAPTSFSEDDEDDEDSDSASGFKVTITGTQKPLVPSEDSEEWKDPSRPLTHEEFVANRIEKESLPEGFVSVTSKSYILRPEAIESVWYMYRITGDRKWQDKGWKMFQSIVKYTATEVGNSAIDNVLDTETTQNNEMESFWTAETLKYFYLLYSDPDLISLDDWVLNTEAHPFKKANGRIWEMNAYLVIVTTIVAMRRNCT

SEQ ID NO: 10223 - DNA, 4644 bp, Muscodor strobelii
  misc_feature: SGI EST ID NO. CUFF.24097.0
  misc_feature: Variant of the nucleotide sequence at SEQ ID NO 10221
gtaaaactcgaacgttgaatctcaaagtgaaatggacagcttcgaagcatgtggagcctcatatcatagaggacagagtcgaagcattaattcggaaacattgctcctgggaggaggtaggcgctcttattaatctcgaactcaatgcgagccggcagttgtagccattgagaaagtgatcctgggcggcatctttcattccactggttttcgatatctaaacgatatcgtttcttcgactgatgcgctggtcaatccattccgagactgcaatggaatcgataagatactgtcctcgtcttcacgaatacgtgttctaggttcaaatcagtgtcgaacaaaaaacgcagtttcttcatacacgtgtcacggctgcgtctttcggtcgcttcgggtcaaattaaattgatgtatcgagtaaggcattatgcttgattgccttggaagacaaatcatgatgaatcaatggaaagaaaagaaaagagacaacactctgtcacatcgtacaagacaatgctgcgcaatatacagtattcctcccttgaattctattttgacatccaggtcaccacaaccgtagcggcctgaactctgatgggcgggatggccttcaatgctggccgcttattagccctggtctgctatgggctgctgaccaggacatcttgaactcaattcgaggctaatatccacacgcaatgacaggggtactgacccgaaaattgctctgctcttccatccctcacgttgaatgttcattatgctctccgtctccttgagtctagtgccgtcggtttggattgtgccaagaggccaagacagccaagacagccaagaagatcgagagcaatggtcgccatgctcctgaccagaaatatccctacacgaggtaacctcggagcgtagtgactagtgtggcttcttctgcctcatctgtcactgcctctcctttctttggctgcttgactatagctcttcctttgtggcttcgtttcatctcgaacagctctttcgaatcgaagcgcgtgctgcaatcacagtcactacgtcctgtgcttttcactttctgtcttttagacctagagccttgctgccgcctgcctcaatgcgcatgccgtgatccgcgactcgcttggccgatctttgcttcatctgctgtctaatttgctctcattgaccccagcgttctagcccaagacctgagcgcggtgctttttgatcgtgatttcgcgatttttacatcgacgagaagatgatagctttggttacattctagatcctccacatcctagccgcctgccccgtgtcgggtacgcgaaagacagcctcgctgatttaagtatctttgcccgaagtgactggctgcgatccgctgccaatcgattgccaaaatgcttcgcctccgacgatatcgatactacgtcttcttcgctgccatcgttgtttttcttctgtttcgtgttgctcagaatagcggacaatgggagaccgtctcagcctctttcggtcctataggggctccgcgcaagtcactttctaagacaggttcgactaccgtcactaagaaaccgtacgatgggatgggcagtgaagatgccgatctgccccaacagattctagacaacacgggtcacaacaagtatccgacacacggccccgacgagacgttggttcaactagatgcaaccgatgagaaacccgagaaaccccttcgtccggcagccatcgacgagaaccaggtactcgcgtacgatcaagatgaagcgacaaaggttactgtgcctcccgtcatcgacgttccaaacaaatcggtcggtaaaggtgccaagacaaccagcgttcattgggagaagcccaccgagaatttccccgtgtctaaaggcgaaatcattcccctaccgaccggtaaacccaacaaaatacctacgatacaacatccattcaagaaagagtcggtcgaggcgaaagagaagcgcgaactgcgtcaagacaaggtgaagaatgaaatgaagagggcatgggctggctacatgacatatgcgaagggtcatgatgagctgagcccggttaccaaaaagttccgcgaccccttttgcggatgggccgccactttggtagattcactagatacgctatggatcatgggcatggtggaggaattcgaagatgcccttctcgaagtagaaaagattgatttcacgactagtacacgaaccgaaatacccgtctttgaaactacaattcgatatctcggaggcttaatagctgcttatgatgttagtggtggtaaaaagggcaaatacgacattcttctcgataaagccattgaattggccgagatattaatgggcgtattcgacacgccgaaccgtatgccaattttgtactataattggaagcctgcctactcgtcgcaacctaagagagcgacaaccggcggcagcgtggctgagctcggttcgctggcgatggagttcactcgacttgcgcaaatcacgaaggagaacaagtactacgatgctgtcgcgcgtattactgatgccttctacgaatggcagcagagaggtacttccatacccggcatcttccccgagcgagttgatttgagcggttgcaaccagactgcccaaaatgaattggaggcggctcgcagcgctcaaatcaaagccgaagccgacgaagcttcagacgatactgaactcgattcgagcaaagccgataagctgtacaagcgtggtggtaatgagctcaagctgaatcggcagaagaatccggtcaccggacaaatggacgttgttgtcgagaaggatatccataccttacctgagtgtgtttcccaagggttaacgtcaggtggttggggctcggaacaatacagcatgggcggttcgcaagactcgacgtatgaatactggcctaaacagtggctccttctgggtggcctcgagccaaaatacaaggaactgcatctcgagaccgtcaaggctgtcaaaaagtggcttctgttcaagcccatggttccggatgatcgcgatatcctcttttccggcaaggtgactactcgcggagagccggagaccgatgccaacacggactacgaagtgacccatcttacatgttttatcggtggcatgttcggtatgggaggcagaattttcgatattccagctgatgttgagatggcggagaggctcactgatggctgtgtttgggcgtatgagagcacggctaccggtattatgcctgagtatgcgcatgttgccacatgtgccgatcctgagaattgttcctggaaccaaactgcgtactatcaccagttagatcctcaatacaatactcgtgatacccaaattaagaattactacaagcgaaaagcgaagcttgccgccgagaagctcgaaaaagaggaggcggaaagagtcaaggctgcggaattcgccgcgaccaaggacaagattactgagctcaaaaagacgaacttggaatattcggactctttgagcgagaagaccaaggatcttgacgacgaatataccgggcttcggaagagagcacctacgtcatttagtgaagacgacgaagatgacgaagacagtgattcggcgtcgggattcaaggtgacgatcacgggcacacaaaaaccgcttgtgccctcagaagatagcgaggaatggaaagacccttcgcggccactcactcatgaggagtttgtcgcaaacaggatcgaaaaggagagtttaccagaggggttcgtgagtgtgacttcgaagtcgtatatcttgcgacccgaggctatcgaatccgtgtggtatatgtaccgcataacgggagatagaaagtggcaagacaaggggtggaagatgttccagtccattgtcaaatataccgcgacggaggtgggcaacagtgccatcgataacgtcttggatacagaaacgactcaaaataacgagatggagagtttctggactgctgagaccttgaaatacttttatttgctatattctgatcccgatctgatcagcttggacgactgggttttgaataccgaggcgcatcccttcaaaaaggccaacggccgcatttgggaaatgaatgcgtacttggtcatagtaacgacaattgtagcgatgcgaagaaactgcacttagacattgattacaaaatcaaagtgcaaccctctcatatgagagtattagtagtaattgaggagcagaacgctttatagcatacgcgttccagcgtgggggatatggtgaagcgtcgtcagctctgggtctgatccactgcatcagcaggggttcgcactatgcacaggcctgcttcctcctcgcgctgcagactccccaatgctaccgacaatctatctctggtgcgatcgacatcccttaatatggactggcaaagcgacatgccggtcgataccaggaaatcagatgctcaggtggacttgtttatcatctgcagatactgggcatttatatagttagccggggttcatccaatgtgtggataggttaatggatgtgcatatatatatatatgaatagatgcaaagcgagtagagctttgcttacctctagagataggcatgttgtggaaatggcagaagcattatacttatacggcctcggtactgtaagg

SEQ ID NO: 10224 - DNA, 363 bp, Muscodor strobelii
  misc_feature: SGI cDNA ID NO. 563235
  misc_feature: Encodes the peptide sequence at SEQ ID NO 10225
atgcaatccacgaccatcctcagcttttttcttggcataaccttgggtgttctactcagtcggttgggcacccttttgtcgacagagagacgaagcgatatcaacgaggcagatttgccaggatcttggccccgcacagagaataaggaagaaaatgcacaagccggagaagaggccgaacttgccgttgacgtcggagtagaccaagatgctgcggcgccacgtcgacgaaggacgccgtggtggagtaaggaagctcgtgagaagagagcacagcgaagagccgaggaggccgctgtggagttacggcgcgctgagcttgggcttcccacgtacgattctgtattcttttccggaccatag

SEQ ID NO: 10225 - protein, 120 aa, Muscodor strobelii
  misc_feature: SGI Peptide ID NO. 563235
MQSTTILSFFLGITLGVLLSRLGTLLSTERRSDINEADLPGSWPRTENKEENAQAGEEAELAVDVGVDQDAAAPRRRRTPWWSKEAREKRAQRRAEEAAVELRRAELGLPTYDSVFFSGP

SEQ ID NO: 10226 - DNA, 1758 bp, Muscodor strobelii
  misc_feature: SGI cDNA ID NO. 563236
  misc_feature: Encodes the peptide sequence at SEQ ID NO 10227
atggaaaatagcgacgaggttaacggacgatcgcgacaccaagtctttgagatgaatgactggagtctgaactctcctaatattagtttgcgtgtacctccattgtctcaagtctcgagaccgattcgttgctacaatgtccccagcaacgaagatgcaaatttgccacacgagcactttgaccaacgatcgggtcggacaggattcgaacaaagcgaggtaggcgacttttctcccgacagcgcaccgtcaacaccatcgtccatcgaacactcccacgagtaccatgagcgtcgagatgattacagcatccctcagcataacgatggagacgcaacatatcaaggcaccgaatatccaagtcaaacatcccgctactccactggtgtattctccccgacgcggagttctcaaccaaatacaacacccataggctcgataaatgaagacaatggaagacgcaataataatgttattactgcgaaagacggccttcgatctggcgagccattgcggcgtgagctttatccgatccatattttcatgataactatcagtgctgttattggaattggtttctacattcgtcccggcaatatacactccataggtggtcaaggggcagtcatctattcattcggattcctggggttgttgactttgatggtgacaagatgtctagctgtaatgctacaagtatggccggtcgctggtgcattaatcatgttcgttcagagcttcgttgattatgaagttggacaggccgtggcaatcttctattggttgacctacgtcttcacttccagtgggcttataacgtctgtcggctcgctatttgacttcatcgacgttagcaatggagtagctatctttgtcgacgtgttattcgtgctttttcctgtcgtattgaacttgatggatattagatacttcaaacgtttcgagataggactcggctctgccaaattacttatactacttactgttgttatcatcaccaacgcggacaacgaatttgttgcgccgagagatatcgtgttccatgaagaacacagatctagctggttttcgatacttgtaccatctattcttttagccgccttttcgtttgttggtatcgaagtcgtcgctgccaccgcgcacgaagcagtcattcggaatagtctgccgcctaaccgagacatcgagtctgcaagtgtacagtcctcagaaacatcgcactatttaccatatggcatcaacccattccagcaagctgcagtactggtgccaataattaccacgttcgcatatctttggggaggctggattgtgacagagaacatcccgtggaatcatgaaagtcaaccaagcttgacggcagcgcagcctcattggagttcttccatcttcgtcaatagcgccaagatttcatcgcttaccaaatcccacgctgtggcggctttgttgatcgtcagcgctgcgtcaacttcagctacagctctttatgtggcctccaggacacttcatggcattggttatgcttttcttcaggactacagtaatcctgatttctccttgaaagatggaacatggagagattggttttaccccgtcgcgaagcagcttgcacggaaaagcaagttcggagtcccttggattgcagttttagcgtctgcatggactttcttcctaccgttcattaaatatgttccgggcgcgaaagcggagacggtgaggcgcatcttgcatcatcttcattcatcgatcaaatgctga

SEQ ID NO: 10227 - protein, 585 aa, Muscodor strobelii
  misc_feature: SGI Peptide ID NO. 563236
  misc_feature (179)..(580): Pfam Id: PF00324 Pfam Desc: Amino acid permease
  misc_feature (179)..(383): Pfam Id: PF00324 Pfam Desc: Amino acid permease
  misc_feature (164)..(584): NCBI GI: 212541286 Blast Desc: amino acid transporter, [Penicillium marneffei ATCC 18224] gi|210068097|gb|EEA22189.1| amino acid transporter, [Penicillium marneffei ATCC 18224]
  misc_feature (135)..(585): NCBI GI: 67541200 Blast Desc: AN6770.2 [Aspergillus nidulans FGSC A4] gi|40739398|gb|EAA58588.1| AN6770.2 [Aspergillus nidulans FGSC A4] gi|259480363|tpe|CBF71424.1| TPA: amino acid transporter FGSC
  misc_feature (182)..(585): NCBI GI: 238482325 Blast Desc: amino acid transporter, [Aspergillus flavus NRRL3357] gi|220700451|gb|EED56789.1| amino acid transporter, [Aspergillus flavus NRRL3357]
  misc_feature (112)..(505): NCBI GI: 169765734 Blast Desc: [Aspergillus oryzae RIB40] gi|83765193|dbj|BAE55336.1| protein product [Aspergillus oryzae]
  misc_feature (134)..(505): NCBI GI: 46134025 Blast Desc: FG09152.1 [Gibberella zeae PH-1]
  misc_feature (172)..(570): NCBI GI: 242788107 Blast Desc: proline-specific permease, [Talaromyces stipitatus ATCC 10500] gi|218721301|gb|EED20720.1| proline-specific permease, [Talaromyces stipitatus ATCC 10500]
  misc_feature (126)..(575): NCBI GI: 242799169 Blast Desc: TSTA_011980 [Talaromyces stipitatus ATCC 10500] gi|218716668|gb|EED16089.1| TSTA_011980 [Talaromyces stipitatus ATCC 10500]
  misc_feature (172)..(570): NCBI GI: 212543943 Blast Desc: amino acid transporter, [Penicillium marneffei ATCC 18224] gi|210067033|gb|EEA21126.1| amino acid transporter, [Penicillium marneffei ATCC 18224]
  misc_feature (89)..(571): NCBI GI: 67541174 Blast Desc: AN6757.2 [Aspergillus nidulans FGSC A4] gi|40739385|gb|EAA58575.1| AN6757.2 [Aspergillus nidulans FGSC A4] gi|259480350|tpe|CBF71399.1| TPA: amino acid transporter FGSC
  misc_feature (212)..(581): NCBI GI: 169614205 Blast Desc: SNOG_10240 [Phaeosphaeria nodorum SN15] gi|160707301|gb|EAT82575.2| SNOG_10240 [Phaeosphaeria nodorum SN15]
MENSDEVNGRSRHQVFEMNDWSLNSPNISLRVPPLSQVSRPIRCYNVPSNEDANLPHEHFDQRSGRTGFEQSEVGDFSPDSAPSTPSSIEHSHEYHERRDDYSIPQHNDGDATYQGTEYPSQTSRYSTGVFSPTRSSQPNTTPIGSINEDNGRRNNNVITAKDGLRSGEPLRRELYPIHIFMITISAVIGIGFYIRPGNIHSIGGQGAVIYSFGFLGLLTLMVTRCLAVMLQVWPVAGALIMFVQSFVDYEVGQAVAIFYWLTYVFTSSGLITSVGSLFDFIDVSNGVAIFVDVLFVLFPVVLNLMDIRYFKRFEIGLGSAKLLILLTVVIITNADNEFVAPRDIVFHEEHRSSWFSILVPSILLAAFSFVGIEVVAATAHEAVIRNSLPPNRDIESASVQSSETSHYLPYGINPFQQAAVLVPIITTFAYLWGGWIVTENIPWNHESQPSLTAAQPHWSSSIFVNSAKISSLTKSHAVAALLIVSAASTSATALYVASRTLHGIGYAFLQDYSNPDFSLKDGTWRDWFYPVAKQLARKSKFGVPWIAVLASAWTFFLPFIKYVPGAKAETVRRILHHLHSSIKC

SEQ ID NO: 10228 - DNA, 1148 bp, Muscodor strobelii
  misc_feature: SGI EST ID NO. CUFF.24121.0
  misc_feature: Variant of the nucleotide sequence at SEQ ID NO 10226
cggtcccatgatttagaaattgattcggaaaccgagcgaattgcagtttcaactcgctagcttaacatgcatccacttgactgccactcgatgatcgtaaccagaaacgtaatcctcattcgcatcgatggaaaatagcgacgaggttaacggacgatcgcgacaccaagtctttgagatgaatgactggagtctgaactctcctaatattagtttgcgtgtacctccattgtctcaagtctcgagaccgattcgttgctacaatgtccccagcaacgaagatgcaaatttgccacacgagcactttgaccaacgatcgggtcggacaggattcgaacaaagcgaggtaggcgacttttctcccgacagcgcaccgtcaacaccatcgtccatcgaacactcccacgagtaccatgagcgtcgagatgattacagcatccctcagcataacgatggagacgcaacatatcaaggcaccgaatatccaagtcaaacatcccgctactccactggtgtattctccccgacgcggagttctcaaccaaatacaacacccataggctcgataaatgaagacaatggaagacgcaataataatgttattactgcgaaagacggccttcgatctggcgagccattgcggcgtgagctttatccgatccatattttcatgataactatcagtgctgttattggaattggtttctacattcgtcccggcaatatacactccataggtggtcaaggggcagtcatctattcattcggattcctggggttgttgactttgatggtgacaagatgtctagctgtaatgctacaagtatggccggtcgctggtgcattaatcatgttcgttcagagcttcgttgattatgaagttggacaggccgtggcaatcttctattggttgacctacgtcttcacttccagtgggcttataacgtctgtcggctcgctatttgacttcatcgacgttagcaatggagtagctatctttgtcgacgtgttattcgtgctttttcctgtcgtattgaacttgatggatattagatacttcaaacgtttcgagataggactcggctctgccaaattacttatactacttactgttgttatcatcaccaacgcggacaacgaatttggta

SEQ ID NO: 10229 - DNA, 204 bp, Muscodor strobelii
  misc_feature: SGI cDNA ID NO. 563237
  misc_feature: Encodes the peptide sequence at SEQ ID NO 10230
atgagacgatacgcattggtccaccgatacgcagacgaggatgtcctcctggcttgccttaaagctaaataccccgcgataagcgaacctgatttcaacatcaaaatgaaaaatgatgtctggaggtactatgctccgagaaagctcactgaagacgacctgaactggatcatccgagagacaaaaagacgagaagggcaatga

SEQ ID NO: 10230 - protein, 67 aa, Muscodor strobelii
  misc_feature: SGI Peptide ID NO. 563237
MRRYALVHRYADEDVLLACLKAKYPAISEPDFNIKMKNDVWRYYAPRKLTEDDLNWIIRETKRREGQ

SEQ ID NO: 10231 - DNA, 2071 bp, Muscodor strobelii
  misc_feature: SGI EST ID NO. CUFF.24124.0
  misc_feature: Variant of the nucleotide sequence at SEQ ID NO 10229
ctgcctatctcagctggcagcaaggccagccgcatatccaggtaaggcgaacacaggaaggcaaccaaagcttccaaatccagttttgcctgaacttggctgttcgcgaattgcatgatgtcgggcatcaacgtttcaacgaagacactagtgtaagggaatagcagccgcccgtagtcaaatactggatcgacccatttcgcaatttcggcgtccctcacttctattcaaatgagacgatacgcattggtccaccgatacgcagacgaggatgtcctcctggcttgccttaaagctaaataccccgcgataagcgaacctgatttcaacatcaaaatgaaaaatgatgtctggaggtactatgctccgagaaagctcactgaagacgacctgaactggatcatccgagagacaaaaagacgagaagggcaatgagacatcgacagtttagtctaagacccgatagagccgcatataactcgtagatcaattcgggcgttgaataggacggctgagcaaggcagatcttcgtaggcggatgttgctgagcagtaggcgcagtgtgcattcccaccgctgcggggttcttgtcgcaccctgtagtgaaggtgatcagttggctttatcataccattatgtctacagcgcgtcaacatttgctttccaattttctgacatcgtaaggatcaccatactttgcttcttctcgccgtgaatatgtctgatctagagaagtcggcccaacctcggttccctgatttgtttacagacaatctggagtcgagggtaagattcattgagattgatacagttaggaaagaaaacgcagaaaatccttccctaacaacgttcacgactacaatctgcgatgaaaaaacattccgcgaatggctggaaagtaagaattttagagtaagagtcgtagctatttgtcaaccttattcattagattccttggaagtctcgcaagaaatgtttgaaacattcatacattttgtcaatcctcttgatgatatctggaatatggcgtctttcttccgaaagaggacgacagtcctggagcaggcattatcgctttgcgcctggagaaatcgagatcatacacatgaaatcacatatattttgaagtatgcagaaacaaagctcacgcgccagagcgacactgtaagggtaatcagacaaatgggcttgtatcagaagtacgaggctgatgcaagtcgcaacacctggatgctcattttcccgaaccaatacagcgcttacgaaaagccaatatttgatctcaaggatcctgcttcccatcctctgtctcctcacatctggtttttatctgatcgctctaataactggcgtgattatctggagcatcaggaaaaaagcttccaagagcttgcagtatgtgtcatgaatgtcgaaattgaagagagcttgcattttgtggaaatgtacgatcagctttcggctctgcgtttcatcgaatctaacctttcccctctgctacccattttcactgcctactaccaggttctgcacagactagatgcaatgaaccagcaattgagctgtacaggcaatgtcgataatgaccaatctcgaattttcacagaggagataggaaaccttgagattaagattaagtcatacgagacgaacacaaaattcctcatatcgagggtggcaagtgcgattcaaatggcttcggatacaatcaatctgaaaaatcagaacaacgccgaacagatctcaaaccacttgcttagagatagtatgacgatgcgcattattacgttggttactctactctttcttccaggtacctttgtcgccggctttttcggcatgggttttttcactacagacggcgaaagtggaggatggactacaagcggaaatctgtggatctatttcgccattgctattccgctaaccgcaatgactctcgcatactggagatggaaattcgggaatagacttgctaagatcgagccgcacccagtatgactgtgtagatatggactaacagtttcttatactatcttactgatgctgagcatgttaaaaacagtcggtt

SEQ ID NO: 10232 - DNA, 672 bp, Muscodor strobelii
  misc_feature: SGI cDNA ID NO. 563238
  misc_feature: Encodes the peptide sequence at SEQ ID NO 10233
atggggttctttcgcaagctgggtctggtgctggccattccagtgacttattacgtggcgaggacgggctatgggcaatatcaactacagagatcaacctttacagtagacgagatatcacatgaggatgctgtcttcgaatcgtcgctgtacagggacatatgggggaagcataagtatgagtcgcgcgacagcttcgcagtcggcatcacaattcctttcgcatcagttcctccaaatctgtggactgaagaagcgttcggcgccgaggttttcaagctgctatgggaccagcgtttaatcacacagttcaacgaagaaccattgggaaagacgccggtccaaggtgatggtagaataaatgacgcgatggcggcgcaggtcgttagttcaggcacaagggatatgtccattgccattcttaaccgcccttcaagaaacaacgttcttccgcagggctatgaacacattctcgcggcattcaacaagcaggagaaaatcgcccaggtgatgattaaatatgcttggcatatgaagaaagagacacctccaagctggcgaaagtctcttgctaggtggttccagatcaatggacgtcggcagtggctcgtaacaatcgccaatcagattcagcaccaaagacttgtagctgaggggaaagcagaactctag

SEQ ID NO: 10233 - protein, 223 aa, Muscodor strobelii
  misc_feature: SGI Peptide ID NO. 563238
MGFFRKLGLVLAIPVTYYVARTGYGQYQLQRSTFTVDEISHEDAVFESSLYRDIWGKHKYESRDSFAVGITIPFASVPPNLWTEEAFGAEVFKLLWDQRLITQFNEEPLGKTPVQGDGRINDAMAAQVVSSGTRDMSIAILNRPSRNNVLPQGYEHILAAFNKQEKIAQVMIKYAWHMKKETPPSWRKSLARWFQINGRRQWLVTIANQIQHQRLVAEGKAEL

SEQ ID NO: 10234 - DNA, 990 bp, Muscodor strobelii
  misc_feature: SGI EST ID NO. CUFF.24134.0
  misc_feature: Variant of the nucleotide sequence at SEQ ID NO 10232
tcaggacagatttttaaataattgtgtgtcacgggttctttggaatttcattgatattcagcgcgacgccaatatttaacgatcttttcatctggcggttatctcataaacgacttggctccaaaccggaatccacctatctccgacagctcattaaagtgaaaactcaatcacaggaatggggttctttcgcaagctgggtctggtgctggccattccagtgacttattacgtggcgaggacgggctatgggcaatatcaactacagagatcaacctttacagtagacgagatatcacatgaggatgctgtcttcgaatcgtcgctgtacagggacatatgggggaagcataagtatgagtcgcgcgacagcttcgcagtcggcatcacaattcctttcgcatcagttcctccaaatctgtggactgaagaagcgttcggcgccgaggttttcaagctgctatgggaccagcgtttaatcacacagttcaacgaagaaccattgggaaagacgccggtccaaggtgatggtagaataaatgacgcgatggcggcgcaggtcgttagttcaggcacaagggatatgtccattgccattcttaaccgcccttcaagaaacaacgttcttccgcagggctatgaacacattctcgcggcattcaacaagcaggagaaaatcgcccaggtgatgattaaatatgcttggcatatgaagaaagagacacctccaagctggcgaaagtctcttgctaggtggttccagatcaatggacgtcggcagtggctcgtaacaatcgccaatcagattcagcaccaaagacttgtagctgaggggaaagcagaactctaggaccacgtggaaaagaggactattcaaaattcgcattttgagcgacaaaatcgattgtacaatatggatgcttgtcaccttgcagctgtcaaacaaaattataatgaaatacttaattcgaattgcacgatcgacgcgag

SEQ ID NO: 10235 - DNA, 672 bp, Muscodor strobelii
  misc_feature: SGI cDNA ID NO. 563239
  misc_feature: Encodes the peptide sequence at SEQ ID NO 10236
atgcattctacccgagctttcgccgtcgcaaccgttgccgcgtcttgcgcgctggccttgcccgctaaaagggacgaggctccgggtgttgattgggtcaatgatgaggaaggccagctcattctaactttctccgatgataaggtgaatatgggaacagttgaggtgcaaaatattatggacattttgtacgaggcttgcgccgactctggtaattgcgacacgaacgaaaagggagccgacggtcaaattattcacgctggcagaggcggtgaagtcatagacattactgtcaacgttactcccggtggagcttatggtatgtacggatttatcgttttctgcgtcggattgaatgctaacgacgggtttactgtcgagtgtgaggaagtcactcattccaacgactgcgtcggcaacggcctcggatcgtattgccctcccaacgaaatcaccgtgaaccaatgcaaactccctgcctatgtcgcgatcaactaccaggataaagacgcaacggacgccgccccgccgtttattgaggccaaactcaaccttgagatcgatagcgatggttactgtgaaacatttaccacaatcggaagcggcattgctggtgctgtcaatggcgctgccggcggtatcttcacactgcttggcctggcatgtcaataa

SEQ ID NO: 10236 - protein, 223 aa, Muscodor strobelii
  misc_feature: SGI Peptide ID NO. 563239
MHSTRAFAVATVAASCALALPAKRDEAPGVDWVNDEEGQLILTFSDDKVNMGTVEVQNIMDILYEACADSGNCDTNEKGADGQIIHAGRGGEVIDITVNVTPGGAYGMYGFIVFCVGLNANDGFTVECEEVTHSNDCVGNGLGSYCPPNEITVNQCKLPAYVAINYQDKDATDAAPPFIEAKLNLEIDSDGYCETFTTIGSGIAGAVNGAAGGIFTLLGLACQ

SEQ ID NO: 10237 - DNA, 1156 bp, Muscodor strobelii
  misc_feature: SGI EST ID NO. CUFF.24146.1
  misc_feature: Variant of the nucleotide sequence at SEQ ID NO 10235
tatgggaacagttgaggtgcaaaatattatggacattttgtacgaggcttgcgccgactctggtaattgcgacacgaacgaaaagggagccgacggtcaaattattcacgctggcagaggcggtgaagtcatagacattactgtcaacgttactcccggtggagcttatggtatgtacggatttatcgttttctgcgtcggattgaatgctaacgacgggtttagtacgtattatttttcctccgaatgagattggctgtagctgtcaatcgcaaaagtatcagaaaccaggatttgagaactgaccagtttgacagcctacctggattcacaatggcttattggagacactccacgctgccttggacacagctgtcgagtgtgaggaagtcactcattccaacgactgcgtcggcaacggcctcggatcgtattgccctcccaacgaaatcaccgtgaaccaatgcaaactccctgcctatgtcgcgatcaactaccaggataaagacgcaacggacgccgccccgccgtttattgaggccaaactcaaccttgagatcgatagcgatggttactgtgaaacatttaccacaatcggaagcggcattgctggtgctgtcaatggcgctgccggcggtatcttcacactgcttggcctggcatgtcaataagcgatgacagcctgatgcccaagaaaattggggtagcatggtcgtgcctgcgcttgtacgacatcatgattgtatagtaaatatgtataaaatagtcgtttaatatagcgatggagttatcaatgaaacatcgatatagattacatgaattcgtattgaattggtctgcaaattaggtctcaactggtgagttcgtctcaggtgcactctagttcggcgatctatcagtcttatctgctaagtccgatcgagacacgcatccatcatatacgcgaagctgtcaacaattcgatagtaaatgtcatggccttatcctttagcgcataaaccacgcgtgacattacattgttatagagttatcgctgaatcgatctcaactatgtaattgaatttgtgtcgcgtgttcgttgagtgaagcagattgctcatggtctgacgcgattactaaaaatagacactgcttactagggatcgtggagtcgtcg

SEQ ID NO: 10238 - DNA, 705 bp, Muscodor strobelii
  misc_feature: SGI cDNA ID NO. 563240
  misc_feature: Reduced expression when VOC is produced
  misc_feature: Encodes the peptide sequence at SEQ ID NO 10239
atgtcttcactcgcagccattcgcagccatctcccaccacaactcgacaaacacgtcgacaaaattgacaagctcacaaatcgactatcgcctcaaccgccagcaaaatcaagttcttcgcccaacacccagagcaatggttctgattatttcgattcaaacccgaccgtacccaagagcttcgagctcgcgccgaaaggccacaccatggtcgtcgcagcagacaatggcgaaccgttcctcaccatcacatttgcctcaagctccttagccgataaagtcccagatctgcttgtttttcgaggcagtgcagctggcgaagaaatagcgtccgcacaatttagcaagtggattggcaagtcggaaatgaattacaacgggcataagacgaaagtcagaggcagcttcgagagcagcacaggattgggcaaggccaagtgggagaaagaaggtctgcgagcgatgaagttcaagcttggaaaagaaatgattgcgaagtttgaagccgtggggagtgaagggagggggaagggtaggagaaataaaggcaatggacaattcgagattgtcaaggacggccttacgagagagcagacggaggagattatcgtgtcctgtctgttagagcgtgaacggatgcgcctgaatggtgagctcctgcaggatggtgtttgggaacttttcatggctagcgttggattgtag

SEQ ID NO: 10239 - protein, 234 aa, Muscodor strobelii
  misc_feature: SGI Peptide ID NO. 563240
  misc_feature: Useful for introducing or modulating the production of volatile compounds
MSSLAAIRSHLPPQLDKHVDKIDKLTNRLSPQPPAKSSSSPNTQSNGSDYFDSNPTVPKSFELAPKGHTMVVAADNGEPFLTITFASSSLADKVPDLLVFRGSAAGEEIASAQFSKWIGKSEMNYNGHKTKVRGSFESSTGLGKAKWEKEGLRAMKFKLGKEMIAKFEAVGSEGRGKGRRNKGNGQFEIVKDGLTREQTEEIIVSCLLERERMRLNGELLQDGVWELFMASVGL

SEQ ID NO: 10240 - DNA, 1077 bp, Muscodor strobelii
  misc_feature: SGI EST ID NO. CUFF.24139.0
  misc_feature: Variant of the nucleotide sequence at SEQ ID NO 10238
tgacagttcaacgctttcaataacagcatacttagactctcggctccctctggattttataacaatgtatcaaattattctctcgttctcgtctagacataagagcaactttagatatcataattcatattacgacagatagaccaaatgtcttcactcgcagccattcgcagccatctcccaccacaactcgacaaacacgtcgacaaaattgacaagctcacaaatcgactatcgcctcaaccgccagcaaaatcaagttcttcgcccaacacccagagcaatggttctgattatttcgattcaaacccgaccgtacccaagagcttcgagctcgcgccgaaaggccacaccatggtcgtcgcagcagacaatggcgaaccgttcctcaccatcacatttgcctcaagctccttagccgataaagtcccagatctgcttgtttttcgaggcagtgcagctggcgaagaaatagcgtccgcacaatttagcaagtggattggcaagtcggaaatgaattacaacgggcataagacgaaagtcagaggcagcttcgagagcagcacaggattgggcaaggccaagtgggagaaagaaggtctgcgagcgatgaagttcaagcttggaaaagaaatgattgcgaagtttgaagccgtggggagtgaagggagggggaagggtaggagaaataaaggcaatggacaattcgagattgtcaaggacggccttacgagagagcagacggaggagattatcgtgtcctgtctgttagagcgtgaacggatgcgcctgaatggtgagctcctgcaggatggtgtttgggaacttttcatggctagcgttggattgtagatcatactctgatggaatgaattggcaatggttctttgctatcttcttgttttgctatatcatgaatgatgaggcctcatggatcactttcattgacaactttcgccattagcaaccctacccgtggtgatgcgtggatttggatgataccgatcgcgaacgcggtctcgacatctgtgtcgtgctgcttctaacatgaacaaacatccatcgtcgagcttcgat

SEQ ID NO: 10241 - DNA, 1863 bp, Muscodor strobelii
  misc_feature: SGI cDNA ID NO. 563241
  misc_feature: Encodes the peptide sequence at SEQ ID NO 10242
atggctgccatactcaaactgacactatgtgctgagctgctcttggggcttttcattttgagagtcgtaggccaggaatacgattatgttgtggtgggatcaggacctggcggaggccctttagctgtcgatctcgccaagactggcagcaccgtgttgctgttagaagccggttctgacctgttagatgacccgacatacggagatctttacggcgacccgaaatcctctccaaaggcaatcaataatgctgcgagtagatgggatttcttcgtgaaacactccgatgatcctgcgagagaattggaatatgagcacatgacatggcgtactggtaacggttcactctatgtgggcaacagtcctcccaatggctctgagcagctcggcatttggtaccccagagccgcgactttaggcggcggagctttggtggacgatgcgattttggagctgcctccggatgagacatgggaatatatcgcaaatatcactggcgatgaatcgtggagggcaccagagatgagaaaaatctacgaagaaatagaacactgcaattatgagcaaaatggcacagttggtcatggtttcgccggatggctcgagaccaaccgaggaaacgattcgtggttgggcacggatccggacgcgacggcaattttcagagccatggcggagcaatctggcgcatcaagcaatatgtcgacggcagaactcgatgatcagctctctcgcgacgtaaatgcagctgacgcaggccgtgatgatttgacaggcgtcttcggaacgatcacccacactgattcacaaggccgtcggataagtccagccaactacatccgacaggcactggcagacaatcccgaactaccgctatttattgagctcaattcatatctcacgaatatcgtctgggatccgttacaaagcactggtctcccagctgtcatgggcgtcaattacgtggcagggccaaacgtgtataaggccgatcccaagtacgattccagccgcaatgccacaagcagcttcacctacatcgcaaaggagctaattatcgccggtggagcgttcaattcgccgcagatcttgaaggtctctggtgtaggtccggcagacgagttaaagcggcacaacgtcactctcatggctgatcttcccggcgttggtgctaatcttggagatgtataccaagggagcgtgatattgcaatccgcaaaagatgtcgagacggtcgggtcatattcggttcagttgaagacatcggcctcttcgggggatagagatgttgttctttggcctgatattcatgattttaagggttactggcctggctaccccggcagtcaaaatagcagcgatctcacaattgcattcgcgcttaaaaatagttatacatccaaaggggcagtgactcttcgctctgccgacccgatggatgtgcccgacatcaactttcgcttttttgaagataacgcagatgtgaacttggaggcgatgttggaggcttgggaatttgtcggcgatatgaaggcccgggtgccaaccgcctctggattaacaccaataacagagctctatccctgttcttccgaaagccagccctgtaccgccgctgggattaagtacaccttgaaaacacaagcatactcccgttctgccactgggacttgcgcgatgggcaacacagcaacagactcgatggccgtcgtcgattctaaattccgcgttaagggtgtcgaaaaagtccgggttgtggacgcatccatatttccaaaaccacccggggcgttcccgatactgcccaccttcatgatctcgaaaaaggctgcaaaggtcatactggaggacagaactggctaa

SEQ ID NO: 10242 - protein, 620 aa, Muscodor strobelii
  misc_feature: SGI Peptide ID NO. 563241
  misc_feature (457)..(610): Pfam Id: PF05199 Pfam Desc: GMC oxidoreductase
  misc_feature (27)..(411): Pfam Id: PF00732 Pfam Desc: GMC oxidoreductase
  misc_feature (556)..(610): Pfam Id: PF05199 Pfam Desc: GMC oxidoreductase
  misc_feature (348)..(393): Pfam Id: PF00732 Pfam Desc: GMC oxidoreductase
  misc_feature (27)..(617): NCBI GI: 116214449 Blast Desc: CHGG_11065 [Chaetomium globosum CBS 148.51] gi|88175420|gb|EAQ82889.1| CHGG_11065 [Chaetomium globosum CBS 148.51]
  misc_feature (23)..(620): NCBI GI: 145606362 Blast Desc: MGG_02371 [Magnaporthe grisea 70-15] gi|145014045|gb|EDJ98686.1| MGG_02371 [Magnaporthe grisea 70-15]
  misc_feature (27)..(615): NCBI GI: 171680036 Blast Desc: protein product [Podospora anserina] gi|170939644|emb|CAP64871.1| protein product [Podospora anserina]
  misc_feature (27)..(609): NCBI GI: 85091580 Blast Desc: NCU09024 [Neurospora crassa OR74A] gi|28920365|gb|EAA29735.1| conserved [Neurospora crassa OR74A]
  misc_feature (42)..(617): NCBI GI: 169624234 Blast Desc: SNOG_15373 [Phaeosphaeria nodorum SN15] gi|111056186|gb|EAT77306.1| SNOG_15373 [Phaeosphaeria nodorum SN15]
  misc_feature (14)..(615): NCBI GI: 256725352 Blast Desc: NECHADRAFT_45566 [Nectria haematococca mpVI 77-13-4]
  misc_feature (27)..(617): NCBI GI: 171683764 Blast Desc: protein product [Podospora anserina] gi|170941842|emb|CAP67495.1| protein product [Podospora anserina]
  misc_feature (26)..(616): NCBI GI: 256726464 Blast Desc: NECHADRAFT_39574 [Nectria haematococca mpVI 77-13-4]
  misc_feature (27)..(617): NCBI GI: 169601230 Blast Desc: SNOG_03474 [Phaeosphaeria nodorum SN15] gi|111067559|gb|EAT88679.1| SNOG_03474 [Phaeosphaeria nodorum SN15]
  misc_feature (26)..(619): NCBI GI: 239607795 Blast Desc: choline dehydrogenase [Ajellomyces dermatitidis ER-3]
  misc_feature (127)..(614): SWISSPROT Homolog: EC 1.1.99.10 Glucose dehydrogenase (acceptor)
MAAILKLTLCAELLLGLFILRVVGQEYDYVVVGSGPGGGPLAVDLAKTGSTVLLLEAGSDLLDDPTYGDLYGDPKSSPKAINNAASRWDFFVKHSDDPARELEYEHMTWRTGNGSLYVGNSPPNGSEQLGIWYPRAATLGGGALVDDAILELPPDETWEYIANITGDESWRAPEMRKIYEEIEHCNYEQNGTVGHGFAGWLETNRGNDSWLGTDPDATAIFRAMAEQSGASSNMSTAELDDQLSRDVNAADAGRDDLTGVFGTITHTDSQGRRISPANYIRQALADNPELPLFIELNSYLTNIVWDPLQSTGLPAVMGVNYVAGPNVYKADPKYDSSRNATSSFTYIAKELIIAGGAFNSPQILKVSGVGPADELKRHNVTLMADLPGVGANLGDVYQGSVILQSAKDVETVGSYSVQLKTSASSGDRDVVLWPDIHDFKGYWPGYPGSQNSSDLTIAFALKNSYTSKGAVTLRSADPMDVPDINFRFFEDNADVNLEAMLEAWEFVGDMKARVPTASGLTPITELYPCSSESQPCTAAGIKYTLKTQAYSRSATGTCAMGNTATDSMAVVDSKFRVKGVEKVRVVDASIFPKPPGAFPILPTFMISKKAAKVILEDRTG

SEQ ID NO: 10243 - DNA, 1041 bp, Muscodor strobelii
  misc_feature: SGI cDNA ID NO. 563242
  misc_feature: Reduced expression when VOC is produced
  misc_feature: Encodes the peptide sequence at SEQ ID NO 10244
atggcggtccccacgagtatgaagcaatggtccgttcaaggaactggaaaaggtttcgatactgtagaatcgatcgattcggaggtgcctaaaccaggcgagcaagaagtcctcgtcaaactacatgctgcttcgatcaactaccgcgatcttattattcccaaagggcaatatccattccctaccaagctcccagttgtcgccgggtctgatggtgcgggcgaagtgatcgcggtcggctccaaggtcaccaaatggaaaaaaggagataaagtcgttactttgtttaaccaggggcaccagttcggagctattgacattccggctgctgccactggcctgggcggtacaatcgacggaacactacggccatatggtgtgttcagcgagactgggatcgtgcgcgcccctagcaacctgaatcacaatgaggctgcgaccctcacatgcgcagcactcacaagctggaatgcgctgtatggacttaaggcgttgaaaccaggcgggaccgttttggttcagggcactggcggtgttagtctgtttgcattacagttcgcaaaagcagctggtgcaattgtcgtagcgaccacctcctcagaggaaaaagcgcagatgcttaaaaaattgggtgcggaccacgtcttgaactataagactaatacgaactggggcgagaccgccaaaaagctgtcgcctagcggtgcgggtttcgaccacattattgaggttggtggtgcgggcacgttagaacagagtctcaaggcgatcaagtacgagggtattatcaccatcattggcttcctagggggagtcaaggcgaagtccactctcatcgactgcctgaacagcgtctgtattgctcgtggtgcttatgttggttctcgtgagcaaatggaagatatggtggcttctattgaggcaaatgatatccatccagtcttagaccgcaaggtcttccagcttgagcaagtgaaggatgcatatcagtacatgtgggacaagggacatgttggcaagattgtgatcgagattaagtaa

SEQ ID NO: 10244 - protein, 346 aa, Muscodor strobelii
  misc_feature: SGI Peptide ID NO. 563242
  misc_feature (34)..(136): Pfam Id: PF08240 Pfam Desc: Alcohol dehydrogenase GroES-like domain
  misc_feature (167)..(308): Pfam Id: PF00107 Pfam Desc: Zinc-binding dehydrogenase
  misc_feature (34)..(93): Pfam Id: PF08240 Pfam Desc: Alcohol dehydrogenase GroES-like domain
  misc_feature (1)..(346): NCBI GI: 85089847 Blast Desc: NCU09285 [Neurospora crassa OR74A] gi|28919466|gb|EAA28901.1| NCU09285 [Neurospora crassa OR74A]
  misc_feature (4)..(345): NCBI GI: 169773569 Blast Desc: [Aspergillus oryzae RIB40] gi|83769114|dbj|BAE59251.1| protein product [Aspergillus oryzae]
  misc_feature (4)..(345): NCBI GI: 39975167 Blast Desc: MGG_00270 [Magnaporthe grisea 70-15] gi|145018858|gb|EDK03137.1| MGG_00270 [Magnaporthe grisea 70-15]
  misc_feature (4)..(345): NCBI GI: 119500882 Blast Desc: zinc-containing alcohol dehydrogenase, [Neosartorya fischeri NRRL 181] gi|119415363|gb|EAW25301.1| zinc-containing alcohol dehydrogenase, [Neosartorya fischeri NRRL 181]
  misc_feature (1)..(346): NCBI GI: 171681279 Blast Desc: protein product [Podospora anserina] gi|170940598|emb|CAP65826.1| protein product [Podospora anserina]
  misc_feature (7)..(346): NCBI GI: 70994434 Blast Desc: zinc-containing alcohol dehydrogenase [Aspergillus fumigatus Af293] gi|66849636|gb|EAL89964.1| zinc-containing alcohol dehydrogenase, [Aspergillus fumigatus Af293]
  misc_feature (7)..(346): NCBI GI: 159125085 Blast Desc: zinc-containing alcohol dehydrogenase, [Aspergillus fumigatus A1163]
  misc_feature (4)..(345): NCBI GI: 238491570 Blast Desc: zinc-containing alcohol dehydrogenase, [Aspergillus flavus NRRL3357] gi|220697435|gb|EED53776.1| zinc-containing alcohol dehydrogenase, [Aspergillus flavus NRRL3357]
  misc_feature (4)..(345): NCBI GI: 115397933 Blast Desc: conserved [Aspergillus terreus NIH2624] gi|114192749|gb|EAU34449.1| conserved [Aspergillus terreus NIH2624]
  misc_feature (4)..(345): NCBI GI: 255936391 Blast Desc: Pc13g07960 [Penicillium chrysogenum Wisconsin 54-1255] gi|211583842|emb|CAP91865.1| Pc13g07960 [Penicillium chrysogenum Wisconsin 54-1255]
  misc_feature (1)..(344): SWISSPROT Homolog: EC 1.1.1.1 Alcohol dehydrogenase
  misc_feature: Useful for introducing or modulating the production of volatile compounds
MAVPTSMKQWSVQGTGKGFDTVESIDSEVPKPGEQEVLVKLHAASINYRDLIIPKGQYPFPTKLPVVAGSDGAGEVIAVGSKVTKWKKGDKVVTLFNQGHQFGAIDIPAAATGLGGTIDGTLRPYGVFSETGIVRAPSNLNHNEAATLTCAALTSWNALYGLKALKPGGTVLVQGTGGVSLFALQFAKAAGAIVVATTSSEEKAQMLKKLGADHVLNYKTNTNWGETAKKLSPSGAGFDHIIEVGGAGTLEQSLKAIKYEGIITIIGFLGGVKAKSTLIDCLNSVCIARGAYVGSREQMEDMVASIEANDIHPVLDRKVFQLEQVKDAYQYMWDKGHVGKIVIEIK

SEQ ID NO: 10245 - DNA, 1847 bp, Muscodor strobelii
  misc_feature: SGI EST ID NO. CUFF.24380.1
  misc_feature: Variant of the nucleotide sequence at SEQ ID NO 10243
acacgttagatcctgactaaactattactgcagccagactatcctgagcatgtcgatggtataggtaaactagagacgtaaccgaggtcttccgtctcccttctcccggctgatgtcagcattgtgcaatatggacgtcaacaggagcctcaaattgttgtaagtgagaggcatcgggaaagggaagaaaaatataaatacaagtcgactccaagtctcaatccatcaaaggatgctgcagagaccaagtcgcgctattctcgttcgatgaagtcatacaactcataacatcatacctctccagaacgaccccacctacccacttctgaataggctaagaattgcattacagcaacgtcagttggattaacattatcgctcatcacacaaagcaaaaatattcaaaatggcggtccccacgagtatgaagcaatggtccgttcaaggaactggaaaaggtttcgatactgtagaatcgatcgattcggaggtgcctaaaccaggcgagcaagaagtcctcgtcaaactacatgctgcttcgatcaactaccgcgatcttattattcccaaagggcaatatccattccctaccaagctcccagttgtcgccgggtctgatggtgcgggcgaagtgatcgcggtcggctccaaggtcaccaaatggaaaaaaggagataaagtcgttactttgtttaaccaggggcaccagttcggagctattgacattccggctgctgccactggcctgggcggtacaatcgacggaacactacggccatatggtgtgttcagcgagactgggatcgtgcgcgcccctagcaacctgaatcacaatgaggctgcgaccctcacatgcgcagcactcacaagctggaatgcgctgtatggacttaaggcgttgaaaccaggcgggaccgttttggttcagggcactggcggtgttagtctgtttgcattacagttcgcaaaagcagctggtgcaattgtcgtagcgaccacctcctcagaggaaaaagcgcagatgcttaaaaaattgggtgcggaccacgtcttgaactataagactaatacgaactggggcgagaccgccaaaaagctgtcgcctagcggtgcgggtttcgaccacattattgaggttggtggtgcgggcacgttagaacagagtctcaaggcgatcaagtacgagggtattatcaccatcattggcttcctagggggagtcaaggcgaagtccactctcatcgactgcctgaacagcgtctgtattgctcgtggtgcttatgttggttctcgtgagcaaatggaagatatggtggcttctattgaggcaaatgatatccatccagtcttagaccgcaaggtcttccagcttgagcaagtgaaggatgcatatcagtacatgtgggacaagggacatgttggcaagattgtgatcgagattaagtaagcacccaagtccatagccataattttgaagcgcacaaacattacaattgccatgtcttgtagtttcaactgtattgatttttttactgccattctccatgtactcttcttctgacatattctccgttcttgacctagctctgagaaacacactgctagaagtggattccatccgtctctgtagatttgaccgaagcggtgcgtaagacaaggcggtatttggtgtatatagtagacctgagaaaagatctattgcgcagcctctttgcatcgtctcaatcaatcctacgctgctagaagacccaaagaattaattccagtcttcgcgactattacttccaatgcattcgctaacactgttcgacaacttgatggaaccctagatcggacttgcattgtcc

SEQ ID NO: 10246 - DNA, 1083 bp, Muscodor strobelii
  misc_feature: SGI cDNA ID NO. 563243
  misc_feature: Encodes the peptide sequence at SEQ ID NO 10247
atggcggtccccacgagtatgaagcaatggtccgttcaaggaactggaaaaggtttcgatactgtagaatcgatcgattcggaggtgcctaaaccaggcgagcaagaagtcctcgtcaaactacatgctgcttcgatcaactaccgcgatcttattattcccaaagggcaatatccattccctaccaagctcccagttgtcgccgggtctgatggtgcgggcgaagtgatcgcggtcggctccaaggtcaccaaatggaaaaaaggagataaagtcgttactttgtttaaccaggggcaccagttcggagctattgacattccggctgctgccactggcctgggcggtacaatcgacggaacactacggccatatggtgtgttcagcgagactgggatcgtgcgcgcccctagcaacctgaatcacaatgaggctgcgaccctcacatgcgcagcactcacaagctggaatgcgctgtatggacttaaggcgttgaaaccaggcgggaccgttttggttcagggcactggcggtgttagtctgtttgcattacagttcgcaaaagcagctggtgcaattgtcgtagcgaccacctcctcagaggaaaaagcgcagatgcttaaaaaattgggtgcggaccacgtcttgaactataagactaatacgaactggggcgagaccgccaaaaagctgtcgcctagcggtgcgggtttcgaccacattattgaggttggtggtgcgggcacgttagaacagagtctcaaggcgatcaagtacgagggtattatcaccatcattggcttcctagggggagtcaaggcgaagtccactctcatcgactgcctgaacagcgtctgtattgctcgtggtgcttatgttggttctcgtgagcaaatggaagatatggtggcttctattgaggcaaatgatatccatccagtcttagaccgcaaggtcttccagcttgagcaagtgaaggatgcatatcagtacatgtgggacaagggacatgttggcaagattgtgatcgagattaactctgagaaacacactgctagaagtggattccatccgtctctgtag

SEQ ID NO: 10247 - protein, 360 aa, Muscodor strobelii
  misc_feature: SGI Peptide ID NO. 563243
  misc_feature (34)..(136): Pfam Id: PF08240 Pfam Desc: Alcohol dehydrogenase GroES-like domain
  misc_feature (167)..(308): Pfam Id: PF00107 Pfam Desc: Zinc-binding dehydrogenase
  misc_feature (34)..(93): Pfam Id: PF08240 Pfam Desc: Alcohol dehydrogenase GroES-like domain
  misc_feature (1)..(345): NCBI GI: 85089847 Blast Desc: NCU09285 [Neurospora crassa OR74A] gi|28919466|gb|EAA28901.1| NCU09285 [Neurospora crassa OR74A]
  misc_feature (4)..(346): NCBI GI: 169773569 Blast Desc: [Aspergillus oryzae RIB40] gi|83769114|dbj|BAE59251.1| protein product [Aspergillus oryzae]
  misc_feature (4)..(346): NCBI GI: 39975167 Blast Desc: MGG_00270 [Magnaporthe grisea 70-15] gi|145018858|gb|EDK03137.1| MGG_00270 [Magnaporthe grisea 70-15]
  misc_feature (4)..(346): NCBI GI: 119500882 Blast Desc: zinc-containing alcohol dehydrogenase, [Neosartorya fischeri NRRL 181] gi|119415363|gb|EAW25301.1| zinc-containing alcohol dehydrogenase, [Neosartorya fischeri NRRL 181]
  misc_feature (1)..(346): NCBI GI: 171681279 Blast Desc: protein product [Podospora anserina] gi|170940598|emb|CAP65826.1| protein product [Podospora anserina]
  misc_feature (7)..(345): NCBI GI: 159125085 Blast Desc: zinc-containing alcohol dehydrogenase, [Aspergillus fumigatus A1163]
  misc_feature (7)..(345): NCBI GI: 70994434 Blast Desc: zinc-containing alcohol dehydrogenase [Aspergillus fumigatus Af293] gi|66849636|gb|EAL89964.1| zinc-containing alcohol dehydrogenase, [Aspergillus fumigatus Af293]
  misc_feature (4)..(346): NCBI GI: 255936391 Blast Desc: Pc13g07960 [Penicillium chrysogenum Wisconsin 54-1255] gi|211583842|emb|CAP91865.1| Pc13g07960 [Penicillium chrysogenum Wisconsin 54-1255]
  misc_feature (4)..(346): NCBI GI: 238491570 Blast Desc: zinc-containing alcohol dehydrogenase, [Aspergillus flavus NRRL3357] gi|220697435|gb|EED53776.1| zinc-containing alcohol dehydrogenase, [Aspergillus flavus NRRL3357]
  misc_feature (4)..(346): NCBI GI: 115397933 Blast Desc: conserved [Aspergillus terreus NIH2624] gi|114192749|gb|EAU34449.1| conserved [Aspergillus terreus NIH2624]
  misc_feature (1)..(344): SWISSPROT Homolog: EC 1.1.1.1 Alcohol dehydrogenase
MAVPTSMKQWSVQGTGKGFDTVESIDSEVPKPGEQEVLVKLHAASINYRDLIIPKGQYPFPTKLPVVAGSDGAGEVIAVGSKVTKWKKGDKVVTLFNQGHQFGAIDIPAAATGLGGTIDGTLRPYGVFSETGIVRAPSNLNHNEAATLTCAALTSWNALYGLKALKPGGTVLVQGTGGVSLFALQFAKAAGAIVVATTSSEEKAQMLKKLGADHVLNYKTNTNWGETAKKLSPSGAGFDHIIEVGGAGTLEQSLKAIKYEGIITIIGFLGGVKAKSTLIDCLNSVCIARGAYVGSREQMEDMVASIEANDIHPVLDRKVFQLEQVKDAYQYMWDKGHVGKIVIEINSEKHTARSGFHPSL

SEQ ID NO: 10248 - DNA, 1847 bp, Muscodor strobelii; identical to SEQ ID NO: 10245
  misc_feature: SGI EST ID NO. CUFF.24380.1
  misc_feature: Variant of the nucleotide sequence at SEQ ID NO 10246

SEQ ID NO: 10249 - DNA, 876 bp, Muscodor strobelii
  misc_feature: SGI cDNA ID NO. 563244
  misc_feature: Encodes the peptide sequence at SEQ ID NO 10250
atgagtaaagaaaacgacgagcatgggctgcgagccaaaatcctggccatgccgcgagactgctcacatcgacagagcgtgatcaaatcatacgcaggctggattgaaaacagcttgcgggcggacgagacaattattgatccaggcgatccttgtgccgaagtctatgaattcttccgacagatccaagctgtatggataacgagccctggagcagtagctttgaaagcaatgttcgaagccctggctagtcttggatacttgtcaagttacttacacacaggtgtcgatgattacctctggaaatcagaagtgtcggtggcgtggcatgctgcaatactactggttgcatctattatctcccaacaaatcatactggaggcgctcggaatatacgccacgaatggccaggattaccataagaaggaccggtcaggggctcatggactacttgtcagcatcgacgataacactttagtgtttgctccagacacgaaattggacttacaacagaaaatttgcttgacgacccgaccagctggcctcatctggtgtcggaaaactgggacaaaacaaagaaaggacagattcttccgtcaattcatgtccgaatacgacagttatcaattctcgaaaccggctaagaagcgtccggccaggaccggagctaaagagcagaaacggaaacatgtggtcgcgaaaggaggtgaacgtagagacgaaaacgaaaacgaggacgaggatgaggatgatagcgcagagactagcgaagacgaggatcgcactagtaggttcctctggagatgtgagacttggatgcttaaagcgaatttgcaaacgtgtaaggaagaagcagatgcagtcatgcaagattga

SEQ ID NO: 10250 - protein, 291 aa, Muscodor strobelii
  misc_feature: SGI Peptide ID NO. 563244
MSKENDEHGLRAKILAMPRDCSHRQSVIKSYAGWIENSLRADETIIDPGDPCAEVYEFFRQIQAVWITSPGAVALKAMFEALASLGYLSSYLHTGVDDYLWKSEVSVAWHAAILLVASIISQQIILEALGIYATNGQDYHKKDRSGAHGLLVSIDDNTLVFAPDTKLDLQQKICLTTRPAGLIWCRKTGTKQRKDRFFRQFMSEYDSYQFSKPAKKRPARTGAKEQKRKHVVAKGGERRDENENEDEDEDDSAETSEDEDRTSRFLWRCETWMLKANLQTCKEEADAVMQD

SEQ ID NO: 10251 - DNA, 810 bp, Muscodor strobelii
  misc_feature: SGI cDNA ID NO. 563245
  misc_feature: Encodes the peptide sequence at SEQ ID NO 10252
atggctgaatccaccgtaccagtgtcaattcgccttggcaacaagcaggttgttaagcctaaggatcttgaagaacaattcgaagaatccaagcgagacctctctcacggccgctataaagagcactcagaacaagtcaaaaactttctcgaggaccctgaaagacgcaagcaccttatcgaagtcaaaaaaatcatatgctacggtcttggggaatacaccttttgggaaaacagcactgatactgtcaagttgttggagcgggcaatcaaccgatatgtcatggcccaacatatagcaaacactatcggacagaatgtcacattacgcgaagcgaacccaaacatacataaatactgggaaaaatatgaagtcgaggatggcaaggacgtgaaatattgcagacgagagctcgctcttggtgccttctgtggaatgcagagtttgactaaggatgttgatgacatcaatgggcgctgcgtgttatttgcttatggcataggagcagccgctctaaatttcgccttgaggaaaaaggatcttcctgctgcgataatagtgaggagaggttggctttggtacgaaaacgaggagatggagataagcgagctccttcacgagaaatactccaaggaagccgccaatgatgagtggtttgagtattttatcgatcacagcgtgaagactgtgtttgccgaagagaaacctcaatacattgaaatttggttacgaaaagatacccccagttcgaaatcaaatgaagaaacaccaggaggaacagaagcacaagtagcggagaagctcgaatag

SEQ ID NO: 10252 - protein, 269 aa, Muscodor strobelii
  misc_feature: SGI Peptide ID NO. 563245
MAESTVPVSIRLGNKQVVKPKDLEEQFEESKRDLSHGRYKEHSEQVKNFLEDPERRKHLIEVKKIICYGLGEYTFWENSTDTVKLLERAINRYVMAQHIANTIGQNVTLREANPNIHKYWEKYEVEDGKDVKYCRRELALGAFCGMQSLTKDVDDINGRCVLFAYGIGAAALNFALRKKDLPAAIIVRRGWLWYENEEMEISELLHEKYSKEAANDEWFEYFIDHSVKTVFAEEKPQYIEIWLRKDTPSSKSNEETPGGTEAQVAEKLE

SEQ ID NO: 10253 - DNA, 988 bp, Muscodor strobelii
  misc_feature: SGI EST ID NO. CUFF.24165.0
  misc_feature: Variant of the nucleotide sequence at SEQ ID NO 10251
cgacacaccgatatggctgaatccaccgtaccagtgtcaattcgccttggcaacaagcaggttgttaagcctaaggatcttgaagaacaattcgaagaatccaagcgagacctctctcacggccgctataaagagcactcagaacaagtcaaaaactttctcgaggaccctgaaagacgcaagcaccttatcgaagtcaaaaaaatcatatgctacggtcttggggaatacaccttttgggaaaacagcactgatactgtcaagttgttggagcgggcaatcaaccgatatgtcatggcccaacatatagcaaacactatcggacagaatgtcacattacgcgaagcgaacccaaacatacataaatactgggaaaaatatgaagtcgaggatggcaaggacgtgaaatattgcagacgagagctcgctcttggtgccttctgtggaatgcagagtttgactaaggatgttgatgacatcaatgggcgctgcgtgttatttgcttatggcataggagcagccgctctaaatttcgccttgaggaaaaaggatcttcctgctgcgataatagtgaggagaggttggctttggtacgaaaacgaggagatggagataagcgagctccttcacgagaaatactccaaggaagccgccaatgatgagtggtttgagtattttatcgatcacagcgtgaagactgtgtttgccgaagagaaacctcaatacattgaaatttggttacgaaaagatacccccagttcgaaatcaaatgaagaaacaccaggaggaacagaagcacaagtagcggagaagctcgaatagtttgtggctggaatcatcaggacgaagcgtctcaaaggatgtgcgatggtggccatagatgaatttttatattattccatcgacaggagactaccacttgcagggacggctctctgtctttagttatcttattgctcgttcctctactaattaaaatcgatttttt

SEQ ID NO: 10254 - DNA, 1098 bp, Muscodor strobelii
  misc_feature: SGI cDNA ID NO. 563246
  misc_feature: Encodes the peptide sequence at SEQ ID NO 10255
atgttgaatctgaagacagtattgtccgccatcgttgccgccctggcgacccgggtctccggcgtggccttcagcggggcgatcggcttcggcgctatcgcaacgggaggcacagggggaacaacagttcacgtcacaaatctaaacgactcaggtagtggctcatttcgcgacgcagtgagcggatctaatcgtattattgtcttcgacgttggtggttatatcacgctttcgtcagctgtatcgctttctagcagcatcacaattgacggaactacggcccctggaggtgggatagcgattagaggcggcgaggtctcggcgagcggcaagaacaatatcatcattcgtaacatccgcatgcgccaaggcacgctggatgatgacactggaaagtcggcattcaatatgggcaaggcgtcgaatattattcttgaccactgttccttcgcatatggccagtgggatagcatcgatgccgtaggcgtcgtaaatgtcactgtatcaaactcgatcatcgctttcccgatcggtcaacaatttggagctcacgttgagactgggccatcaaccttctatggcaatctatgggtgagcggtcacaatcgtcaaccactgagcaaggacaacacccaatacatcaacaatgtggtgtacaactaccaagctgcatataccgccgcgaacacaggcggatacttctcgcacgacatcatcaacaactatttcattacgggtcccagcacaacaagtacgaagaactgctactaccagatgaacgataagcagaccgtctatgctactggcaattatctagatagcaacaatgacggtgctttaaatggggctgagaataacgcggtcggctcggctatcgtcgcgacttcgccttgggctagtacttctaaaggctacgcgacctggactgctgcgcaggcttacacttctgtgctttctggcgcgggggcacagccgcgcgatgaagtcgatgcttttgccgtttctactacaaaatctctgggtaccgcaggcacgctgtataaaagcgagagcagcactgggttgtccaacggcggttatggtaccatctctggctga

SEQ ID NO: 10255 - protein, 365 aa, Muscodor strobelii
  misc_feature: SGI Peptide ID NO. 563246
  misc_feature (22)..(363): NCBI GI: 261416398 Blast Desc: Fisuc_2012 [Fibrobacter succinogenes subsp. succinogenes S85] gi|261372854|gb|ACX75599.1| Fisuc_2012 [Fibrobacter succinogenes subsp. succinogenes S85]
  misc_feature (120)..(319): NCBI GI: 212539476 Blast Desc: conserved [Penicillium marneffei ATCC 18224] gi|210067192|gb|EEA21284.1| conserved [Penicillium marneffei ATCC 18224]
  misc_feature (23)..(365): NCBI GI: 162453180 Blast Desc: sce4904 [Sorangium cellulosum 'So ce 56'] gi|161163762|emb|CAN95067.1| [Sorangium cellulosum 'So ce 56']
  misc_feature (2)..(365): NCBI GI: 119473327 Blast Desc: NFIA_060270 [Neosartorya fischeri NRRL 181] gi|119406720|gb|EAW16671.1| conserved [Neosartorya fischeri NRRL 181]
  misc_feature (2)..(354): NCBI GI: 115398107 Blast Desc: conserved [Aspergillus terreus NIH2624] gi|114192836|gb|EAU34536.1| conserved [Aspergillus terreus NIH2624]
  misc_feature (2)..(365): NCBI GI: 70992931 Blast Desc: conserved [Aspergillus fumigatus Af293] gi|66848947|gb|EAL89276.1| conserved [Aspergillus fumigatus Af293]
  misc_feature (2)..(365): NCBI GI: 159130233 Blast Desc: conserved [Aspergillus fumigatus A1163]
  misc_feature (2)..(365): NCBI GI: 255936275 Blast Desc: Pc13g07340 [Penicillium chrysogenum Wisconsin 54-1255] gi|211583784|emb|CAP91803.1| Pc13g07340 [Penicillium chrysogenum Wisconsin 54-1255]
  misc_feature (22)..(364): NCBI GI: 255691072 Blast Desc: pectate lyase [Bacteroides finegoldii DSM 17565] gi|260623421|gb|EEX46292.1| pectate lyase [Bacteroides finegoldii DSM 17565]
  misc_feature (22)..(361): NCBI GI: 227536384 Blast Desc: fibronectin, type III domain protein [Sphingobacterium spiritivorum ATCC 33300] gi|227243760|gb|EEI93775.1| fibronectin, type III domain protein [Sphingobacterium spiritivorum ATCC
MLNLKTVLSAIVAALATRVSGVAFSGAIGFGAIATGGTGGTTVHVTNLNDSGSGSFRDAVSGSNRIIVFDVGGYITLSSAVSLSSSITIDGTTAPGGGIAIRGGEVSASGKNNIIIRNIRMRQGTLDDDTGKSAFNMGKASNIILDHCSFAYGQWDSIDAVGVVNVTVSNSIIAFPIGQQFGAHVETGPSTFYGNLWVSGHNRQPLSKDNTQYINNVVYNYQAAYTAANTGGYFSHDIINNYFITGPSTTSTKNCYYQMNDKQTVYATGNYLDSNNDGALNGAENNAVGSAIVATSPWASTSKGYATWTAAQAYTSVLSGAGAQPRDEVDAFAVSTTKSLGTAGTLYKSESSTGLSNGGYGTISG

SEQ ID NO: 10256 - DNA, 1422 bp, Muscodor strobelii
  misc_feature: SGI EST ID NO. CUFF.24167.0
  misc_feature: Variant of the nucleotide sequence at SEQ ID NO 10254
cccgggcccacaacatccgttgccgctacagggtagacagcagactcaggggcagacttaagtgatatataacgccgtttcgagcagggagagggaatgatgcatacgtcgtgactgtatgttggccttgagccctggtgaagagtcagaactgtgggcagatagtacatcctactccaatattatatatcaagagagctatccatatttcgagccgattactgatatcaatcacacaatatgttgaatctgaagacagtattgtccgccatcgttgccgccctggcgacccgggtctccggcgtggccttcagcggggcgatcggcttcggcgctatcgcaacgggaggcacagggggaacaacagttcacgtcacaaatctaaacgactcaggtagtggctcatttcgcgacgcagtgagcggatctaatcgtattattgtcttcgacgttggtggttatatcacgctttcgtcagctgtatcgctttctagcagcatcacaattgacggaactacggcccctggaggtgggatagcgattagaggcggcgaggtctcggcgagcggcaagaacaatatcatcattcgtaacatccgcatgcgccaaggcacgctggatgatgacactggaaagtcggcattcaatatgggcaaggcgtcgaatattattcttgaccactgttccttcgcatatggccagtgggatagcatcgatgccgtaggcgtcgtaaatgtcactgtatcaaactcgatcatcgctttcccgatcggtcaacaatttggagctcacgttgagactgggccatcaaccttctatggcaatctatgggtgagcggtcacaatcgtcaaccactgagcaaggacaacacccaatacatcaacaatgtggtgtacaactaccaagctgcatataccgccgcgaacacaggcggatacttctcgcacgacatcatcaacaactatttcattacgggtcccagcacaacaagtacgaagaactgctactaccagatgaacgataagcagaccgtctatgctactggcaattatctagatagcaacaatgacggtgctttaaatggggctgagaataacgcggtcggctcggctatcgtcgcgacttcgccttgggctagtacttctaaaggctacgcgacctggactgctgcgcaggcttacacttctgtgctttctggcgcgggggcacagccgcgcgatgaagtcgatgcttttgccgtttctactacaaaatctctgggtaccgcaggcacgctgtataaaagcgagagcagcactgggttgtccaacggcggttatggtaccatctctggctgatgcgatggaatgttcggatgggacacatattgattcgtagtacaataatgaggcagtgtctacgtgctacccaattattcacag

SEQ ID NO: 10257 - DNA, 399 bp, Muscodor strobelii
  misc_feature: SGI cDNA ID NO. 563247
  misc_feature: Encodes the peptide sequence at SEQ ID NO 10258
atgaccactgcagcagccacagagcctattaaaattcctgctacaatgctacctgagagtctggaggtagaagtcggcgtcgacaaaacatcagagctagtcggccttgccactgaaggactggccatagttgtagaagaaatgaagctcatggtggagactggtgttggcaaagatgtttcttgggctgatgacaaggtcatcgcagttgtagtcgatatggttgtcgccgtagctatgttgcgtatctctacgctgtacgcccagagtgcaccaaaagtctcggtgatgtctgtgatcgtgaatcctgatccgataggcggtgtgaatggggtggtcaagggcccaagacttgtgctagatgccgtctccatctttgagcattctcgattaaactga

SEQ ID NO: 10258 - protein, 132 aa, Muscodor strobelii
  misc_feature: SGI Peptide ID NO. 563247
MTTAAATEPIKIPATMLPESLEVEVGVDKTSELVGLATEGLAIVVEEMKLMVETGVGKDVSWADDKVIAVVVDMVVAVAMLRISTLYAQSAPKVSVMSVIVNPDPIGGVNGVVKGPRLVLDAVSIFEHSRLN

SEQ ID NO: 10259 - DNA, 238 bp, Muscodor strobelii
  misc_feature: SGI EST ID NO. CUFF.24173.0
  misc_feature: Variant of the nucleotide sequence at SEQ ID NO 10257
gcggtgtgaatggggtggtcaagggcccaagacttgtgctagatgccgtctccatctttgagcattctcgattaaactgagagaaagacagtctgttttatcattagaacagaatcaaaagattcgttgtcatcaagctttcgtgcccaaggtttattaccctcaaaggagcacgcccccacgtaacatcgcgacatgacttcagccatgatggtccgctatccgccactcatttcaa

SEQ ID NO: 10260 - DNA, 900 bp, Muscodor strobelii
  misc_feature: SGI cDNA ID NO. 563248
  misc_feature: Encodes the peptide sequence at SEQ ID NO 10261
atggcatctgcagagggatccacctccgacattcaccagccgagcactgggctcaaacattgtccgccagaactacttctcagcatcgccaatctcttgcagcgcccgcgcgacgtgtataactttgcacgcatcaacaaggcaacctggtgcgcagcaaaggaagagattctcatcaaggacatacttttctggaaggcttatctacccggccacttcaagaagttgttgaacggcgcccctcgttataaaaaagagttgcatgcgggaatagagttgctcctatctcagcctgccgacatacgcaacgatacaagagagtatttcggcgaaatcatcttgaaaggcgaagtctacggcatgaggctcttgcgcacatctgctttggattggctcattcggcacgatcaaatcctgggagcaacacgcatcatcgagctggcgaaagtctactggccgttctacataaatgtgcctagtcatgatggtctattaccgattcacattgcaacacttcgaggacaaatatccgttgcgaaaattctcctcaatgagaagatctgccgctatcattacgggcttctcaagacccagaaattcgtggccctgatgaataattcccgcttcagaatcgacatcctaggaatagcgatcgtgagccaacagtccgatatgattgagttgttggtcgagaggctctcagcagaacattacaagaacgagacttcatggtaccgcggtgtatacccgctccaccttgctattatcttgggacttcctaacatggttgaattacttctgaaaaggggattcaaccccgatttccaggacccaaagctccatacaactatgttgacatggaccgaagagatattcaaagtcgtctgtcgtaatcgttga

SEQ ID NO: 10261 - protein, 299 aa, Muscodor strobelii
  misc_feature: SGI Peptide ID NO. 563248
  misc_feature (246)..(278): Pfam Id: PF00023 Pfam Desc: Ankyrin repeat
  misc_feature (112)..(270): NCBI GI: 229442237 Blast Desc: ankyrin 2 isoform 1 [synthetic construct]
  misc_feature (112)..(270): NCBI GI: 109075429 Blast Desc: : ankyrin 2, neuronal isoform 5 [Macaca mulatta]
  misc_feature (112)..(270): NCBI GI: 52426737 Blast Desc: ankyrin 2 isoform 2 [Homo sapiens] gi|119626694|gb|EAX06289.1| ankyrin 2, neuronal, isoform CRA_c [Homo sapiens] gi|168278397|dbj|BAG11078.1| ankyrin-2 [synthetic
  misc_feature (112)..(270): NCBI GI: 4803678 Blast Desc: ankyrin (brank-2) [Homo sapiens]
  misc_feature (112)..(270): NCBI GI: 109075431 Blast Desc: : ankyrin 2, neuronal isoform 7 [Macaca mulatta]
  misc_feature (112)..(270): NCBI GI: 109075419 Blast Desc: : ankyrin 2, neuronal isoform 3 [Macaca mulatta]
  misc_feature (112)..(270): NCBI GI: 126331145 Blast Desc: : similar to ankyrin 2 isoform 2 [Monodelphis domestica]
  misc_feature (112)..(270): NCBI GI: 221042890 Blast Desc: protein product [Homo sapiens]
  misc_feature (112)..(270): NCBI GI: 188595682 Blast Desc: ankyrin 2 isoform 3 [Homo sapiens]
  misc_feature (112)..(270): NCBI GI: 109465474 Blast Desc: : similar to ankyrin 2 isoform 2 [Rattus norvegicus]
MASAEGSTSDIHQPSTGLKHCPPELLLSIANLLQRPRDVYNFARINKATWCAAKEEILIKDILFWKAYLPGHFKKLLNGAPRYKKELHAGIELLLSQPADIRNDTREYFGEIILKGEVYGMRLLRTSALDWLIRHDQILGATRIIELAKVYWPFYINVPSHDGLLPIHIATLRGQISVAKILLNEKICRYHYGLLKTQKFVALMNNSRFRIDILGIAIVSQQSDMIELLVERLSAEHYKNETSWYRGVYPLHLAIILGLPNMVELLLKRGFNPDFQDPKLHTTMLTWTEEIFKVVCRNR

SEQ ID NO: 10262 - DNA, 1266 bp, Muscodor strobelii
  misc_feature: SGI cDNA ID NO. 563249
  misc_feature: Encodes the peptide sequence at SEQ ID NO 10263
atggcggggacatcaaacaacaacatcactctcaggcgccatgacctcgataacctgcgcaccgcgttgacagggcttgtcacggtccatcacagcgcaatcgcgtatggaggtatcggctcatggatgttctactcggctggatttgagcatgcatcgtcatccattctcatgggaatgaatgtgttcaatcagtcctttttcatgggcctgttcttctggatctcgggtcgtgtgtcggcgcaatcgctttcccgaacgcccctctcagctttcatgaagagcaaggctatcagactcggtattcctgccctggtatatagctatatcatcaatcctgctactcgggcggttcttcatggatctcttgctagtgtgctgccgatcagtcatggtttgcgtggtcctgtgtggtacatcggcaccttgctggttttcgatgtcgctgccgcattggcaaagagatggggagtgctcggcacgaagaaaaaagatgcattaattcagtctgagacctacagacttttgtgtcagtacggttggatcggggttgggctatcgtcgttccttgtgcgattatggtatcccattggggctacaataccgtttctcaatctacaacccgcattcgtttcacagtacatctatgcttactgcctgggcctgatgtcgcatcaagagaatgaagatgacatgtactcacttctcgatcctgccctggatcaggcgactatcaaagaggcatcattacaatctgataaaattaccggaaaggagaaaaactctggtctgattaaagctaccgcagtatcattggctactatgtctctctgcatcctgccagcttgtggttttgctggaaagacatggatgaaagttgccgttgactatcttcctggcggactgaatatgacagctttcgcgttcgcaatctggaatgagttctcattcatgataatggcgcccgccctgctgaagtacttccgacgatggcattctcagcccacttcttcttcggtgatcgttcctcgctcatcttatgcagcattcctgatccacgcaccggttacaatcttggctcaatctattgcggataaagtactgtttcctgatggtcgcctccaaccttggatgcatagtagtcaatggcaactcctcgggccagcccttgtgaccttggcagttggcctggcgagcaactatacatcgttttatctcggaggaaagtttctgaactggctgcctggtgctcggaatatcgtatga

SEQ ID NO: 10263 - protein, 421 aa, Muscodor strobelii
  misc_feature: SGI Peptide ID NO. 563249
  misc_feature (6)..(421): NCBI GI: 90425766 Blast Desc: acyltransferase 3 [Rhodopseudomonas palustris BisB18] gi|90107780|gb|ABD89817.1| acyltransferase 3 [Rhodopseudomonas palustris BisB18]
  misc_feature (26)..(368): NCBI GI: 189466011 Blast Desc: BACINT_02375 [Bacteroides intestinalis DSM 17393] gi|189434275|gb|EDV03260.1| BACINT_02375 [Bacteroides intestinalis DSM 17393]
  misc_feature (26)..(358): NCBI GI: 224539647 Blast Desc: BACCELL_04555 [Bacteroides cellulosilyticus DSM 14838] gi|224518738|gb|EEF87843.1| BACCELL_04555 [Bacteroides cellulosilyticus DSM 14838]
  misc_feature (12)..(366): NCBI GI: 169607273 Blast Desc: SNOG_06694 [Phaeosphaeria nodorum SN15] gi|111064225|gb|EAT85345.1| SNOG_06694 [Phaeosphaeria nodorum SN15]
  misc_feature (12)..(361): NCBI GI: 154149939 Blast Desc: acyltransferase 3 [Candidatus Methanoregula boonei 6A8] gi|153998491|gb|ABS54914.1| acyltransferase 3 [Candidatus Methanoregula boonei 6A8]
  misc_feature (1)..(152): NCBI GI: 107028523 Blast Desc: Bcen_5778 [Burkholderia cenocepacia AU 1054] gi|116686521|ref|YP_839768.1| Bcen2424_6143 [Burkholderia cenocepacia HI2424] gi|105897687|gb|ABF80645.1| conserved AU
  misc_feature (16)..(222): NCBI GI: 37523913 Blast Desc: glr4344 [Gloeobacter violaceus PCC 7421] gi|35214919|dbj|BAC92285.1| glr4344 [Gloeobacter violaceus PCC 7421]
  misc_feature (1)..(152): NCBI GI: 170735119 Blast Desc: acyltransferase 3 [Burkholderia cenocepacia MC0-3] gi|169821157|gb|ACA95738.1| acyltransferase 3 [Burkholderia cenocepacia MC0-3]
  misc_feature (12)..(358): NCBI GI: 83595037 Blast Desc: Rru_A3708 [Rhodospirillum rubrum ATCC 11170] gi|83577951|gb|ABC24502.1| conserved [Rhodospirillum rubrum ATCC 11170]
  misc_feature (12)..(370): NCBI GI: 262384177 Blast Desc: acyltransferase [Bacteroides sp. 2_1_33B] gi|262295075|gb|EEY83007.1| acyltransferase [Bacteroides sp. 2_1_33B]
MAGTSNNNITLRRHDLDNLRTALTGLVTVHHSAIAYGGIGSWMFYSAGFEHASSSILMGMNVFNQSFFMGLFFWISGRVSAQSLSRTPLSAFMKSKAIRLGIPALVYSYIINPATRAVLHGSLASVLPISHGLRGPVWYIGTLLVFDVAAALAKRWGVLGTKKKDALIQSETYRLLCQYGWIGVGLSSFLVRLWYPIGATIPFLNLQPAFVSQYIYAYCLGLMSHQENEDDMYSLLDPALDQATIKEASLQSDKITGKEKNSGLIKATAVSLATMSLCILPACGFAGKTWMKVAVDYLPGGLNMTAFAFAIWNEFSFMIMAPALLKYFRRWHSQPTSSSVIVPRSSYAAFLIHAPVTILAQSIADKVLFPDGRLQPWMHSSQWQLLGPALVTLAVGLASNYTSFYLGGKFLNWLPGARNIV

SEQ ID NO: 10264 - DNA, 2065 bp, Muscodor strobelii
  misc_feature: SGI EST ID NO. CUFF.24185.0
  misc_feature: Variant of the nucleotide sequence at SEQ ID NO 10262
ggacagtagaaatccggctgcctaaagatgacactcgagaatggctcaaatcagaatcatgaacgcgcattcaaggcgctggaagaactttatcttcaaccatttccaatacctaaatgaatgaggctgagcaattgagacattacgaccgatatggcggggacatcaaacaacaacatcactctcaggcgccatgacctcgataacctgcgcaccgcgttgacagggcttgtcacggtccatcacagcgcaatcgcgtatggaggtatcggctcatggatgttctactcggctggatttgagcatgcatcgtcatccattctcatgggaatgaatgtgttcaatcagtcctttttcatgggcctgttcttctggatctcgggtcgtgtgtcggcgcaatcgctttcccgaacgcccctctcagctttcatgaagagcaaggctatcagactcggtattcctgccctggtatatagctatatcatcaatcctgctactcgggcggttcttcatggatctcttgctagtgtgctgccgatcagtcatggtttgcgtggtcctgtgtggtacatcggcaccttgctggttttcgatgtcgctgccgcattggcaaagagatggggagtgctcggcacgaagaaaaaagatgcattaattcagtctgagacctacagacttttgtgtcagtacggttggatcggggttgggctatcgtcgttccttgtgcgattatggtatcccattggggctacaataccgtttctcaatctacaacccgcattcgtttcacagtacatctatgcttactgcctgggcctgatgtcgcatcaagagaatgaagatgacatgtactcacttctcgatcctgccctggatcaggcgactatcaaagaggcatcattacaatctgataaaattaccggaaaggagaaaaactctggtctgattaaagctaccgcagtatcattggctactatgtctctctgcatcctgccagcttgtggttttgctggaaagacatggatgaaagttgccgttgactatcttcctggcggactgaatatgacagctttcgcgttcgcaatctggaatgagttctcattcatgataatggcgcccgccctgctgaagtacttccgacgatggcattctcagcccacttcttcttcggtgatcgttcctcgctcatcttatgcagcattcctgatccacgcaccggttacaatcttggctcaatctattgcggataaagtactgtttcctgatggtcgcctccaaccttggatgcatagtagtcaatggcaactcctcgggccagcccttgtgaccttggcagttggcctggcgagcaactatacatcgttttatctcggaggaaagtttctgaactggctgcctggtgctcggaatatcgtatgatttggagttgtgtgaaaagcaaaacatcaacgattacgacagacgactttgaatatctcttcggtccatgtcaacatagttgtatggagctttgggtcctggaaatcggggttgaatccccttttcagaagtaattcaaccatgttaggaagtcccaagataatagcaaggtggagcgggtatacaccgcggtaccatgaagtctcgttcttgtaatgttctgctgagagcctctcgaccaacaactcaatcatatcggactgttggctcacgatcgctattcctaggatgtcgattctgaagcgggaattattcatctagtaggttaagggccttatgttagtcaagttcccaatgtacttgcaaggtggtgcccaggaaatgcgaggaaaatctaattcctaacagacgctacttactacaaagagtcagcatacatgtctcaagaacagaagcgagagataacgttggtagaaatacataccagggccacgaatttctgggtcttgagaagctgcggccgacatcagactggaattgatctttgccatacacgtgtgcaaactcgcacacaccccgtaatgatagcggcagatcttctcattgaggagaattttcgcaacggatatttgtcctcgaagtgttg

SEQ ID NO: 10265 - DNA, 855 bp, Muscodor strobelii
  misc_feature: SGI cDNA ID NO. 563250
  misc_feature: Encodes the peptide sequence at SEQ ID NO 10266
atgggagaatcttttgaatcacagagacttgttgaggcgcttgagtctgcacttcagcattggaggcagagtcctcagcgacgtgagctgataaatttccttaaggataggcttaacgagactacaaacattgtatgctttggtttcggcagttttcgaaatgagcaacaacaaccgccgcttgctccagacaatgaactgtacgatgcggctcgatacagacatgcatttatccttgacattgctagacttgtggaagagaccccagatgggcccattgatgaaggcgacgggaaactgaagaggagcgtgtacttgcacgacagtacatatggagaagcacacttgcaagcgttgaagtgcttgaaaattgtaggagactgtgataagagtaaagaaagcgacttcatcgaccagatcagcggcaataccttgctattcatacatcgtgttactgagagttccgacatcatgcaagccttgaaaacattcggccccgacaaaacttctaacgttaaagagctacccagaaccattatctacacctcgaaatctatcaagtatgctgacgagtttgactttgcgagcggtctcttttggacgctcaattataagactatgaaggagcgtgtcgtacctgagtggttcaaacccctagatcccgtcaaagacacagatacgacattttataaccaaatcgtcctttttcttcggacaccgggatcggaaaatgatcaaggttccggtaatactgaagaagacggcttggttagtaaagagctgcaggtgtatacgcgttccttgaggcgtacggcaggcatcggagaagcgccgcgagcacaggaaatgaagtaa

SEQ ID NO: 10266 - protein, 284 aa, Muscodor strobelii
  misc_feature: SGI Peptide ID NO. 563250
MGESFESQRLVEALESALQHWRQSPQRRELINFLKDRLNETTNIVCFGFGSFRNEQQQPPLAPDNELYDAARYRHAFILDIARLVEETPDGPIDEGDGKLKRSVYLHDSTYGEAHLQALKCLKIVGDCDKSKESDFIDQISGNTLLFIHRVTESSDIMQALKTFGPDKTSNVKELPRTIIYTSKSIKYADEFDFASGLFWTLNYKTMKERVVPEWFKPLDPVKDTDTTFYNQIVLFLRTPGSENDQGSGNTEEDGLVSKELQVYTRSLRRTAGIGEAPRAQEMK

SEQ ID NO: 10267 - DNA, 1025 bp, Muscodor strobelii
  misc_feature: SGI EST ID NO. CUFF.24188.0
  misc_feature: Variant of the nucleotide sequence at SEQ ID NO 10265
gaagaggactaataataatgattaagtcgcgaaacaatttactgcgttgtttctgcgaatgagttgagaaaagcgatgggagaatcttttgaatcacagagacttgttgaggcgcttgagtctgcacttcagcattggaggcagagtcctcagcgacgtgagctgataaatttccttaaggataggcttaacgagactacaaacattgtatgctttggtttcggcagttttcgaaatgagcaacaacaaccgccgcttgctccagacaatgaactgtacgatgcggctcgatacagacatgcatttatccttgacattgctagacttgtggaagagaccccagatgggcccattgatgaaggcgacgggaaactgaagaggagcgtgtacttgcacgacagtacatatggagaagcacacttgcaagcgttgaagtgcttgaaaattgtaggagactgtgataagagtaaagaaagcgacttcatcgaccagatcagcggcaataccttgctattcatacatcgtgttactgagagttccgacatcatgcaagccttgaaaacattcggccccgacaaaacttctaacgttaaagagctacccagaaccattatctacacctcgaaatctatcaagtatgctgacgagtttgactttgcgagcggtctcttttggacgctcaattataagactatgaaggagcgtgtcgtacctgagtggttcaaacccctagatcccgtcaaagacacagatacgacattttataaccaaatcgtcctttttcttcggacaccgggatcggaaaatgatcaaggttccggtaatactgaagaagacggcttggttagtaaagagctgcaggtgtatacgcgttccttgaggcgtacggcaggcatcggagaagcgccgcgagcacaggaaatgaagtaaagtgacgtatgccgtcacattttcattatttttagtcgcttgcaattaaattatcacattctagagtttgcgaaagcctcagatttaagtgtccc

SEQ ID NO: 10268 - DNA, 3648 bp, Muscodor strobelii
  misc_feature: SGI cDNA ID NO. 563251
  misc_feature: Encodes the peptide sequence at SEQ ID NO 10269
atggatattcaactttctgaagtgccgacgatttttgcggttcatgacctcaaagcggcactccacacagaactaacgaagctcgataagagcttcaaatctgatttccttgtctttctggactacaatatcgaacaggtcgagtggggaaagctcaacggaacgacaagaccaccagccaccgcgcttttggtgcttcctaatcccactttggccaacaaatttcttggtgctcgaatatctatccccttgccggcgccaggaacaggagtgtacaatgttctggccaagaaggctgaaccacagctgacacttgagtctgaattcaaaagactggaggatgcaccttaccagcctgaaaccaaccttccaagtgagtggagcggtcccgtcgccgagatcaccaagttgcagtgcggccttttctgggatgatggaacttttgatgcggcggcatcttgggtccctaccgctccgcttaattggttttctttctttggtgacgtccgcccgcggaagtttgaggccggtgtgtcctatgcgagcaatcataaactagagcagtggactggggaatggatcgacttccatttgcgtgggctctctcacatcttagtccctccaaccaagccagggaatagtataaaggagctctacttcttgatggacaggcctccaaggttctacaagcgacagttggatgaagtaggagtcgctcatgattaccgcgtctccaagattagcatcccaagccagccagtctctcctgatgatgttccatggtccctgcaatattctcgtgtatattacgttcaactgaaggatcagcccaatgagccttcaactttgacattggactttctcaaagggcttctgcctgaaattaagacaggaaagattgaattgcgcgaactcgacgtgaaacactgcgcgacctcccaaactagattcaccaccgaaatttttgatacgatccgagcattcccaacgggcttgcctttagacgaaggattgatgtacgaaagactgcatcggaacggatacttcgcaccctgggagctccaatcgctgaacaacaagattcaagcactgctccatactgcgggtgagacaggaaggaatttcctagaatttgtcatgcaagagaccagcaagtcatatattcgggctctgcctgataaggctcgccaacattcaaagatcaacgaacagaaactacaagatctgtggaatgaattcaacagcaagaatctggtcccaggcgcttcacctaagccttcgaaaccgcgtgtattcagggctgtggtattcccatcgcatcttgaaataggccaaaacgaaataacggacacaaacagagtcttacgccagtataacaacatctccaagaattttctccaggtcgctttcatggacaaaaacagaatcttcgacattgaacctgacactaaccccacccaactgattacggaacgggttgtaaacacactgaaaacgaaattgaggctcggaggccgagacttcgacttcttaggcttttcgaactcagccttgaaggagaggaagcaagtgtggttcttctcaaggaccccggatgttacagcggagactattcggaacggcatcggtgactggcagaggaacgataacgacactaagaagcttgtgaaatgcccgtcaaaatgggctgctagaatcgctcaggcttttagcagtacacaggttgtcgcgactctgaagccaaatgagtgggctggtgacatgaaagacattgaagctactatcgataaagaaacgtacacgttcacggatggcatagggattatctcagagggccttcggaaagagatcaatgataagctctacccaaatccggccacgaggccaaagaatctgccttgcgcattccagattcgcttcgccggcgcaaaaggtgtggtttgtgttgccgatgactctcttttccaggatggcaaaaagttgagacttaggccctctatggtcaaattccatattccaaacgaggataaagtagccatcgaccttgagctgtcttcggccggaaagaatcggccgccagctaccttcaacaagactctaataaagctgatggaaggatacttcagcgccgactcggaagccataaagacactccgcaagctttatgccacggaacttgcaagattggcagcaaccggcgataaaagcctcgccgcagctgatatcgttgcacaagagggaaggttcggtgatgatctcgggtttgcccctctcctcaagtgcctgaagagcaaaaacatcgggtggaacgcgttaaagggttcattccttcaccaggcggtcgtaacactgctgcgcgagcagtacttgcgtgtccacttcgagttcaaactacccatccccggatcttatactggtcttggcgtggtcgacgaatatgcggtgctcactcctgacgagatctatgtccgctctggtggtcatacaatcaccggagacgtgcttatctatcgcaatcctatgatccacccgggcgatgcccagatccggaaagccatttctgacgacgaaatcaagcacaaggttctcgatggcaaaccagggcgaaagctactggaacttgataatgtggtagtcttctcgcaatcgacggtgggcggtttgagaccattgccaaacatgctatcaggcggggatctcgatggggacatatactgcgtgttgaccaaggactcaggatttgttccagacaagaccaaaatcgccactcctggcaagtacgaagctgcaccttcagtctcacttgatcgaccggcgactatcaatgatgtctgtgactttatcggaacattcttacgctacgactgcatgggactacttagcaatttacaggttattgtctcggacaggtcgccgaaaggcttatggggcgcggagtccatcaggctctctgctctcctatctcatgccgtggacttccagaagaacggaagtcacgttgactacgacctggagagcaagcggccggagtcctctacccgaagaaagccagattttctaaggaaaccaatgctcaaaaatgccccagacagacgccacgagttttacccttccccgcatatcttaggccagctattcaggacggcagaggagggcaactttgacgccttgtcaattgacaacactgaacttgcgaaggctattgagaagctgagacctacatacaagcctgctactgaaatcgagacgttgattcaatctactctccaaagccgtctggagaagtatcgtaagaagatgtgggacatcttcggagatgcccagatggagaacatcgcatcttccgagtccgatctcttcctgttactgaacaaaatcagcaacgatgtcaccgctaaagaaaccatcaagagacggatgagtgacctagtggaagacactataatatctctgatcggagcgcaagacaagcgggtcaagatagaagagaaacaagtgaggctgtacatttggtttgcagcgtgggaactcggcgttgggaacctcgatgctattgatctgttaggcgacgtcgtgcccgtgccggcaggtttcggctcgagctttgcctttattggactattcgaattctttgatccgggacaatag

SEQ ID NO: 10269 - protein, 1215 aa, Muscodor strobelii
  misc_feature: SGI Peptide ID NO. 563251
  misc_feature (587)..(998): Pfam Id: PF05183 Pfam Desc: RNA dependent RNA polymerase
  misc_feature (797)..(998): Pfam Id: PF05183 Pfam Desc: RNA dependent RNA polymerase
  misc_feature (587)..(705): Pfam Id: PF05183 Pfam Desc: RNA dependent RNA polymerase
  misc_feature (426)..(1054): NCBI GI: 240110792 Blast Desc: RNA-directed RNA polymerase, [Coccidioides posadasii C735 delta SOWgp]
  misc_feature (426)..(1054): NCBI GI: 119196681 Blast Desc: CIMG_02715 [Coccidioides immitis RS]
  misc_feature (451)..(1050): NCBI GI: 169844306 Blast Desc: CC1G_03668 [Coprinopsis cinerea okayama7#130] gi|116509986|gb|EAU92881.1| CC1G_03668 [Coprinopsis cinerea okayama7#130]
  misc_feature (311)..(1050): NCBI GI: 169852898 Blast Desc: CC1G_01193 [Coprinopsis cinerea okayama7#130] gi|116505925|gb|EAU88820.1| CC1G_01193 [Coprinopsis cinerea okayama7#130]
  misc_feature (431)..(1050): NCBI GI: 242221257 Blast Desc: [Postia placenta Mad-698-R] gi|220724386|gb|EED78433.1| [Postia placenta Mad-698-R]
  misc_feature (425)..(1047): NCBI GI: 170094614 Blast Desc: RNA-directed RNA polymerase [Laccaria bicolor S238N-H82] gi|164646982|gb|EDR11227.1| RNA-directed RNA polymerase [Laccaria bicolor S238N-H82]
  misc_feature (430)..(1051): NCBI GI: 171683804 Blast Desc: protein product [Podospora anserina] gi|170941862|emb|CAP67515.1| protein product [Podospora anserina]
  misc_feature (426)..(1068): NCBI GI: 240276859 Blast Desc: RNA-dependent RNA polymerase [Ajellomyces capsulatus H143]
  misc_feature (397)..(1051): NCBI GI: 85110327 Blast Desc: NCU08435 [Neurospora crassa OR74A] gi|28881256|emb|CAD70515.1| related to RNA-directed RNA polymerase [Neurospora crassa] gi|28925084|gb|EAA34169.1| crassa
  misc_feature (431)..(1054): NCBI GI: 238842968 Blast Desc: RNA-dependent RNA polymerase [Microsporum canis CBS 113480]
  misc_feature (447)..(1047): SWISSPROT Homolog: EC 2.7.7.48 RNA-directed RNA polymerase
MDIQLSEVPTIFAVHDLKAALHTELTKLDKSFKSDFLVFLDYNIEQVEWGKLNGTTRPPATALLVLPNPTLANKFLGARISIPLPAPGTGVYNVLAKKAEPQLTLESEFKRLEDAPYQPETNLPSEWSGPVAEITKLQCGLFWDDGTFDAAASWVPTAPLNWFSFFGDVRPRKFEAGVSYASNHKLEQWTGEWIDFHLRGLSHILVPPTKPGNSIKELYFLMDRPPRFYKRQLDEVGVAHDYRVSKISIPSQPVSPDDVPWSLQYSRVYYVQLKDQPNEPSTLTLDFLKGLLPEIKTGKIELRELDVKHCATSQTRFTTEIFDTIRAFPTGLPLDEGLMYERLHRNGYFAPWELQSLNNKIQALLHTAGETGRNFLEFVMQETSKSYIRALPDKARQHSKINEQKLQDLWNEFNSKNLVPGASPKPSKPRVFRAVVFPSHLEIGQNEITDTNRVLRQYNNISKNFLQVAFMDKNRIFDIEPDTNPTQLITERVVNTLKTKLRLGGRDFDFLGFSNSALKERKQVWFFSRTPDVTAETIRNGIGDWQRNDNDTKKLVKCPSKWAARIAQAFSSTQVVATLKPNEWAGDMKDIEATIDKETYTFTDGIGIISEGLRKEINDKLYPNPATRPKNLPCAFQIRFAGAKGVVCVADDSLFQDGKKLRLRPSMVKFHIPNEDKVAIDLELSSAGKNRPPATFNKTLIKLMEGYFSADSEAIKTLRKLYATELARLAATGDKSLAAADIVAQEGRFGDDLGFAPLLKCLKSKNIGWNALKGSFLHQAVVTLLREQYLRVHFEFKLPIPGSYTGLGVVDEYAVLTPDEIYVRSGGHTITGDVLIYRNPMIHPGDAQIRKAISDDEIKHKVLDGKPGRKLLELDNVVVFSQSTVGGLRPLPNMLSGGDLDGDIYCVLTKDSGFVPDKTKIATPGKYEAAPSVSLDRPATINDVCDFIGTFLRYDCMGLLSNLQVIVSDRSPKGLWGAESIRLSALLSHAVDFQKNGSHVDYDLESKRPESSTRRKPDFLRKPMLKNAPDRRHEFYPSPHILGQLFRTAEEGNFDALSIDNTELAKAIEKLRPTYKPATEIETLIQSTLQSRLEKYRKKMWDIFGDAQMENIASSESDLFLLLNKISNDVTAKETIKRRMSDLVEDTIISLIGAQDKRVKIEEKQVRLYIWFAAWELGVGNLDAIDLLGDVVPVPAGFGSSFAFIGLFEFFDPGQ

SEQ ID NO: 10270 - DNA, 675 bp, Muscodor strobelii
  misc_feature: SGI cDNA ID NO. 563252
  misc_feature: Encodes the peptide sequence at SEQ ID NO 10271
atgtctacaacacagaagcctatgatcgttatgatctcgctcaactacattgacttcttcgatgacacatatcgtggactaatctctgagctttgctctaaggctagcatcaagcgatgcaaaaaggctgcctcagcactgcgactgcttcaggacgagtcatcgcgccctacgaccgtcctcatcaccgatggagcgctgaccgaagccaagcacgctcacgtctgggacgctgtgctgcagtatgtccgcacaggcggaactgccgtcatcatgggtcacttcggcggcaacaccatgcacgtacccattggccccttcttcgctaaagctggcttgccctgggaattcgcctactacttacgcaccacactggtgctgaacaagtctgcagtgtcacgagacttccccgctgccgttgactatctgcctcttcagtacagccagaaggccactgccgtgaagaatgtcgctcctgaggactcatggtactgcacagacgagaactcgcgcatcgagtcatttgtctgggcgcccgaaagtactcatgtattaggccacacgcctgttgccatggctcgcgtaggagaaggcaagattggatactcgggcgatgtcaacaacgagataggatctcagctcgtcgttcttgcaatgtgtggctttggtggatga

SEQ ID NO: 10271 - protein, 224 aa, Muscodor strobelii
  misc_feature: SGI Peptide ID NO. 563252
  misc_feature (30)..(222): NCBI GI: 238488175 Blast Desc: conserved [Aspergillus flavus NRRL3357] gi|220697713|gb|EED54053.1| conserved [Aspergillus flavus NRRL3357]
  misc_feature (30)..(209): NCBI GI: 169762402 Blast Desc: [Aspergillus oryzae RIB40] gi|83770129|dbj|BAE60262.1| protein product [Aspergillus oryzae]
  misc_feature (3)..(216): NCBI GI: 238843578 Blast Desc: conserved [Microsporum canis CBS 113480]
  misc_feature (3)..(222): NCBI GI: 116179140 Blast Desc: CHGG_00198 [Chaetomium globosum CBS 148.51] gi|88184495|gb|EAQ91963.1| CHGG_00198 [Chaetomium globosum CBS 148.51]
  misc_feature (1)..(222): NCBI GI: 70988733 Blast Desc: conserved [Aspergillus fumigatus Af293] gi|66846853|gb|EAL87184.1| conserved [Aspergillus fumigatus Af293] gi|159128636|gb|EDP53750.1| conserved [Aspergillus A1163]
  misc_feature (9)..(222): NCBI GI: 256725157 Blast Desc: NECHADRAFT_55208 [Nectria haematococca mpVI 77-13-4]
  misc_feature (27)..(224): NCBI GI: 261361602 Blast Desc: conserved [Verticillium albo-atrum VaMs.102]
  misc_feature (1)..(222): NCBI GI: 242814093 Blast Desc: transcription factor Rba50, [Talaromyces stipitatus ATCC 10500] gi|218714640|gb|EED14063.1| transcription factor Rba50, [Talaromyces stipitatus ATCC 10500]
  misc_feature (6)..(222): NCBI GI: 85100673 Blast Desc: NCU06693 [Neurospora crassa OR74A] gi|28922544|gb|EAA31772.1| [Neurospora crassa OR74A] gi|28949931|emb|CAD70917.1| related to triacylglycerol lipase
  misc_feature (1)..(222): NCBI GI: 67523139 Blast Desc: AN2026.2 [Aspergillus nidulans FGSC A4] gi|40745702|gb|EAA64858.1| AN2026.2 [Aspergillus nidulans FGSC A4] gi|259487393|tpe|CBF86035.1| TPA: conserved [Aspergillus FGSC
MSTTQKPMIVMISLNYIDFFDDTYRGLISELCSKASIKRCKKAASALRLLQDESSRPTTVLITDGALTEAKHAHVWDAVLQYVRTGGTAVIMGHFGGNTMHVPIGPFFAKAGLPWEFAYYLRTTLVLNKSAVSRDFPAAVDYLPLQYSQKATAVKNVAPEDSWYCTDENSRIESFVWAPESTHVLGHTPVAMARVGEGKIGYSGDVNNEIGSQLVVLAMCGFGG

SEQ ID NO: 10272 - DNA, 1044 bp, Muscodor strobelii
  misc_feature: SGI cDNA ID NO. 563253
  misc_feature: Encodes the peptide sequence at SEQ ID NO 10273
atgatcgccactattcgctgtcttacgtactcgctcatggtcaccgcggcattcgctgtgtaccaccctgtagccgttacgaaagagctcatcacatcagacgggcgtttatacgtttatgactacgtgccagcagcaaacaagagtacaccgacgttcctcctgatccacggatacccatcctcgaagtacgattggcggcacaccatcgcagacctcagcactgcaggcttcggcgtcattgcgccagattgtctgggctacggagatagcgataagccaactgaaatcgaagcttacaacctcaaggccatcggatcaaatctcgtggaaatacttgaccacgagggactaaccaccgtcattggagtcggccacgattgggggacgaacgtcctaagccgcactgtcgtatggcatccttcgcgtttttcgaaacttggctttatgtctctcggtttcagcgcgcctggcatctttgtcgatgtcgacgcattaaatgcgtatagcttggcgaatctgggatacacgcagctcgggtatttctacttcttcaattcgtacaatgcagcagagctggcaggccggaatctcgagtcgtactttcaccttgccttcccaactaacacatctgcctgggccgagaatctagccggcttaggcaccgcgcgcgcatggttggaggctaataccactactgacatcccatcatggctcactgaagatgacaagacggcatggctacaaagctatagccagaaggatgctgttgaggcatcgatgaactactacaaggcgttgctgcggggcgtgcaagcggaagacgagttgcttctcactgatgaggatcggacgctcaaagttccagtgcttacaatcggcggagagagagacttagtgaccagagctgatcagatccggccaggtaccgaaccatgggcggcggccgggtacactgagcggacggtggatgcgggccattggctgatgttggagcagagagaggctgtgagctctattctaattgagttcgcttgcgcttga

SEQ ID NO: 10273 - protein, 347 aa, Muscodor strobelii
  misc_feature: SGI Peptide ID NO. 563253
  misc_feature (78)..(343): Pfam Id: PF00561 Pfam Desc: alpha/beta hydrolase fold
  misc_feature (27)..(344): NCBI GI: 46139363 Blast Desc: FG11196.1 [Gibberella zeae PH-1]
  misc_feature (26)..(345): NCBI GI: 145231136 Blast Desc: An01g14420 [Aspergillus niger] gi|134055961|emb|CAK37437.1| protein product [Aspergillus niger]
  misc_feature (26)..(345): NCBI GI: 242805743 Blast Desc: epoxide hydrolase, [Talaromyces stipitatus ATCC 10500] gi|218715220|gb|EED14642.1| epoxide hydrolase, [Talaromyces stipitatus ATCC 10500]
  misc_feature (25)..(345): NCBI GI: 238844169 Blast Desc: conserved [Microsporum canis CBS 113480]
  misc_feature (26)..(345): NCBI GI: 212538743 Blast Desc: epoxide hydrolase, [Penicillium marneffei ATCC 18224] gi|210069269|gb|EEA23360.1| epoxide hydrolase, [Penicillium marneffei ATCC 18224]
  misc_feature (8)..(344): NCBI GI: 67538026 Blast Desc: AN5183.2 [Aspergillus nidulans FGSC A4] gi|40743174|gb|EAA62364.1| AN5183.2 [Aspergillus nidulans FGSC A4] gi|259484639|tpe|CBF81033.1| TPA: epoxide hydrolase, nidulans
  misc_feature (38)..(344): NCBI GI: 119481839 Blast Desc: epoxide hydrolase, [Neosartorya fischeri NRRL 181] gi|119409102|gb|EAW19051.1| epoxide hydrolase, [Neosartorya fischeri NRRL 181]
  misc_feature (25)..(346): NCBI GI: 121716094 Blast Desc: epoxide hydrolase, [Aspergillus clavatus NRRL 1] gi|119403813|gb|EAW14230.1| epoxide hydrolase, [Aspergillus clavatus NRRL 1]
  misc_feature (23)..(344): NCBI GI: 156051009 Blast Desc: SS1G_08093 [Sclerotinia sclerotiorum 1980] gi|154692492|gb|EDN92230.1| SS1G_08093 [Sclerotinia sclerotiorum 1980]
  misc_feature (38)..(344): NCBI GI: 169763034 Blast Desc: [Aspergillus oryzae RIB40] gi|83770445|dbj|BAE60578.1| protein product [Aspergillus oryzae]
  misc_feature (49)..(343): SWISSPROT Homolog: EC 3.3.2.10 Soluble epoxide hydrolase
MIATIRCLTYSLMVTAAFAVYHPVAVTKELITSDGRLYVYDYVPAANKSTPTFLLIHGYPSSKYDWRHTIADLSTAGFGVIAPDCLGYGDSDKPTEIEAYNLKAIGSNLVEILDHEGLTTVIGVGHDWGTNVLSRTVVWHPSRFSKLGFMSLGFSAPGIFVDVDALNAYSLANLGYTQLGYFYFFNSYNAAELAGRNLESYFHLAFPTNTSAWAENLAGLGTARAWLEANTTTDIPSWLTEDDKTAWLQSYSQKDAVEASMNYYKALLRGVQAEDELLLTDEDRTLKVPVLTIGGERDLVTRADQIRPGTEPWAAAGYTERTVDAGHWLMLEQREAVSSILIEFACA

SEQ ID NO: 10274 - DNA, 1104 bp, Muscodor strobelii
  misc_feature: SGI cDNA ID NO. 563254
  misc_feature: Encodes the peptide sequence at SEQ ID NO 10275
atgtcaaaagaccatatcgctctccgcgacaagtttccatccgttcgctgggtatttccctgcgccaagcagcaccacggagctaaacagcccgacaataacggctacgagggccggttggctgaggacattgctaaggccaatcttcatcctggtggcgacacactgccgtatatcacacagatcattcttcaagaagccgagcgcgtccaaggactcgacaagatcattctcggcggccaaggagagactgctgtcgctgtccatgaagccatgacgtgcttcatccagcctgaacctgacgtttccggaaagcccgaggagcttaagctctatattcagcagaccttccacaatctagactggactacgatccgagacatcaaactcggcggattcattggcatgcacgccgaagatggcccggccactcgtgacgtgaaggaacatggctttgcgagaaaatttgccaatttctctaagatcaacgagatgatcgccaaaaacacaccccattgcttcattcgcggtggctacaaggtacagaccgtcacctgggacggccgccgcatcgacgaggtcgagggtttcctcaaggagattggtgtcagcccagcccttacagcgaaggaccctaccgctatcaaatcggagcctatcaaccgtctcacacccaaatacagacctgacccaaaagagaagaagcccgcgaaggatacgcgctctagcgtcgacaagcatttagaagatgtcaagaagcagagggccgccgatgaggagactcgcaagcgggtcttgatacgcatcgaatgtgacaagatcgatcgcatgcggcgcagtcagcgcgagagcgaagcccgaaagcatgccagtatcaaccaagactccaaggtcaaagctgatcgagctgcggttaaggaacgcagagatgtccgccaagaccgtgataagtggctcaacgagacgttcgagaatgatgatgtggagctcgccgtagacgataccgctggaaccgcctatcccgcctattttgaagacttggattctgatcatgactatgatatggacgacctttcgcggaggattacccgagaccatgaatga

SEQ ID NO: 10275 - protein, 367 aa, Muscodor strobelii
  misc_feature: SGI Peptide ID NO. 563254
MSKDHIALRDKFPSVRWVFPCAKQHHGAKQPDNNGYEGRLAEDIAKANLHPGGDTLPYITQIILQEAERVQGLDKIILGGQGETAVAVHEAMTCFIQPEPDVSGKPEELKLYIQQTFHNLDWTTIRDIKLGGFIGMHAEDGPATRDVKEHGFARKFANFSKINEMIAKNTPHCFIRGGYKVQTVTWDGRRIDEVEGFLKEIGVSPALTAKDPTAIKSEPINRLTPKYRPDPKEKKPAKDTRSSVDKHLEDVKKQRAADEETRKRVLIRIECDKIDRMRRSQRESEARKHASINQDSKVKADRAAVKERRDVRQDRDKWLNETFENDDVELAVDDTAGTAYPAYFEDLDSDHDYDMDDLSRRITRDHE

SEQ ID NO: 10276 - DNA, 1027 bp, Muscodor strobelii
  misc_feature: SGI EST ID NO. CUFF.24215.0
  misc_feature: Variant of the nucleotide sequence at SEQ ID NO 10274
ctaaggccaatcttcatcctggtggcgacacactgccgtatatcacacagatcattcttcaagaagccgagcgcgtccaaggactcgacaagatcattctcggcggccaaggagagactgctgtcgctgtccatgaagccatgacgtgcttcatccagcctgaacctgacgtttccggaaagcccgaggagcttaagctctatattcagcagaccttccacaatctagactggactacgatccgagacatcaaactcggcggattcattggcatgcacgccgaagatggcccggccactcgtgacgtgaaggaacatggctttgcgagaaaatttgccaatttctctaagatcaacgagatgatcgccaaaaacacaccccattgcttcattcgcggtggctacaaggtacagaccgtcacctgggacggccgccgcatcgacgaggtcgagggtttcctcaaggagattggtgtcagcccagcccttacagcgaaggaccctaccgctatcaaatcggagcctatcaaccgtctcacacccaaatacagacctgacccaaaagagaagaagcccgcgaaggatacgcgctctagcgtcgacaagcatttagaagatgtcaagaagcagagggccgccgatgaggagactcgcaagcgggtcttgatacgcatcgaatgtgacaagatcgatcgcatgcggcgcagtcagcgcgagagcgaagcccgaaagcatgccagtatcaaccaagactccaaggtcaaagctgatcgagctgcggttaaggaacgcagagatgtccgccaagaccgtgataagtggctcaacgagacgttcgagaatgatgatgtggagctcgccgtagacgataccgctggaaccgcctatcccgcctattttgaagacttggattctgatcatgactatgatatggacgacctttcgcggaggattacccgagaccatgaatgagcgcgattcggaacacagcatcgggataattgacgctgagaacaaggggctgcatg

SEQ ID NO: 10277 - DNA, 207 bp, Muscodor strobelii
  misc_feature: SGI cDNA ID NO. 563255
  misc_feature: Elevated expression when VOC is produced
  misc_feature: Encodes the peptide sequence at SEQ ID NO 10278
atgctcttcactcgcgcctttcttaccctcggccttgtagctgttgctcaagcagctggttgcacctttggcctgtaccgctgcggtgacggcgacaatgtgaatacaatccaggtctgcgacgtggatggtcaatggaagcaagtcggcgaaccttgtaaagggcactgcgtggtgaaggacaacggtaatccttactgcgaatga

SEQ ID NO: 10278 - protein, 68 aa, Muscodor strobelii
  misc_feature: SGI Peptide ID NO. 563255
  misc_feature (1)..(67): NCBI GI: 85074759 Blast Desc: NCU00607 [Neurospora crassa OR74A] gi|28927560|gb|EAA36511.1| [Neurospora crassa OR74A] gi|38567301|emb|CAE76589.1| [Neurospora crassa]
  misc_feature: Useful for introducing or modulating the production of volatile compounds
MLFTRAFLTLGLVAVAQAAGCTFGLYRCGDGDNVNTIQVCDVDGQWKQVGEPCKGHCVVKDNGNPYCE

SEQ ID NO: 10279 - DNA, 847 bp, Muscodor strobelii
  misc_feature: SGI EST ID NO. CUFF.24225.0
  misc_feature: Variant of the nucleotide sequence at SEQ ID NO 10277
tgagaagtcattcaactaggtacgattggacttttggcctttttggctgctcaatgcgagggcttaaactcgacttcgcccttgacccaagagcataccgtaacgactctttcgctgctgcgtcttgcagtcatgaagctatgaagggaagcgtgacagactgaaaagggcttgaggcaggagtataaaatgagccgtgagtcccataacgtatctcttcatactttctgtctacactctcaatctccccttcagcacaacagaaaccaaaacctgaaccaatttccaccctttcactcaagaaaaatgctcttcactcgcgcctttcttaccctcggccttgtagctgttgctcaagcagctggttgcacctttggcctgtaccgctgcggtgacggcgacaatgtgaatacaatccaggtctgcgacgtggatggtcaatggaagcaagtcggcgaaccttgtaaagggcactgcgtggtgaaggacaacggtaatccttactgcgaatgattagttgtaatggtactacggccactgggccactgctactctgtcgacttgactggagagtcacgacgcaacaacgcctcgattgcccgtttgctctcgcggcttgaccccaagattgtccaagggcttagtatgtcgcggtgaaggtccgatgttatagatggcagagatcgagggtaggaggcgaggaagagatcgtgatagatatggggcaatgttaggtgatgcaagacttcaagtgttggtagatggctcgatttactgagtgaatatactatttgcttttccaattgattatttcgttcgtgaaaggtatgttgaaagaccatcggga

SEQ ID NO: 10280 - DNA, 2223 bp, Muscodor strobelii
  misc_feature: SGI cDNA ID NO. 563256
  misc_feature: Encodes the peptide sequence at SEQ ID NO 10281
atggcacccatcaaggcgccgcgcatccgtcgcacggcacagactactcaatacacatacaacctccctcggcgcatccacaccgtccacacatatcccgtcctctctccccagggagccaccatcctcctccacggccacgagaatggtgtcacgatagtatggcgaggtggtcgccgctttcagtcagagtctgatgcatctgctgctaagggcgcgaatggcaaacagaatggcaagtccagccaggacgccgccatgatcatcgactcggacgacgaagacaccgctgccaccgctcccttcgttgacaagccccagttcgaggcagacctcgacgacgaatccacctatcccgagatcgtccagaccctcgatctcgagttcgatacagccgtcttccacattgccacccctcccgtcacgccttgtcctgccgacgatgcgtacttagatggttcagacattcttaaagagaagatcgtctttaccgcttcgtgcgctacccgcgatgccttcctcgtcacccttcccctgacgcccccttcgccacagagcaaggataggagagacctgcaggagtcgctcctgactggcaaggccggcaatggcaaatggggcgagactctgaccttgctcacgggtcagcaaacatcgtgtgacgggctggccatgaccatcatcaaacctagatccacaccagatcgcagcaagtcatctgagcgccccggctcatcatcgcagccccagcatagtgtagtggtcgctgcccattcccgcgaagcctcgggcactctacgactctggcatgtccctctggacaccgccaacaactctggccaacccatcgagccattccagaccgaatatctacccaaacccctctcatccatcgccttcaatcccacttattccacccaactactctgcaatgcctccccacaagctgtgcgtatctacgactacgccttgccatctataaccgccgacgacagctctgaaggttctttcccctcacaaggctcctggatcatctccttctaccctcctttcgcccgtcagtctgcctccagaatacccgtgttggctgcctcctgggtagttcgtggtagggccatttttgtgctcctcgctgacggccaatggggaatctgggacatcgacggcgtctctcctcagggatctgcgcatttcggacggccgggatcgggaattcgtggtgatgccattaccgagttcaacatatctggacacgtcgatggagctggctcgttcaagaatatctcgtcgcaacgtgcttcaggaggtggagatgattttgtgccaatgacacctcactcgagacgcgatggattgacgggtgtgtctggtccggaacgtctcgcgactgtacgcggaggcgtcgtcgtaacacctcttccagcaagttctactacgactgcagacgagagtgtaacgctatggattggtgattcagatcatgtttacgcgatacccggtctcctcaagttctgggatgcgcagatacggaaaggcgctggaggtggtgtcaacctattcagcggagcacagcctactcgcatgatccgattgaatgatctgaaagttggtctgatgggcgaacaatgcactggagttgccgctatcgttcgatttactcagaatggaggcatgagcgctccaggaagcgagggcctacctgtggacgtcgtggtttgcggcgaaagccgaattgtcattgttcgagagagggaagatgcgccgggtgagcgcatcggtggggtgatcagtcgcaggaagagaccaagcgctatgcgaaacaccagcgccattaatgtcttcccgcgcccagaacagcccggaagcaagatgtacaatctctctgttaatccacagagaaaactatcccgaccttcattgctgggcgctggagacgacgagccaatggagtccccaagcaaagagaactcgccacttcaaatcccgtcgaggccccggagtgggttcggatttgctgacagcatgatggcagcagcagatagcgagcaacgagattatggcgatgtcggagatatccagcgggaggttgagctggagatgttggatattatggagatcgaccgtgagcttgacgccatgcatgatggtcgaggacgtggccgcaagaaggtcatgttcaactcgatcggtgcggagactcgagcgactgatatgaaggcttaa

SEQ ID NO: 10281 - protein, 740 aa, Muscodor strobelii
  misc_feature: SGI Peptide ID NO. 563256
  misc_feature (1)..(719): NCBI GI: 256729141 Blast Desc: NECHADRAFT_40286 [Nectria haematococca mpVI 77-13-4]
  misc_feature (1)..(719): NCBI GI: 46138547 Blast Desc: FG10788.1 [Gibberella zeae PH-1]
  misc_feature (1)..(727): NCBI GI: 116204105 Blast Desc: CHGG_09936 [Chaetomium globosum CBS 148.51] gi|88176064|gb|EAQ83532.1| CHGG_09936 [Chaetomium globosum CBS 148.51]
  misc_feature (20)..(726): NCBI GI: 171679014 Blast Desc: protein product [Podospora anserina] gi|170937578|emb|CAP62235.1| protein product [Podospora anserina]
  misc_feature (20)..(727): NCBI GI: 85090736 Blast Desc: NCU09056 [Neurospora crassa OR74A] gi|28919932|gb|EAA29324.1| [Neurospora crassa OR74A]
  misc_feature (1)..(715): NCBI GI: 145607535 Blast Desc: MGG_04324 [Magnaporthe grisea 70-15] gi|145015062|gb|EDJ99630.1| MGG_04324 [Magnaporthe grisea 70-15]
  misc_feature (7)..(580): NCBI GI: 156039567 Blast Desc: SS1G_11920 [Sclerotinia sclerotiorum 1980] gi|154697657|gb|EDN97395.1| SS1G_11920 [Sclerotinia sclerotiorum 1980]
  misc_feature (20)..(616): NCBI GI: 154301296 Blast Desc: BC1G_10318 [Botryotinia fuckeliana B05.10] gi|150856219|gb|EDN31411.1| BC1G_10318 [Botryotinia fuckeliana B05.10]
  misc_feature (308)..(592): NCBI GI: 261354565 Blast Desc: conserved [Verticillium albo-atrum VaMs.102]
  misc_feature (19)..(590): NCBI GI: 121704702 Blast Desc: conserved [Aspergillus clavatus NRRL 1] gi|119398760|gb|EAW09188.1| conserved [Aspergillus clavatus NRRL 1]
MAPIKAPRIRRTAQTTQYTYNLPRRIHTVHTYPVLSPQGATILLHGHENGVTIVWRGGRRFQSESDASAAKGANGKQNGKSSQDAAMIIDSDDEDTAATAPFVDKPQFEADLDDESTYPEIVQTLDLEFDTAVFHIATPPVTPCPADDAYLDGSDILKEKIVFTASCATRDAFLVTLPLTPPSPQSKDRRDLQESLLTGKAGNGKWGETLTLLTGQQTSCDGLAMTIIKPRSTPDRSKSSERPGSSSQPQHSVVVAAHSREASGTLRLWHVPLDTANNSGQPIEPFQTEYLPKPLSSIAFNPTYSTQLLCNASPQAVRIYDYALPSITADDSSEGSFPSQGSWIISFYPPFARQSASRIPVLAASWVVRGRAIFVLLADGQWGIWDIDGVSPQGSAHFGRPGSGIRGDAITEFNISGHVDGAGSFKNISSQRASGGGDDFVPMTPHSRRDGLTGVSGPERLATVRGGVVVTPLPASSTTTADESVTLWIGDSDHVYAIPGLLKFWDAQIRKGAGGGVNLFSGAQPTRMIRLNDLKVGLMGEQCTGVAAIVRFTQNGGMSAPGSEGLPVDVVVCGESRIVIVREREDAPGERIGGVISRRKRPSAMRNTSAINVFPRPEQPGSKMYNLSVNPQRKLSRPSLLGAGDDEPMESPSKENSPLQIPSRPRSGFGFADSMMAAADSEQRDYGDVGDIQREVELEMLDIMEIDRELDAMHDGRGRGRKKVMFNSIGAETRATDMKA

SEQ ID NO: 10282 - DNA, 4690 bp, Muscodor strobelii
  misc_feature: SGI EST ID NO. CUFF.24238.0
  misc_feature: Variant of the nucleotide sequence at SEQ ID NO 10280
acagtgcaagaaattgatctgtagaggattgtaacaacatcaacagcataacaacagcgcacaacgtcctgctccctgccccacgacctctcccttcttcaccctctttgactcgaccgcattcaaatagttgccatgacaaggctttgataggtgagaaggtccaagggttttgacaagctctgtcgcctctgcctcgccttcgcaagctttgctgccttccctcgttgttgaagcttgcatccggccatggcacccatcaaggcgccgcgcatccgtcgcacggcacagactactcaatacacatacaacctccctcggcgcatccacaccgtccacacatatcccgtcctctctccccagggagccaccatcctcctccacggccacgagaatggtgtcacgatagtatggcgaggtggtcgccgctttcagtcagagtctgatgcatctgctgctaagggcgcgaatggcaaacagaatggcaagtccagccaggacgccgccatgatcatcgactcggacgacgaagacaccgctgccaccgctcccttcgttgacaagccccagttcgaggcagacctcgacgacgaatccacctatcccgagatcgtccagaccctcgatctcgagttcgatacagccgtcttccacattgccacccctcccgtcacgccttgtcctgccgacgatgcgtacttagatggttcagacattcttaaagagaagatcgtctttaccgcttcgtgcgctacccgcgatgccttcctcgtcacccttcccctgacgcccccttcgccacagagcaaggataggagagacctgcaggagtcgctcctgactggcaaggccggcaatggcaaatggggcgagactctgaccttgctcacgggtcagcaaacatcgtgtgacgggctggccatgaccatcatcaaacctagatccacaccagatcgcagcaagtcatctgagcgccccggctcatcatcgcagccccagcatagtgtagtggtcgctgcccattcccgcgaagcctcgggcactctacgactctggcatgtccctctggacaccgccaacaactctggccaacccatcgagccattccagaccgaatatctacccaaacccctctcatccatcgccttcaatcccacttattccacccaactactctgcaatgcctccccacaagctgtgcgtatctacgactacgccttgccatctataaccgccgacgacagctctgaaggttctttcccctcacaaggctcctggatcatctccttctaccctcctttcgcccgtcagtctgcctccagaatacccgtgttggctgcctcctgggtagttcgtggtagggccatttttgtgctcctcgctgacggccaatggggaatctgggacatcgacggcgtctctcctcagggatctgcgcatttcggacggccgggatcgggaattcgtggtgatgccattaccgagttcaacatatctggacacgtcgatggagctggctcgttcaagaatatctcgtcgcaacgtgcttcaggaggtggagatgattttgtgccaatgacacctcactcgagacgcgatggattgacgggtgtgtctggtccggaacgtctcgcgactgtacgcggaggcgtcgtcgtaacacctcttccagcaagttctactacgactgcagacgagagtgtaacgctatggattggtgattcagatcatgtttacgcgatacccggtctcctcaagttctgggatgcgcagatacggaaaggcgctggaggtggtgtcaacctattcagcggagcacagcctactcgcatgatccgattgaatgatctgaaagttggtctgatgggcgaacaatgcactggagttgccgctatcgttcgatttactcagaatggaggcatgagcgctccaggaagcgagggcctacctgtggacgtcgtggtttgcggcgaaagccgaattgtcattgttcgagagagggaagatgcgccgggtgagcgcatcggtggggtgatcagtcgcaggaagagaccaagcgctatgcgaaacaccagcgccattaatgtcttcccgcgcccagaacagcccggaagcaagatgtacaatctctctgttaatccacagagaaaactatcccgaccttcattgctgggcgctggagacgacgagccaatggagtccccaagcaaagagaactcgccacttcaaatcccgtcgaggccccggagtgggttcggatttgctgacagcatgatggcagcagcagatagcgagcaacgagattatggcgatgtcggagatatccagcgggaggttgagctggagatgttggatattatggagatcgaccgtgagcttgacgccatgcatgatggtcgaggacgtggccgcaagaaggtcatgttcaactcgtgagaggtcgcctgagcagctatggtgctccctttcggcaccgcaacaggacaaaagaataatgagaatacggtcctgagatatacgatacccaaactaacactgaagagactaggatcggtgcggagactcgagcgactgatatgaaggcttaatcaagttacattgatgttatccctgcgcctccacgagtgacgacgagatgttgggttttcttttcgcaatattcagacaaatctacatcgacgatatctctttcccacttccagtcttcatgaccaaccctgccctaccctgcgctgcccaacttttccatcctcaaaactacttaccgacccccaattttattacacatgcacaacacatacacctatgatttccgcgcggcaaggtggagcacaaggcgagatccttccttgcagctctgtattccatgcggtatattgaacgtacaggcgtcttttcgtgtagatcagggcgtttgtcgccgatgacctctggtgggtagggtgggggcgggtcggttggctttatgcgaattgaccgtttgccctcccgacgtcgatgctcttccgctctcttgttctttcgggaatgaggtgcgttggcgtggatacgatgttgggagacggggttgtcggtacatttttggctccaatcttttttttttttggtgtttgccctgactgttctgctcatcgtgctcttctcgtgattgacgctcccgctttttttctttctcgatttgccactcttccatagcaaccgatgagttgtgtatggttcgtatggcgtgtgcgctgtggagctatcttatgactcttgtgacaactggaatgtgatgcctgagtgacatgttgtcaatcgtatgcggttgtagttgggggtaataccttcgtgacacaggctgtctcgtattgagtcttgagtaatcggccatcccgaccacattccgcacctaaccggtgccgattggatttaaatgtgtataaaagttgacctccgttcgatacggatgcgtctgaaagtcgcttaccttctgcagtgaactggattatttttgcgtcgcatcttttgctgtttcgttgtctttagtctccagttcctcatgtctagtgatctaagaatctacctccttggcatcagcgtcgagtatctcgtcctgctcgcccttggtatttttctggttacggtcttgtcttttgggaattatctacgtccccgagctgaacacgagcactcttcttaggataatacaacttgcaatgacaaattgaggcaatacaaaatcgcgaaaccaattttcaagcgcgaagctctgcttaaactacaccgtgacgaccctgggagaaagagggtcattgatgcttatgctgcttccatcttatgatccaatttcctccccccctcaactatatcattactcacccacctccacacatttcgcaaccgatcgcaagatctggctcaacagtcccgacgcagtctcccttcatcgagacataaaagacactatatctcctggatttctgaaggatgtggagaatttggtgtgtttccacctgcgaagctttaaaagagaggatctggcttgtcctcgtcatgccgccgcccttttgatggcaggcactctatctactctgtccactacgacagatatcccacagaagggaaagagaagagacggacgagaggaggatgagaggcgttttgaagggactgaggatgaggaggagagggagttgagaaaagggataatggaggtgcatagggtgttggagagggggtatgaaagggttgtttgggagagttttgagattggtgatgaagaggaagcggatggaaaagggggcaggatgataagggatggggtgattaggaaggaatcagctttgaggggttgtgaggtttggtcgacgaagagaaaggggagtaggtgtgggaaggctagaggggaggaaaggggtgaggaaagatctgaggggtcggttttcggtagggcacgactttagtgttgatagtctaaggtagataggtcactggctggatttgttcgctgttttccattgtgagtgttctcgttcgtatagctgtggtgtattggaagaccattgggagtatctggtgtctatgtctgatattttccctcatgtaaccttctggcagcgaggcacaaaattttaaggaaccgtcgacaacgcgaggatagtggcgcgttgagtcgctcgtttttgagttacatgtgcgagactgaggc

SEQ ID NO: 10283 - DNA, 849 bp, Muscodor strobelii
  misc_feature: SGI cDNA ID NO. 563257
  misc_feature: Encodes the peptide sequence at SEQ ID NO 10284
atgtttttccgccagctcgctaccgccacggcggtcctggcgctgacctcgctcgcatccgccgccactgcgacatccaaaggcgtcgagctgcccagcgcggcccccgaactcaacgtccccaccgtccatggatgcttctcttccataggcctactcaagctcaacacgacctggctctacaacacccagagctggtgcacacagcgatgcaccaacaacacgatgcccgtcgctgcttcgtatgctcaatcctgctactgcggtgaaaaataccccaacgagaaatacctcgtcgacgattccaagtgcaacgagccttgccctggtttcgatgaacaggcatgcggtggtctcaatacctttaccgtctacaacactggtctcgtggtagccgtagacgaattcgcagttggtgccggcgagagtagcacctcgtctgcttcgtcaaagtcaacttctgccgctgattccgcgaccagtgccgctgactctcaagtgaccgtgactgctcctgccgaaagcaacaccagcaacaagaagtcatccagctcaggcaccgttggtatagctgttggcgtcgttgtcggtgtcctcgtcgctgctggcattgctgctggagcctttttcttcgtccgcaggaagagaaactcagaactcgaggaggagcatcgccggaatgctgccgtcaacgccttcatcagcggcgggaagcctcctagtagcagtggcggcatgtctatggccgattcccgcatggatcctgttatgaaccgacgcctcagtgacggcagtattgcagacaaccaagattactctcgccggattctcagggtcaccaatgcctaa

SEQ ID NO: 10284 - protein, 282 aa, Muscodor strobelii
  misc_feature: SGI Peptide ID NO. 563257
  misc_feature (45)..(118): Pfam Id: PF01822 Pfam Desc: WSC domain
  misc_feature (8)..(282): NCBI GI: 256729142 Blast Desc: NECHADRAFT_100409 [Nectria haematococca mpVI 77-13-4]
  misc_feature (6)..(282): NCBI GI: 46138545 Blast Desc: FG10787.1 [Gibberella zeae PH-1]
  misc_feature (7)..(282): NCBI GI: 39944628 Blast Desc: MGG_04325 [Magnaporthe grisea 70-15] gi|145015063|gb|EDJ99631.1| MGG_04325 [Magnaporthe grisea 70-15]
  misc_feature (32)..(279): NCBI GI: 116204101 Blast Desc: CHGG_09934 [Chaetomium globosum CBS 148.51] gi|88176062|gb|EAQ83530.1| CHGG_09934 [Chaetomium globosum CBS 148.51]
  misc_feature (2)..(282): NCBI GI: 85092161 Blast Desc: NCU06910 [Neurospora crassa OR74A] gi|28920660|gb|EAA30021.1| [Neurospora crassa OR74A]
  misc_feature (29)..(282): NCBI GI: 171679008 Blast Desc: protein product [Podospora anserina] gi|170937575|emb|CAP62232.1| protein product [Podospora anserina]
  misc_feature (14)..(282): NCBI GI: 154308623 Blast Desc: BC1G_07734 [Botryotinia fuckeliana B05.10] gi|150852685|gb|EDN27877.1| BC1G_07734 [Botryotinia fuckeliana B05.10]
  misc_feature (45)..(281): NCBI GI: 226278483 Blast Desc: conserved [Paracoccidioides brasiliensis Pb01]
  misc_feature (45)..(281): NCBI GI: 226293444 Blast Desc: conserved [Paracoccidioides brasiliensis Pb18]
  misc_feature (45)..(281): NCBI GI: 225684052 Blast Desc: PABG_04547 [Paracoccidioides brasiliensis Pb03]
MFFRQLATATAVLALTSLASAATATSKGVELPSAAPELNVPTVHGCFSSIGLLKLNTTWLYNTQSWCTQRCTNNTMPVAASYAQSCYCGEKYPNEKYLVDDSKCNEPCPGFDEQACGGLNTFTVYNTGLVVAVDEFAVGAGESSTSSASSKSTSAADSATSAADSQVTVTAPAESNTSNKKSSSSGTVGIAVGVVVGVLVAAGIAAGAFFFVRRKRNSELEEEHRRNAAVNAFISGGKPPSSSGGMSMADSRMDPVMNRRLSDGSIADNQDYSRRILRVTNA

SEQ ID NO: 10285 - DNA, 2368 bp, Muscodor strobelii
  misc_feature: SGI EST ID NO. CUFF.24293.0
  misc_feature: Variant of the nucleotide sequence at SEQ ID NO 10283
ccaggccgcacccccagtcgcaccactccctctcctctgcaccaccaccttgaccctacagtgtctcctccctctcctcttttccccttccgctcacacacgagagcagtccattctttattctgcctctcctcgtcaagcccttcattttctgtatttcgagcgtgcagcgttttccatcgacaacaacctctacgacagtacaccccgtcgtcgtcgtcgcccccgatcgtatcgacaccgacctcccgcgagtcatccaaccgaacgacgactgcctggcaaccgcgttgacgtggacacctcgtccaacccaaacgccatccacatcgtcactcgtttcgaccgtcccaactccatcctcccagtgactcgagtactctggcagtcacgacacagttggaagggagggataatcgacagatcgtacacaaagacacctcgtcggaccaagccattgattgttgagcgcgaattgttttgtgcctcgccttctttgactgcgtcacaaggacagacaatagcccaacgtcatcctcccgattcacgaactattgcatccatctatccatccatcaaagatcccgttggacgcctcttcatgacttcgacagtctgatcgtccggccgagtgactcgataatacaagtacacatcttctaaacaacaccccgtttcgattatacaccatacccgccaacaacaaccatatttgtcttcttactacgctcgctactactccgttcaccacttccatttctccgccatcatgtttttccgccagctcgctaccgccacggcggtcctggcgctgacctcgctcgcatccgccgccactgcgacatccaaaggcgtcgagctgcccagcgcggcccccgaactcaacgtccccaccgtccatggatgcttctcttccataggcctactcaagctcaacacgacctggctctacaacacccagagctggtgcacacagcgatgcaccaacaacacgatgcccgtcgctgcttcgtatgctcaatcctgctactgcggtgaaaaataccccaacgagaaatacctcgtcgacgattccaagtgcaacgagccttgccctggtttcgatgaacaggcatgcggtggtctcaatacctttaccgtctacaacactggtctcgtggtagccgtagacgaattcgcagttggtgccggcgagagtagcacctcgtctgcttcgtcaaagtcaacttctgccgctgattccgcgaccagtgccgctgactctcaagtgaccgtgactgctcctgccgaaagcaacaccagcaacaagaagtcatccagctcaggcaccgttggtatagctgttggcgtcgttgtcggtgtcctcgtcgctgctggcattgctgctggagcctttttcttcgtccgcaggaagagaaactcagaactcgaggaggagcatcgccggaatgctgccgtcaacgccttcatcagcggcgggaagcctcctagtagcagtggcggcatgtctatggccgattcccgcatggatcctgttatgaaccgacgcctcagtgacggcagtattgcagacaaccaagattactctcgccggattctcagggtcaccaatgcctaagtatccacaacctcgaagacgaaatctacgaccaacgcgtgcttgtgattttcatttctccttcggcatcaacggcgttggacggtgattactcgacttgttattggatggcccgataacgagaatcctggcgttatatgtgttgaggtgtaggaggaaaagggggttggccccatcgttggactcgaccgctgcttgaaccctacccgatttccgtggcacgccgtccgctccttttttctcagtgtcttgccacgcaaggatactgcttcacaccaatacaaccttacacccatctctcgagatctacagacggcactggacctgatgagacaaagagtagaggaatgatcggtcgagatgacatcacatacgatggatccgcggtcttgtaggtattataataaaagaggaacgtcgcgcgatttcaaggcgaaagctctcttcctgggatttaaatgtcgaggaaggaattgcggttctggttcggttcgctaagattccccctaaattagaaggttacgcatcgacgcacatgaaagggctttttgctgtatattattgagtagtcctgactgatagatggactttgatactaaaaatgtcatatgacaagacgattgtcatctacctgatgccctcccgcccaccacttggtaccgctcgaggcaatacctcagtgacttgatcgtctactcggtatcattcttaaattgctgtcaccagctgcactcgctgtgttgagctgcg

SEQ ID NO: 10286 - DNA, 972 bp, Muscodor strobelii
  misc_feature: SGI cDNA ID NO. 563258
  misc_feature: Encodes the peptide sequence at SEQ ID NO 10287
atgtttttccgccagctcgctaccgccacggcggtcctggcgctgacctcgctcgcatccgccgccactgcgacatccaaaggcgtcgagctgcccagcgcggcccccgaactcaacgtccccaccgtccatggatgcttctcttccataggcctactcaagctcaacacgacctggctctacaacacccagagctggtgcacacagcgatgcaccaacaacacgatgcccgtcgctgcttcgtatgctcaatcctgctactgcggtgaaaaataccccaacgagaaatacctcgtcgacgattccaagtgcaacgagccttgccctggtttcgatgaacaggcatgcggtggtctcaatacctttaccgtctacaacactggtctcgtggtagccgtagacgaattcgcagttggtgccggcgagagtagcacctcgtctgcttcgtcaaagtcaacttctgccgctgattccgcgaccagtgccgctgactctcaagtgaccgtgactgctcctgccgaaagcaacaccagcaacaagaagtcatccagctcaggcaccgttggtatagctgttggcgtcgttgtcggtgtcctcgtcgctgctggcattgctgctggagcctttttcttcgtccgcaggaagagaaactcagaactcgaggaggagcatcgccggaatgctgccgtcaacgccttcatcagcggcgggaagcctcctagtagcagtggcggcatgtctatggccgattcccgcatggatcctgttatgaaccgacgcctcagtgacggcagtattgcagacaaccaagattactctcgccggattctcagggtatgtcaccaatgcctaagtatccacaacctcgaagacgaaatctacgaccaacgcgtgcttgtgattttcatttctccttcggcatcaacggcgttggacggtgattactcgacttgttattggatggcccgataa

SEQ ID NO: 10287 - protein, 323 aa, Muscodor strobelii
  misc_feature: SGI Peptide ID NO. 563258
  misc_feature (45)..(118): Pfam Id: PF01822 Pfam Desc: WSC domain
  misc_feature (8)..(279): NCBI GI: 256729142 Blast Desc: NECHADRAFT_100409 [Nectria haematococca mpVI 77-13-4]
  misc_feature (6)..(279): NCBI GI: 46138545 Blast Desc: FG10787.1 [Gibberella zeae PH-1]
  misc_feature (7)..(279): NCBI GI: 39944628 Blast Desc: MGG_04325 [Magnaporthe grisea 70-15] gi|145015063|gb|EDJ99631.1| MGG_04325 [Magnaporthe grisea 70-15]
  misc_feature (32)..(279): NCBI GI: 116204101 Blast Desc: CHGG_09934 [Chaetomium globosum CBS 148.51] gi|88176062|gb|EAQ83530.1| CHGG_09934 [Chaetomium globosum CBS 148.51]
  misc_feature (2)..(279): NCBI GI: 85092161 Blast Desc: NCU06910 [Neurospora crassa OR74A] gi|28920660|gb|EAA30021.1| [Neurospora crassa OR74A]
  misc_feature (29)..(279): NCBI GI: 171679008 Blast Desc: protein product [Podospora anserina] gi|170937575|emb|CAP62232.1| protein product [Podospora anserina]
  misc_feature (14)..(281): NCBI GI: 154308623 Blast Desc: BC1G_07734 [Botryotinia fuckeliana B05.10] gi|150852685|gb|EDN27877.1| BC1G_07734 [Botryotinia fuckeliana B05.10]
  misc_feature (45)..(279): NCBI GI: 226278483 Blast Desc: conserved [Paracoccidioides brasiliensis Pb01]
  misc_feature (45)..(279): NCBI GI: 226293444 Blast Desc: conserved [Paracoccidioides brasiliensis Pb18]
  misc_feature (45)..(279): NCBI GI: 225684052 Blast Desc: PABG_04547 [Paracoccidioides brasiliensis Pb03]
MFFRQLATATAVLALTSLASAATATSKGVELPSAAPELNVPTVHGCFSSIGLLKLNTTWLYNTQSWCTQRCTNNTMPVAASYAQSCYCGEKYPNEKYLVDDSKCNEPCPGFDEQACGGLNTFTVYNTGLVVAVDEFAVGAGESSTSSASSKSTSAADSATSAADSQVTVTAPAESNTSNKKSSSSGTVGIAVGVVVGVLVAAGIAAGAFFFVRRKRNSELEEEHRRNAAVNAFISGGKPPSSSGGMSMADSRMDPVMNRRLSDGSIADNQDYSRRILRVCHQCLSIHNLEDEIYDQRVLVIFISPSASTALDGDYSTCYWMAR

SEQ ID NO: 10288 - DNA, 2368 bp, Muscodor strobelii; identical to SEQ ID NO: 10285
  misc_feature: SGI EST ID NO. CUFF.24293.0
  misc_feature: Variant of the nucleotide sequence at SEQ ID NO 10286

SEQ ID NO: 10289 - DNA, 732 bp, Muscodor strobelii
  misc_feature: SGI cDNA ID NO. 563259
  misc_feature: Reduced expression when VOC is produced
  misc_feature: Encodes the peptide sequence at SEQ ID NO 10290
atggtggctttcacacaacttgtcgttgctctcagcgccgtgacgggcatcttggcagctccggctccggaacccgtcggcagcgatcttcccgattttgagatccgaggcgaccatctcgcccgtcgccaagactacactcagaattacaagaccggtggcaatgtgaatttccagtcttcttctaacgggtactccgtcacgttttccggtgctgcggatttcgttgtgggccggggttggagtaaaggaactagccgaaatatcactttcaccggtaccacttcagcatcttccggtacagtcctcgtatcaatctacggctggtcgacgaaccccctcgtggtgagtatctgcccctccagctccaaccattgcaacatccaagctaacctctcacatgaatactacatccaagaatactccaacagcaacggagccgcacaggggacaaagatcggaaccctagaatccgacggcgcgacctacgacatatggaagcaccagcaagtgaaccagcccagtatccaaggcacgtcgacattctggcaatacatctccgtccgcaccagtgcgcgacccagcggcggagtcgtcacaaccgcgaaccatttcgcggcttgggctaagaatggtatgaatctgggaactatgaattaccagactctttctactgagggctggggcaatgctgggggtagctcgagttatactattagtgggagtggttaa

SEQ ID NO: 10290 - protein, 243 aa, Muscodor strobelii
  misc_feature: SGI Peptide ID NO. 563259
  misc_feature (43)..(238): Pfam Id: PF00457 Pfam Desc: Glycosyl hydrolases family 11
  misc_feature (148)..(238): Pfam Id: PF00457 Pfam Desc: Glycosyl hydrolases family 11
  misc_feature (43)..(115): Pfam Id: PF00457 Pfam Desc: Glycosyl hydrolases family 11
  misc_feature (1)..(241): NCBI GI: 189208412 Blast Desc: endo-1,4-beta-xylanase B precursor [Pyrenophora tritici-repentis Pt-1C-BFP] gi|187976632|gb|EDU43258.1| endo-1,4-beta-xylanase B precursor [Pyrenophora tritici-repentis
  misc_feature (1)..(231): NCBI GI: 169613044 Blast Desc: SNOG_09650 [Phaeosphaeria nodorum SN15] gi|160702637|gb|EAT82915.2| SNOG_09650 [Phaeosphaeria nodorum SN15]
  misc_feature (1)..(242): NCBI GI: 1389668 Blast Desc: Xyl3 precursor [Cochliobolus carbonum]
  misc_feature (1)..(235): NCBI GI: 549460 Blast Desc: XYN1_TRIRE RecName: Full=Endo-1,4-beta-xylanase 1; Short=Xylanase 1; AltName: Full=1,4-beta-D-xylan xylanohydrolase 1; Flags: Precursor gi|396566|emb|CAA49294.1| xylanase [Hypocrea
  misc_feature (1)..(228): NCBI GI: 212539976 Blast Desc: endo-1,4-beta-xylanase 1 precursor, [Penicillium marneffei ATCC 18224] gi|210067442|gb|EEA21534.1| endo-1,4-beta-xylanase 1 precursor, [Penicillium marneffei ATCC
  misc_feature (1)..(239): NCBI GI: 242823859 Blast Desc: endo-1,4-beta-xylanase (XlnA), [Talaromyces stipitatus ATCC 10500] gi|218713065|gb|EED12490.1| endo-1,4-beta-xylanase (XlnA), [Talaromyces stipitatus ATCC 10500]
  misc_feature (1)..(240): NCBI GI: 212546261 Blast Desc: endo-1,4-beta-xylanase 1 precursor, [Penicillium marneffei ATCC 18224] gi|210064804|gb|EEA18899.1| endo-1,4-beta-xylanase 1 precursor, [Penicillium marneffei ATCC
  misc_feature (2)..(232): NCBI GI: 242783405 Blast Desc: endo-1,4-beta-xylanase, [Talaromyces stipitatus ATCC 10500] gi|218720328|gb|EED19747.1| endo-1,4-beta-xylanase, [Talaromyces stipitatus ATCC 10500]
  misc_feature (1)..(235): NCBI GI: 156050325 Blast Desc: SS1G_07749 [Sclerotinia sclerotiorum 1980] gi|154692150|gb|EDN91888.1| SS1G_07749 [Sclerotinia sclerotiorum 1980]
  misc_feature (1)..(235): NCBI GI: 154295033 Blast Desc: BC1G_13645 [Botryotinia fuckeliana B05.10] gi|150844421|gb|EDN19614.1| BC1G_13645 [Botryotinia fuckeliana B05.10]
  misc_feature (1)..(229): SWISSPROT Homolog: EC 3.2.1.8 Endo-1,4-beta-xylanase
  misc_feature: Useful for introducing or modulating the production of volatile compounds
MVAFTQLVVALSAVTGILAAPAPEPVGSDLPDFEIRGDHLARRQDYTQNYKTGGNVNFQSSSNGYSVTFSGAADFVVGRGWSKGTSRNITFTGTTSASSGTVLVSIYGWSTNPLVVSICPSSSNHCNIQANLSHEYYIQEYSNSNGAAQGTKIGTLESDGATYDIWKHQQVNQPSIQGTSTFWQYISVRTSARPSGGVVTTANHFAAWAKNGMNLGTMNYQTLSTEGWGNAGGSSSYTISGSG

SEQ ID NO: 10291 - DNA, 1090 bp, Muscodor strobelii
  misc_feature: SGI EST ID NO. CUFF.24250.0
  misc_feature: Variant of the nucleotide sequence at SEQ ID NO 10289
gcgttatagattcgatatatatggcgcgagtcaccagctcttccatatcgctgtcatcattgctgcttggatccattcctgcggtatcttggatgctttttatttcattcgatccgggggacctgtgtgtattagtgcgtgatgtatagctactgcttttgctcgattattgcgcagtcttagacttgggtatagactcgaaactagaataggaaaagggctcagctatgaaatggtcatcgatctagtgcacgatgtggaaaacaccatactgccacgataatattaagaactcgaatgatcttctcagcaattacgtacacagtcgactcaatacggacaaatggattttcctttccacatccgatgctatcgttacgctctgcctcatatacccatctgctagccataagtggccggttcctgaaatcggtgttccccaatccaacaaatctacccatagcttaacgcatcaattataataccatcataggacccgggtaccctgcgtccgcccctaaacgcggggtgagaaccattcaatcaaataccccggatcaccgatcgaaaatcatctacctattcgggtcaattcgtatatatatgaagcgtggctatattgccatctcgagattacccggctagcacggtgcagcttacgactctctcgccgtcgcgaatctataaatctggagtcgatcctcttggctcttgcttggctacttcaatagtctactcggtaccgattcagtaactcaaatacacaatggtggctttcacacaacttgtcgttgctctcagcgccgtgacgggcatcttggcagctccggctccggaacccgtcggcagcgatcttcccgattttgagatccgaggcgaccatctcgcccgtcgccaagactacactcagaattacaagaccggtggcaatgtgaatttccagtcttcttctaacgggtactccgtcacgttttccggtgctgcggatttcgttgtgggccggggttggagtaaaggaactagccgaaatatcactttcaccggtaccacttcagcatcttccggtacagtcctcgtatcaatctacggc

SEQ ID NO: 10292 - DNA, 1386 bp, Muscodor strobelii
  misc_feature: SGI cDNA ID NO. 563260
  misc_feature: Encodes the peptide sequence at SEQ ID NO 10293
atggaagtcattccggcttactcgatggctgatgtgttggccgtcactaaactccaccctttttacaacaccgaggtgcaatatcctcctgatgctgaaactattagccaagtaagggggttgatagacccggaacgagctgataagctcttcaagatgcagccgtttctttggcggtcccgtttgtatgaagttgccgagcgactcatccacgatacaaatccacaaaatacgtatagaaatggcgcatacacaagcagcactggcggcggaggcggttcaatgtcactgctgttctgcacagacgtgcatgagaacagacgtcagagacgagacttcggattgttccttcgtactttgaaaatcgtaacagaatgtgactgggtgatctcagtgaacttctcgggttctctttgcaggtcactagatctgacgacagaaattctagaaaatgctggcgcgtcggttttgtctgcaggccaatacatgcccatgaacgacatcgtgaaccttctcgtcaaataccacgcaaatgtgatatgcggcgacgcaaaccagatagtgtctgtggtgcaatgcatctcaacgctacccgacaatgagcgatgcggcgtcagtctagacaaaattatttacacatccgaaatccttaaagcatctcaacgagcctatataatcaaaattctcgggcccatcagtgtctactcgattctgggcagtgctgaggctggaccatatgcagtcagcggacccggtctaactgaacaagaccttagtgcaccatacgatgactttgtttttgacacccgcgctacatttatcgaggtactacctccatcggcctcagagtatgacgataatctagagcccctcggccacggccaatgtggagtcatcgctcaaacctgcttcacgcgactgcgtaatcccattgtgcggtatgtgactggcgacatagggtcattacaccctctatcttcgagtgcgcggtctttgatcgcagaacacgatcggaggtacatgcgtgttcttcggctttatggacgagaccggcgtttcagtttcgactgggacggggaatacatagatttccagcacttaggtgcactcatgaacaatgaagagcacaaagtacttcagtggcagcttatattgggcaagctgaatgatcgtccggagcgaacgattgagctacgcgcattgtgcgccgactctgacaggactggaagttcaaatttggtattgctgaaacgcgtggaggaatttttaaacgtgtatgcggaaaatcgcaatcgattccgactggtgtttctagagaatattgacggctttgaaaggagctcgaccggtaggaaagtcatcaaatttattgatagatactcatag

SEQ ID NO: 10293 - protein, 461 aa, Muscodor strobelii
  misc_feature: SGI Peptide ID NO. 563260
  misc_feature (7)..(461): NCBI GI: 256722557 Blast Desc: NECHADRAFT_49599 [Nectria haematococca mpVI 77-13-4]
  misc_feature (7)..(460): NCBI GI: 255946932 Blast Desc: Pc22g01890 [Penicillium chrysogenum Wisconsin 54-1255] gi|211591250|emb|CAP97477.1| Pc22g01890 [Penicillium chrysogenum Wisconsin 54-1255]
  misc_feature (6)..(459): NCBI GI: 238497237 Blast Desc: AFLA_138420 [Aspergillus flavus NRRL3357] gi|220694734|gb|EED51078.1| AFLA_138420 [Aspergillus flavus NRRL3357]
  misc_feature (4)..(459): NCBI GI: 169774257 Blast Desc: [Aspergillus oryzae RIB40] gi|83769459|dbj|BAE59594.1| protein product [Aspergillus oryzae]
  misc_feature (7)..(461): NCBI GI: 255949206 Blast Desc: Pc22g14460 [Penicillium chrysogenum Wisconsin 54-1255] gi|211592387|emb|CAP98734.1| Pc22g14460 [Penicillium chrysogenum Wisconsin 54-1255]
  misc_feature (6)..(459): NCBI GI: 238501230 Blast Desc: conserved [Aspergillus flavus NRRL3357] gi|220692086|gb|EED48433.1| conserved [Aspergillus flavus NRRL3357]
  misc_feature (1)..(459): NCBI GI: 46117200 Blast Desc: FG04442.1 [Gibberella zeae PH-1]
  misc_feature (7)..(459): NCBI GI: 119175422 Blast Desc: CIMG_09564 [Coccidioides immitis RS]
  misc_feature (7)..(459): NCBI GI: 240107119 Blast Desc: CPC735_019100 [Coccidioides posadasii C735 delta SOWgp]
  misc_feature (7)..(459): NCBI GI: 258566650 Blast Desc: [Uncinocarpus reesii 1704] gi|237905515|gb|EEP79916.1| [Uncinocarpus reesii 1704]
MEVIPAYSMADVLAVTKLHPFYNTEVQYPPDAETISQVRGLIDPERADKLFKMQPFLWRSRLYEVAERLIHDTNPQNTYRNGAYTSSTGGGGGSMSLLFCTDVHENRRQRRDFGLFLRTLKIVTECDWVISVNFSGSLCRSLDLTTEILENAGASVLSAGQYMPMNDIVNLLVKYHANVICGDANQIVSVVQCISTLPDNERCGVSLDKIIYTSEILKASQRAYIIKILGPISVYSILGSAEAGPYAVSGPGLTEQDLSAPYDDFVFDTRATFIEVLPPSASEYDDNLEPLGHGQCGVIAQTCFTRLRNPIVRYVTGDIGSLHPLSSSARSLIAEHDRRYMRVLRLYGRDRRFSFDWDGEYIDFQHLGALMNNEEHKVLQWQLILGKLNDRPERTIELRALCADSDRTGSSNLVLLKRVEEFLNVYAENRNRFRLVFLENIDGFERSSTGRKVIKFIDRYS

SEQ ID NO: 10294 - DNA, 1710 bp, Muscodor strobelii
  misc_feature: SGI cDNA ID NO. 563261
  misc_feature: Encodes the peptide sequence at SEQ ID NO 10295
atgattaagcagcttatgagagtcgggagcgaaacacccggcgagcaaatcaatgtaccgactatcaccttatatgatattttcttggggtcattggtgaaatggacatctttctcaacacgtttggttcgactcgactctgtggagagtcaagatgcaatcctcaacagcgagaatggagcgcgtatcttatcgagagtaacgagggtctgccaagacatcaaggaatcgaaaggcatactcttagatccaggcatgagttttcgggcgactgatcaatcgtcctcgaagcagcgtatagcagatctacctccagcttacgaagcgccgccgccgttcgaagactcatttgatacagtttgggcaaatccaaacaacgctaccgggagcagtggcaacgatgaagaacaggcagaaggcttcttcagctcgttgatgagtcctttcaaagctgccgccgcagcgctgcgacctaagcctgagccattcgtagtgcctctatgccaagcagcaacaatgtgcaatgtacctcagataaaattcctcctcaaacaaggcgccaacatcaatggtcgtaacgaaaatggtcagacgccacttatatgcgccgtcctagcacaccaaatcgaagctgcccgttttctcctcgaagccggagccgaccggggcacccgcgattctggtcgcaacggcaagccgccgctattccacgctgtggacgctgaagatcgaggtatggtggatttgttgtttaaatacggtgcacaagcaaaccaaaaggacgattgggctgattcacatttcatgaatctggtcactgggaaaacgccgatcgaatggattgcattgctcttacaacacggagctgatgcaggagcgcaagacatgtcaggacgaaaagtcattatacaggcattgacagcccgaaagaactttgaagaccgcgagcaagtcgtaaatttgctcctacaacatggtgcgagccccaatgctaaagatattaccggcacgtcacttcttttcattgcggccgaacagaaacgcgatgcgcttgtccatcgactccttgaactgggagctgatgcgaattgccgagataactctgggacgactgtgcttgtgatggtcgtcaagcgcaacgactacgcgttagccaggacgcttcttgaacacggagccgatcccaacaaacccgatattgtcggtactcacatgatcttacatgttcttaacgatcgaaagacaagcacggtagatcgcgaggcaatgctagaactgctcttcgctcatggcgcaaaggctgataaaagagacatctacggtactacagtactcgaacactccgtaaccacctcctcgtctccaggcattagaatcccggagctaatgttgaaaaatggcgcggatccaaaccagcgactcaaaaaggtcacagatgagccgacactccttacacatacattgcgaaatgggcaatgggatcttgcgagactagcgctggaatgtggcgctgacgctaacttggtcgacaaaacgggacgctcacctatgctactggcaatagtaggaggcaatgagagtctcgtcaagctgcttctcagtcatggagccgatgtgaagcagacatgccaggtgtcacctctcgagctagcgacagcacaaatcagtcctaatatcgtcaggctgctgacaggaaacgcgaaggtttga

SEQ ID NO: 10295 - protein, 569 aa, Muscodor strobelii
  misc_feature: SGI Peptide ID NO. 563261
  misc_feature (195)..(227): Pfam Id: PF00023 Pfam Desc: Ankyrin repeat
  misc_feature (512)..(544): Pfam Id: PF00023 Pfam Desc: Ankyrin repeat
  misc_feature (368)..(400): Pfam Id: PF00023 Pfam Desc: Ankyrin repeat
  misc_feature (308)..(334): Pfam Id: PF00023 Pfam Desc: Ankyrin repeat
  misc_feature (3)..(563): NCBI GI: 46121317 Blast Desc: FG05037.1 [Gibberella zeae PH-1]
  misc_feature (125)..(569): NCBI GI: 261357994 Blast Desc: ankyrin repeat and SAM domain-containing protein [Verticillium albo-atrum VaMs.102]
  misc_feature (1)..(537): NCBI GI: 39941996 Blast Desc: MGG_10847 [Magnaporthe grisea 70-15] gi|145022942|gb|EDK06637.1| MGG_10847 [Magnaporthe grisea 70-15]
  misc_feature (129)..(535): NCBI GI: 261360576 Blast Desc: ankyrin repeat and protein kinase domain-containing protein [Verticillium albo-atrum VaMs.102]
  misc_feature (154)..(563): NCBI GI: 123507472 Blast Desc: ankyrin repeat protein [Trichomonas vaginalis G3] gi|121912377|gb|EAY17199.1| ankyrin repeat protein, [Trichomonas vaginalis G3]
  misc_feature (165)..(563): NCBI GI: 67517919 Blast Desc: AN1130.2 [Aspergillus nidulans FGSC A4] gi|40747092|gb|EAA66248.1| AN1130.2 [Aspergillus nidulans FGSC A4]
  misc_feature (166)..(563): NCBI GI: 259488555 Blast Desc: TPA: conserved [Aspergillus nidulans FGSC A4]
  misc_feature (106)..(538): NCBI GI: 46115980 Blast Desc: FG03832.1 [Gibberella zeae PH-1]
  misc_feature (154)..(563): NCBI GI: 154415531 Blast Desc: ankyrin repeat protein [Trichomonas vaginalis G3] gi|121915011|gb|EAY19804.1| ankyrin repeat protein, [Trichomonas vaginalis G3]
  misc_feature (162)..(538): NCBI GI: 238500846 Blast Desc: Pfs, NACHT and Ankyrin domain protein [Aspergillus flavus NRRL3357] gi|220691894|gb|EED48241.1| Pfs, NACHT and Ankyrin domain protein [Aspergillus flavus NRRL3357]
  misc_feature (188)..(538): SWISSPROT Homolog: EC 2.4.2.30 NAD(+) ADP-ribosyltransferase
MIKQLMRVGSETPGEQINVPTITLYDIFLGSLVKWTSFSTRLVRLDSVESQDAILNSENGARILSRVTRVCQDIKESKGILLDPGMSFRATDQSSSKQRIADLPPAYEAPPPFEDSFDTVWANPNNATGSSGNDEEQAEGFFSSLMSPFKAAAAALRPKPEPFVVPLCQAATMCNVPQIKFLLKQGANINGRNENGQTPLICAVLAHQIEAARFLLEAGADRGTRDSGRNGKPPLFHAVDAEDRGMVDLLFKYGAQANQKDDWADSHFMNLVTGKTPIEWIALLLQHGADAGAQDMSGRKVIIQALTARKNFEDREQVVNLLLQHGASPNAKDITGTSLLFIAAEQKRDALVHRLLELGADANCRDNSGTTVLVMVVKRNDYALARTLLEHGADPNKPDIVGTHMILHVLNDRKTSTVDREAMLELLFAHGAKADKRDIYGTTVLEHSVTTSSSPGIRIPELMLKNGADPNQRLKKVTDEPTLLTHTLRNGQWDLARLALECGADANLVDKTGRSPMLLAIVGGNESLVKLLLSHGADVKQTCQVSPLELATAQISPNIVRLLTGNAKV

SEQ ID NO: 10296 - DNA, 2178 bp, Muscodor strobelii
  misc_feature: SGI EST ID NO. CUFF.24313.1
  misc_feature: Variant of the nucleotide sequence at SEQ ID NO 10294
gttcgcctcatccacatagcgcagctggcgcatcaccatttacaccacttcttcacactatcttttccgttcaaaatacgaatatcaattgtacctaaaatgagcagagcccctgagacggatttaattctcggtttactttgttctaagctagttgatcgcgtatcgtctgcggcaattgaagttggcagcatcctgcacgatagagggagtgagtttcacaacacaggcctccaggagctaccgaagctttcgacgaaattacacgaattggagtgcgaggctagccaactacaagatgcattgcatagcgcgaccgtcatgtcgccggccgtgcgatcctcgatctcggctctgctccctgactgcgacaccgcagccgcaatcatgattaagcagcttatgagagtcgggagcgaaacacccggcgagcaaatcaatgtaccgactatcaccttatatgatattttcttggggtcattggtgaaatggacatctttctcaacacgtttggttcgactcgactctgtggagagtcaagatgcaatcctcaacagcgagaatggagcgcgtatcttatcgagagtaacgagggtctgccaagacatcaaggaatcgaaaggcatactcttagatccaggcatgagttttcgggcgactgatcaatcgtcctcgaagcagcgtatagcagatctacctccagcttacgaagcgccgccgccgttcgaagactcatttgatacagtttgggcaaatccaaacaacgctaccgggagcagtggcaacgatgaagaacaggcagaaggcttcttcagctcgttgatgagtcctttcaaagctgccgccgcagcgctgcgacctaagcctgagccattcgtagtgcctctatgccaagcagcaacaatgtgcaatgtacctcagataaaattcctcctcaaacaaggcgccaacatcaatggtcgtaacgaaaatggtcagacgccacttatatgcgccgtcctagcacaccaaatcgaagctgcccgttttctcctcgaagccggagccgaccggggcacccgcgattctggtcgcaacggcaagccgccgctattccacgctgtggacgctgaagatcgaggtatggtggatttgttgtttaaatacggtgcacaagcaaaccaaaaggacgattgggctgattcacatttcatgaatctggtcactgggaaaacgccgatcgaatggattgcattgctcttacaacacggagctgatgcaggagcgcaagacatgtcaggacgaaaagtcattatacaggcattgacagcccgaaagaactttgaagaccgcgagcaagtcgtaaatttgctcctacaacatggtgcgagccccaatgctaaagatattaccggcacgtcacttcttttcattgcggccgaacagaaacgcgatgcgcttgtccatcgactccttgaactgggagctgatgcgaattgccgagataactctgggacgactgtgcttgtgatggtcgtcaagcgcaacgactacgcgttagccaggacgcttcttgaacacggagccgatcccaacaaacccgatattgtcggtactcacatgatcttacatgttcttaacgatcgaaagacaagcacggtagatcgcgaggcaatgctagaactgctcttcgctcatggcgcaaaggctgataaaagagacatctacggtactacagtactcgaacactccgtaaccacctcctcgtctccaggcattagaatcccggagctaatgttgaaaaatggcgcggatccaaaccagcgactcaaaaaggtcacagatgagccgacactccttacacatacattgcgaaatgggcaatgggatcttgcgagactagcgctggaatgtggcgctgacgctaacttggtcgacaaaacgggacgctcacctatgctactggcaatagtaggaggcaatgagagtctcgtcaagctgcttctcagtcatggagccgatgtgaagcagacatgccaggtgtcacctctcgagctagcgacagcacaaatcagtcctaatatcgtcaggctgctgacaggaaacgcgaaggtttgattttctttttggccatagcagcatttaattttgtacatttttatgataccaataaatgaagttcatatttctgtctgccat

SEQ ID NO: 10297 - DNA, 2286 bp, Muscodor strobelii
  misc_feature: SGI cDNA ID NO. 563262
  misc_feature: Encodes the peptide sequence at SEQ ID NO 10298
atgagctactggagatatctttcgctgttcctggctctggctgcggcgacgccgacgcccagagccggtgttgatgaaactatgctcaccgaacgggctgcaacgagcttttggtactccaatatggaccatacgggaaatgctcgtggatatgcacccaacctcgacggcgacttttcgtatccggtgtatatggcagtggcggctggagatggagctggcatacaggctgctatcaatgcggccgataatggaggcactcgccatccccagtggttatcagcgcaacccagggtcgtgtacatacctcctggcacctatgagattagcaagactattttgatgaacaccgacactatcttgatgggcgacgccacaaatcccccaaccattaaagctgccgccggcttttctggcagccagatcctaataaacgggcaagatcctgggacgggagtttcgggcgagctgtcattcgccgttggccttaagaacttgatactggatacaaccagcattgccggaggaaatgctttcacggctttgtattggggcgtggcacaagcagcccaactccagaatgttaaaattaacatggcatactctgtcaataatcagggacacacaggtattcgtctaggccgcggttcaactcttggtctttcagatgtgcgaatccaagctggccagaatggtatatggcacgatggtcatcagcaggcgctgtataaatccatctatttctatcagaacactgtcggtatccttatttccgggggcgcaaccatcagtatcatatcaccaacatttgatacttgcggtactgcggtgatgaacacgggtggtgacccatggattgctcttattgatgctgtttcgaaaaactctggtgttacgttcgtcacaacggggtatccatctttcatcattgaaaacctgacgaaggacaacaccggagacatcgctcgagtcccagaaggaactgtcttgggttctgcaagccatgttaacacgttcacttacggaaatactgtaaacagaaatccaatctacggtgcaacgacatcaaccaatactcgacctgcagcactcgcaccaggtgggaagtaccccgtactacccgctccaaactacgcctcgaaccccgtcagcgattttattaatgtcaaggatcccaatcagaatggagggcgcacagtgcttggtgataacacgaaggatgagtccgctgtcctcaatgctattttgcaacttgctgcgtcccagggaaaaattgcatacttcccatttggcttgtaccgggttgatagcactttgcttatccccaaaggctctcgaattgtcggtgaagcttgggcgactatcacgggtaatggaaatttcttcgcagactcgagcaatcccaagccagtagtttccgtcggaaacgccggcgacgtcggagttgcacaaattcaggatatgcgctttactgttagtggcgtactcccaggcgccatcattgttcagttcaatatggccggaaacagtcctggtgatgttgccctctggaattcactcgtcactgttggaggcactaggggcgcctctgctttggccaatgcttgtacgaatcctagcagcgagtgcaaggctgccttcattggtattcatcttgcgtcgacatcatctgcttacatagagaatgtttggaactgggtcgcagaccacttcacagagggcagtggcgggaccagcatcgcagccaagggtggtgtacttgttcaggcaacgaaaggcacctggcttcacgcgcttggcagcgagcattggtggctgtaccaattgaacttccacaaggcgagcaatgttctcgtctcgatgcttcagtctgagaccaactatgaccagggcgaccacgtccaacagactccacccgccccttggactgcgaacctaaatacctggggagatccagatttctcctggtgcgatggtggagatacgcgctgccgtatgggcttcgcgaactattttcaaggaggttccaacatctatacctatgcatccgcctcgtgggcgttcttcagcgggcctggctaccagagttgcgctggtgatttccaatgccaggactgcatgcattggatctcacagacgccgtccaacttcaatgctttcggtctctgctccaaagatacttatgctacactccatcttgcaaatggtactaacattgtcactcaaaatgggtttactggatcttggggcggtacaggtggcgacgtcggtagatatacggcctag

SEQ ID NO: 10298 - protein, 761 aa, Muscodor strobelii
  misc_feature: SGI Peptide ID NO. 563262
  misc_feature (7)..(760): NCBI GI: 19072997 Blast Desc: AF395756_1 beta-1,3-glucanase precursor [Hypocrea virens]
  misc_feature (17)..(743): NCBI GI: 170676122 Blast Desc: endoglucanase [Hypocrea virens]
  misc_feature (17)..(760): NCBI GI: 121511560 Blast Desc: beta-1,3-glucanase [Trichoderma viride] gi|283049933|gb|ADB07373.1| beta-1,3-glucanase [Trichoderma viride]
  misc_feature (1)..(760): NCBI GI: 116179192 Blast Desc: CHGG_00224 [Chaetomium globosum CBS 148.51] gi|88184521|gb|EAQ91989.1| CHGG_00224 [Chaetomium globosum CBS 148.51]
  misc_feature (6)..(760): NCBI GI: 19072995 Blast Desc: AF395755_1 beta-1,3-glucanase precursor [Hypocrea virens]
  misc_feature (35)..(760): NCBI GI: 28881389 Blast Desc: GLUCAN ENDO-1, 3-BETA-GLUCOSIDASE BGN13.1 PRECURSOR [Neurospora crassa]
  misc_feature (16)..(760): NCBI GI: 54650282 Blast Desc: laminarinase [Trichoderma viride]
  misc_feature (17)..(760): NCBI GI: 1706550 Blast Desc: E13B_TRIHA RecName: Full=Glucan endo-1,3-beta-glucosidase BGN13.1; AltName: Full=(1->3)-beta-glucan endohydrolase BGN13.1; BGN13.1; AltName:
  misc_feature (6)..(760): NCBI GI: 149347125 Blast Desc: endo-beta 1,3-glucanase [Hypocrea virens] gi|149347145|gb|ABR23668.1| endo-beta 1,3-glucanase [Hypocrea virens]
  misc_feature (6)..(760): NCBI GI: 283049935 Blast Desc: laminarinase [Trichoderma viride]
  misc_feature (17)..(743): SWISSPROT Homolog: EC 3.2.1.39 Glucan endo-1,3-beta-D-glucosidase
MSYWRYLSLFLALAAATPTPRAGVDETMLTERAATSFWYSNMDHTGNARGYAPNLDGDFSYPVYMAVAAGDGAGIQAAINAADNGGTRHPQWLSAQPRVVYIPPGTYEISKTILMNTDTILMGDATNPPTIKAAAGFSGSQILINGQDPGTGVSGELSFAVGLKNLILDTTSIAGGNAFTALYWGVAQAAQLQNVKINMAYSVNNQGHTGIRLGRGSTLGLSDVRIQAGQNGIWHDGHQQALYKSIYFYQNTVGILISGGATISIISPTFDTCGTAVMNTGGDPWIALIDAVSKNSGVTFVTTGYPSFIIENLTKDNTGDIARVPEGTVLGSASHVNTFTYGNTVNRNPIYGATTSTNTRPAALAPGGKYPVLPAPNYASNPVSDFINVKDPNQNGGRTVLGDNTKDESAVLNAILQLAASQGKIAYFPFGLYRVDSTLLIPKGSRIVGEAWATITGNGNFFADSSNPKPVVSVGNAGDVGVAQIQDMRFTVSGVLPGAIIVQFNMAGNSPGDVALWNSLVTVGGTRGASALANACTNPSSECKAAFIGIHLASTSSAYIENVWNWVADHFTEGSGGTSIAAKGGVLVQATKGTWLHALGSEHWWLYQLNFHKASNVLVSMLQSETNYDQGDHVQQTPPAPWTANLNTWGDPDFSWCDGGDTRCRMGFANYFQGGSNIYTYASASWAFFSGPGYQSCAGDFQCQDCMHWISQTPSNFNAFGLCSKDTYATLHLANGTNIVTQNGFTGSWGGTGGDVGRYTA

SEQ ID NO: 10299 - DNA, 2776 bp, Muscodor strobelii
  misc_feature: SGI EST ID NO. CUFF.24310.0
  misc_feature: Variant of the nucleotide sequence at SEQ ID NO 10297
gcggatactgtaggcggcggtgctccgctatatgatatgtttgtttcggaatcggcttactctttttcaaagccgcatgtgcacataccgaacctatcttgtacccactctcgatctaagatatgcagcctgcaaaaagctgcaagccaagtagacgcatggcgtcagctgaggagcctttcctctttcgaggttactataatctcgggtatgaatggagtcgcatggtgcatgtttgccttgcagttgttgaattacggacgtataaatagtgatgtccctctatttaaagtgaaaagcggtcttgagacgctcgccaccgtgcagagtctgtcgtctgtgtgtgcccgcttcgatgacgatgagctactggagatatctttcgctgttcctggctctggctgcggcgacgccgacgcccagagccggtgttgatgaaactatgctcaccgaacgggctgcaacgagcttttggtactccaatatggaccatacgggaaatgctcgtggatatgcacccaacctcgacggcgacttttcgtatccggtgtatatggcagtggcggctggagatggagctggcatacaggctgctatcaatgcggccgataatggaggcactcgccatccccagtggttatcagcgcaacccagggtcgtgtacatacctcctggcacctatgagattagcaagactattttgatgaacaccgacactatcttgatgggcgacgccacaaatcccccaaccattaaagctgccgccggcttttctggcagccagatcctaataaacgggcaagatcctgggacgggagtttcgggcgagctgtcattcgccgttggccttaagaacttgatactggatacaaccagcattgccggaggaaatgctttcacggctttgtattggggcgtggcacaagcagcccaactccagaatgttaaaattaacatggcatactctgtcaataatcagggacacacaggtattcgtctaggccgcggttcaactcttggtctttcagatgtgcgaatccaagctggccagaatggtatatggcacgatggtcatcagcaggcgctgtataaatccatctatttctatcagaacactgtcggtatccttatttccgggggcgcaaccatcagtatcatatcaccaacatttgatacttgcggtactgcggtgatgaacacgggtggtgacccatggattgctcttattgatgctgtttcgaaaaactctggtgttacgttcgtcacaacggggtatccatctttcatcattgaaaacctgacgaaggacaacaccggagacatcgctcgagtcccagaaggaactgtcttgggttctgcaagccatgttaacacgttcacttacggaaatactgtaaacagaaatccaatctacggtgcaacgacatcaaccaatactcgacctgcagcactcgcaccaggtgggaagtaccccgtactacccgctccaaactacgcctcgaaccccgtcagcgattttattaatgtcaaggatcccaatcagaatggagggcgcacagtgcttggtgataacacgaaggatgagtccgctgtcctcaatgctattttgcaacttgctgcgtcccagggaaaaattgcatacttcccatttggcttgtaccgggttgatagcactttgcttatccccaaaggctctcgaattgtcggtgaagcttgggcgactatcacgggtaatggaaatttcttcgcagactcgagcaatcccaagccagtagtttccgtcggaaacgccggcgacgtcggagttgcacaaattcaggatatgcgctttactgttagtggcgtactcccaggcgccatcattgttcagttcaatatggccggaaacagtcctggtgatgttgccctctggaattcactcgtcactgttggaggcactaggggcgcctctgctttggccaatgcttgtacgaatcctagcagcgagtgcaaggctgccttcattggtattcatcttgcgtcgacatcatctgcttacatagagaatgtttggaactgggtcgcagaccacttcacagagggcagtggcgggaccagcatcgcagccaagggtggtgtacttgttcaggcaacgaaaggcacctggcttcacgcgcttggcagcgagcattggtggctgtaccaattgaacttccacaaggcgagcaatgttctcgtctcgatgcttcagtctgagaccaactatgaccagggcgaccacgtccaacagactccacccgccccttggactgcgaacctaaatacctggggagatccagatttctcctggtgcgatggtggagatacgcgctgccgtatgggcttcgcgaactattttcaaggaggttccaacatctatacctatgcatccgcctcgtgggcgttcttcagcgggcctggctaccagagttgcgctggtgatttccaatgccaggactgcatgcattggatctcacagacgccgtccaacttcaatgctttcggtctctgctccaaagatacttatgctacactccatcttgcaaatggtactaacattgtcactcaaaatgggtttactggatcttggggcggtacaggtggcgacgtcggtagatatacggcctaggcagacacgatagattcttcatattccgtagctatagcaaagtatgaagatctaaataattagagctaagttgatatatagtaaagtcgataattgtcaagaaacaggctgtagtttccaacctgcact

SEQ ID NO: 10300 - DNA, 786 bp, Muscodor strobelii
  misc_feature: SGI cDNA ID NO. 563263
  misc_feature: Encodes the peptide sequence at SEQ ID NO 10301
atgcctccaccgcctccaggacgtctcgcatccataatccgcatatcgtcaatgatatggcttgccatttctctgcactggaaggctttcaaggagagctaccgtcgatacggcgcagcagcgattttccgctttcgggagatccacgacgccgcggtggccaacctcctctcaatgacgtccgacggattcatcgcctttgaaaatactaccaccgtcccttctctcgtcaaatctgcgaccggcaagattctcgaactgggtcctgggcctggcaaccagatccatcgatatgaccctgcgcagattgagttcgtatatgctgtcgaccctaacccacactttgcgagcgacattgctgccaagctgcaaaaggtaagtgcgctcgacgataagtacaaattcatcgcttgcggtatcgaggacagcgacgttttgagaaaaaatggtattacagaaggcagtctggataccgtaacaagcatccaggtcatgtgtgccgtagatgacgttagaagtgtgatgaaagaggtgtacaagttgttgaaaccgggcggcaagtttattttctgggaacatggaagaagcaaaagcacgctcacagccgtggcgcaagccttgtggaatcccgcgtggtataagttcgttgggtgcagcatgacgagaaatgtgaaagctgagatccttgcggcgggggagtgggacaaccctgacgagattaaggtgtccaatgatccatatagcttcttgcctcgagtagaaggcgttctcgtcaagaaagcctaa

SEQ ID NO: 10301 - protein, 261 aa, Muscodor strobelii
  misc_feature: SGI Peptide ID NO. 563263
  misc_feature (85)..(190): Pfam Id: PF08241 Pfam Desc: Methyltransferase domain
  misc_feature (85)..(188): Pfam Id: PF08242 Pfam Desc: Methyltransferase domain
  misc_feature (1)..(253): NCBI GI: 67518077 Blast Desc: AN1203.2 [Aspergillus nidulans FGSC A4] gi|40746640|gb|EAA65796.1| AN1203.2 [Aspergillus nidulans FGSC A4] gi|259488477|tpe|CBF87941.1| TPA: conserved [Aspergillus FGSC
  misc_feature (57)..(261): NCBI GI: 169617345 Blast Desc: SNOG_11850 [Phaeosphaeria nodorum SN15] gi|111059774|gb|EAT80894.1| SNOG_11850 [Phaeosphaeria nodorum SN15]
  misc_feature (64)..(234): NCBI GI: 212536482 Blast Desc: conserved [Penicillium marneffei ATCC 18224] gi|210070796|gb|EEA24886.1| conserved [Penicillium marneffei ATCC 18224]
  misc_feature (76)..(259): NCBI GI: 255930553 Blast Desc: Pc06g02340 [Penicillium chrysogenum Wisconsin 54-1255] gi|211581449|emb|CAP79227.1| Pc06g02340 [Penicillium chrysogenum Wisconsin 54-1255]
  misc_feature (70)..(259): NCBI GI: 154304517 Blast Desc: BC1G_09134 [Botryotinia fuckeliana B05.10] gi|150854114|gb|EDN29306.1| BC1G_09134 [Botryotinia fuckeliana B05.10]
  misc_feature (76)..(259): NCBI GI: 156055074 Blast Desc: SS1G_04888 [Sclerotinia sclerotiorum 1980] gi|154702673|gb|EDO02412.1| SS1G_04888 [Sclerotinia sclerotiorum 1980]
  misc_feature (76)..(259): NCBI GI: 71018859 Blast Desc: UM03513.1 [Ustilago maydis 521] gi|46099418|gb|EAK84651.1| UM03513.1 [Ustilago maydis 521]
  misc_feature (69)..(261): NCBI GI: 119182179 Blast Desc: CIMG_06134 [Coccidioides immitis RS]
  misc_feature (69)..(261): NCBI GI: 240109187 Blast Desc: CPC735_026920 [Coccidioides posadasii C735 delta SOWgp]
  misc_feature (69)..(261): NCBI GI: 258571858 Blast Desc: [Uncinocarpus reesii 1704] gi|237905002|gb|EEP79403.1| [Uncinocarpus reesii 1704]
MPPPPPGRLASIIRISSMIWLAISLHWKAFKESYRRYGAAAIFRFREIHDAAVANLLSMTSDGFIAFENTTTVPSLVKSATGKILELGPGPGNQIHRYDPAQIEFVYAVDPNPHFASDIAAKLQKVSALDDKYKFIACGIEDSDVLRKNGITEGSLDTVTSIQVMCAVDDVRSVMKEVYKLLKPGGKFIFWEHGRSKSTLTAVAQALWNPAWYKFVGCSMTRNVKAEILAAGEWDNPDEIKVSNDPYSFLPRVEGVLVKKA

SEQ ID NO: 10302 - DNA, 2380 bp, Muscodor strobelii
  misc_feature: SGI EST ID NO. CUFF.24374.0
  misc_feature: Variant of the nucleotide sequence at SEQ ID NO 10300
tgttggtagattgattgtaaattgaatctcagtaccatgatgttgcttcggaaggatgcaaagcttccggcaaacaggtacctactagattattatgatagcattgcgcaatttgattcacagttaacgatacttgccatcttctctcggtgtgtattgacttgatgccccccatatgatgttgataacaagtatcatgggacaattgtgcattggagttttgtgcgcttatcttatcgcttagaattaggcgcgtaatgcgtcagcggagatgcttacccctgaaaggggtcggagtcgcgtatgaggactgagtacgcctctcaacgacagcagccattgtgcgtagctcaatacctgggagaccatcataaagcaatatgtagatttcttgtgaccacgtaacgaaataaaatcgtcgccgaagaaggattgcacgcgcttttataccgtagtttgaaaggcggattgcggcatcatggcaaatcgttgagctgcgtcacccgtgtccaaataggtggggttccaagctgcctcgctggactgacggaggatgcccataccaattcaggccccgtccacccacgcgaggacgtccgctcttggtataaaacatctcagcttgtcataccgtcctcccacacttacctcctttcttcatcttgcctcattctcatcccatgccccttgccgtttctgattctttgttcgctacctggttcgagtctcccctattagcacattagtccacgtacacttattgctctacccaatctgaacacttcctgtgagcagctgtaccgtcatgcctccaccgcctccaggacgtctcgcatccataatccgcatatcgtcaatgatatggcttgccatttctcgtacgtccatctccattcgccgcgacagccagctaattcatcgctcgatgcagtgcactggaaggctttcaaggagagctaccgtcgatacggcgcagcagcgattttccgctttcgggagatccacgacgccgcggtggccaacctcctctcaatgacgtccgacggattcatcgcctttgaaaatactaccaccgtcccttctctcgtcaaatctgcgaccggcaagattctcgaactgggtcctgggcctggcaaccagatccatcgatatgaccctgcgcagattgagttcgtatatgctgtcgaccctaacccacactttgcgagcgacattgctgccaagctgcaaaaggtaagtgcgctcgacgataagtacaaattcatcgcttgcggtatcgaggacagcgacgttttgagaaaaaatggtattacagaaggcagtctggataccgtaacaagcatccaggtcatgtgtgccgtagatgacgttagaagtgtgatgaaagaggtgtacaagttgttgaaaccgggcggcaagtttattttctgggaacatggaagaagcaaaagcacgctcacagccgtggcgcaagccttgtggaatcccgcgtggtataagttcgttgggtgcagcatgacgagaaatgtgaaagctgagatccttgcggcgggggagtgggacaaccctgacgagattaaggtgtccaatgatccatatagcttcttgcctcgagtagaaggcgttctcgtcaagaaagcctaactgtgcctgctggcaagaggcgatgccgcagcggatcggaagctataagcgcatcatgggtctattcgggtgcagtagaccgcccgaggtgccttctaaggctctctgcactatgatttgcagatgatcctgtagcatgtgtcagaccggtcgctcgtttgaataccgccatcatccaacattggtggtaaattcatattcattgaactcagaatagagtacaatttccatgctcagctgtgatggcgatgccagagatttcgtaagatggctatagtgaccattgcttctcctcgtttaccgagcaagccctgaagtggtcggaattacgaagcggagataacaccccgtaatgtgaacacacattagcaacaacctagctcgagccgacgaggccttcaatggcggagttgaatggctgtagtaaggtgatgctttcaaatggctactcgattcggtcgttttatggaagccatattcgattacaatgcttgaacgcgcgacacttgatcgcgttgctgcgcatcaggtccgaagtgctttgattgccgcgaggaatcttcttcggtcgctttttgccgccgcagatgagaccgtctttatgatcattgccgctggaatatgcacgtcttaccgtcgaaggactgcggcgaaagatggcttttgggaatcgtgtcgatgatgaagtgagggtttttcagtcggtgtggaacttggccactacctgaaatggcgg

SEQ ID NO: 10303 - DNA, 921 bp, Muscodor strobelii
  misc_feature: SGI cDNA ID NO. 563264
  misc_feature: Encodes the peptide sequence at SEQ ID NO 10304
atgcttagctcttatcgttcagaatcactaccttcaagtactccaaactcggcggctccaggtgcaaagacgcgatttgacgactttgttgctacccatatcaaccaaactacgacgattcattatactggcaacttccttgtatggcacaggtacttcacctggttatacgaacaagcactccaagtcgagtgtggctacaaaggcacacaaccgtattgggattgggcaaagactgccgcaattggcttacataactcacccatctttgatggcagcggtacttccatgtctggaaatggggcatacatcgcaaatcaaggtcaagtagttcttggcggaagtggccttcctttcatttaccttgatccaggcgacgggggaggatgcgtcacctcaggcccctttaaagacatgatcgtgaacataggaccagcttctctgccagttcccggcaatgtcactgaggtgaacccgaacgggccgctatcttggaacccgcgatgcctgaggcgctcgctcacgcagtcaattaacgatgactttgcaaacggtactgccatcttgaatctcttgcaaaatcccagcaacgtttatgatttccagatgcaaatgcaaggcatccccgggagtgggaatatcggggtacatggcggtgggcactactcactcggtggtgatcccggaagagacgtgttcgtgtctccagcttggtggatgtggcagaacctaggggatgccgatgagcggttctcgggcctgactgggctgagcggcaccaatacttttctcaatgatccgccgagcgcaaacacgacatatgaagattatgtcgaatatgggtttgcggctggtcctccacgtcagatcaaggatctcatgaagactacctctggtcccttctgctatatttatgcctag

SEQ ID NO: 10304 - protein, 306 aa, Muscodor strobelii
  misc_feature: SGI Peptide ID NO. 563264
  misc_feature (8)..(304): NCBI GI: 164423623 Blast Desc: NCU11382 [Neurospora crassa OR74A] gi|157070171|gb|EDO64979.1| conserved [Neurospora crassa OR74A]
  misc_feature (8)..(305): NCBI GI: 46110212 Blast Desc: FG01988.1 [Gibberella zeae PH-1]
  misc_feature (8)..(305): NCBI GI: 119185216 Blast Desc: CIMG_07314 [Coccidioides immitis RS]
  misc_feature (8)..(305): NCBI GI: 145603250 Blast Desc: MGG_06169 [Magnaporthe grisea 70-15] gi|145011520|gb|EDJ96176.1| MGG_06169 [Magnaporthe grisea 70-15]
  misc_feature (8)..(305): NCBI GI: 256728532 Blast Desc: NECHADRAFT_85924 [Nectria haematococca mpVI 77-13-4]
  misc_feature (8)..(306): NCBI GI: 169603123 Blast Desc: SNOG_04568 [Phaeosphaeria nodorum SN15] gi|111067208|gb|EAT88328.1| SNOG_04568 [Phaeosphaeria nodorum SN15]
  misc_feature (8)..(305): NCBI GI: 255949976 Blast Desc: Pc22g18500 [Penicillium chrysogenum Wisconsin 54-1255] gi|211592772|emb|CAP99138.1| Pc22g18500 [Penicillium chrysogenum Wisconsin 54-1255]
  misc_feature (8)..(306): NCBI GI: 189192737 Blast Desc: conserved [Pyrenophora tritici-repentis Pt-1C-BFP] gi|187978271|gb|EDU44897.1| conserved [Pyrenophora tritici-repentis Pt-1C-BFP]
  misc_feature (8)..(305): NCBI GI: 258564688 Blast Desc: conserved [Uncinocarpus reesii 1704] gi|237908596|gb|EEP82997.1| conserved [Uncinocarpus reesii 1704]
  misc_feature (8)..(306): NCBI GI: 145230067 Blast Desc: An01g09220 [Aspergillus niger] gi|134055457|emb|CAK43972.1| protein product [Aspergillus niger]
MLSSYRSESLPSSTPNSAAPGAKTRFDDFVATHINQTTTIHYTGNFLVWHRYFTWLYEQALQVECGYKGTQPYWDWAKTAAIGLHNSPIFDGSGTSMSGNGAYIANQGQVVLGGSGLPFIYLDPGDGGGCVTSGPFKDMIVNIGPASLPVPGNVTEVNPNGPLSWNPRCLRRSLTQSINDDFANGTAILNLLQNPSNVYDFQMQMQGIPGSGNIGVHGGGHYSLGGDPGRDVFVSPAWWMWQNLGDADERFSGLTGLSGTNTFLNDPPSANTTYEDYVEYGFAAGPPRQIKDLMKTTSGPFCYIYA

SEQ ID NO: 10305 - DNA, 1062 bp, Muscodor strobelii
  misc_feature: SGI EST ID NO. CUFF.24317.0
  misc_feature: Variant of the nucleotide sequence at SEQ ID NO 10303
tcaagtactccaaactcggcggctccaggtgcaaagacgcgatttgacgactttgttgctacccatatcaaccaaactacgacgattcattatactggcaacttccttgtatggcacaggtacttcacctggttatacgaacaagcactccaagtcgagtgtggctacaaaggcacacaaccgtattgggattgggcaaagactgccgcaattggcttacataactcacccatctttgatggcagcggtacttccatgtctggaaatggggcatacatcgcaaatcaaggtcaagtagttcttggcggaagtggccttcctttcatttaccttgatccaggcgacgggggaggatgcgtcacctcaggcccctttaaagacatgatcgtgaacataggaccagcttctctgccagttcccggcaatgtcactgaggtgaacccgaacgggccgctatcttggaacccgcgatgcctgaggcgctcgctcacgcagtcaattaacgatgactttgcaaacggtactgccatcttgaatctcttgcaaaatcccagcaacgtttatgatttccagatgcaaatgcaaggcatccccgggagtgggaatatcggggtacatggcggtgggcactactcactcggtggtgatcccggaagagacgtgttcgtgtctccaggtgacccagcattctacctacatcatagcatgattgacagaaggaagattgctcccttcatcttatgaggcgtcctgttctcattcctaagcggtcaatataccagagtttgagcatatcaattgacaaatgaacggcagcttggtggatgtggcagaacctaggggatgccgatgagcggttctcgggcctgactgggctgagcggcaccaatacttttctcaatgatccgccgagcgcaaacacgacatatgaagattatgtcgaatatgggtttgcggctggtcctccacgtcagatcaaggatctcatgaagactacctctggtcccttctgctatatttatgcctagttcttctcgtccaacattaccccgccccttttgc

SEQ ID NO: 10306 - DNA, 585 bp, Muscodor strobelii
  misc_feature: SGI cDNA ID NO. 563265
  misc_feature: Encodes the peptide sequence at SEQ ID NO 10307
atgggcactccagtttcgaacccagaggaaaatgctggctcattaatgcggtcaacattattgcctggcacgatcctggcgacaatcattgttcttctgcgactatgggtacgcattttcaaacttcacggattcggtgcggatgacattcttatgaccttcgcctgggctttgtcggttgtgggaggaagtctgatactcactcagatcgcacatggcggagctcaacatgttggcgacgtacccccaagcagttactctttcgctttgaaagtcaacttcgtagcacagcccatatatctctttgcaatttactttgctaaactatctgttggagttgctctgcttcgtgttgcgcctacacgagtctggaagacaacgatcgctgtcttaattggatttacagctatatacacttttggtagctttttggctatcatttttcaatgcgccgatattcgagcagtgtgggacaggaacatcactacgcactgtttctctgaagtgactcttctgggtctggcttacgcgaacacaggagtcagcatcattacagatgtaagtgatcgaacctgtcaattatga

SEQ ID NO: 10307 - protein, 194 aa, Muscodor strobelii
  misc_feature: SGI Peptide ID NO. 563265
  misc_feature (5)..(187): NCBI GI: 39975805 Blast Desc: MGG_06171 [Magnaporthe grisea 70-15] gi|145011519|gb|EDJ96175.1| MGG_06171 [Magnaporthe grisea 70-15]
  misc_feature (8)..(187): NCBI GI: 238498218 Blast Desc: conserved [Aspergillus flavus NRRL3357] gi|220693618|gb|EED49963.1| conserved [Aspergillus flavus NRRL3357]
  misc_feature (8)..(188): NCBI GI: 242798118 Blast Desc: conserved [Talaromyces stipitatus ATCC 10500] gi|218716449|gb|EED15870.1| conserved [Talaromyces stipitatus ATCC 10500]
  misc_feature (8)..(188): NCBI GI: 189192739 Blast Desc: conserved [Pyrenophora tritici-repentis Pt-1C-BFP] gi|187978272|gb|EDU44898.1| conserved [Pyrenophora tritici-repentis Pt-1C-BFP]
  misc_feature (6)..(187): NCBI GI: 46110214 Blast Desc: FG01989.1 [Gibberella zeae PH-1]
  misc_feature (3)..(188): NCBI GI: 169603119 Blast Desc: SNOG_04566 [Phaeosphaeria nodorum SN15] gi|160706329|gb|EAT88326.2| SNOG_04566 [Phaeosphaeria nodorum SN15]
  misc_feature (6)..(187): NCBI GI: 256728707 Blast Desc: NECHADRAFT_105529 [Nectria haematococca mpVI 77-13-4]
  misc_feature (43)..(187): NCBI GI: 240106580 Blast Desc: integral membrane family protein [Coccidioides posadasii C735 delta SOWgp]
  misc_feature (4)..(187): NCBI GI: 145606146 Blast Desc: MGG_11887 [Magnaporthe grisea 70-15] gi|145013873|gb|EDJ98514.1| MGG_11887 [Magnaporthe grisea 70-15]
  misc_feature (24)..(187): NCBI GI: 119185220 Blast Desc: CIMG_07316 [Coccidioides immitis RS]
MGTPVSNPEENAGSLMRSTLLPGTILATIIVLLRLWVRIFKLHGFGADDILMTFAWALSVVGGSLILTQIAHGGAQHVGDVPPSSYSFALKVNFVAQPIYLFAIYFAKLSVGVALLRVAPTRVWKTTIAVLIGFTAIYTFGSFLAIIFQCADIRAVWDRNITTHCFSEVTLLGLAYANTGVSIITDVSDRTCQL

SEQ ID NO: 10308 - DNA, 1812 bp, Muscodor strobelii
  misc_feature: SGI cDNA ID NO. 563266
  misc_feature: Encodes the peptide sequence at SEQ ID NO 10309
atgaagaaacatgcttccgctcaattctctttcttcttgtatttggcctacaatgcattcatcccggctttgggcgccactacttcccaacagcgtcgccaagactctaccagatgcaaagtcttcccaggcgatttggactggccatcggaacagcagtggaatagtcttaactcgtcaatcggcggagtgttgctaagacctctacccgcggcttctgtatgctatgacggagcaaacttcaataaggcccaatgtcagttcctggtgagcggcacgtcgtcgacaagattttggctcgatgatcctctcacagaacttgcgcagtggactcaaggaagttcatgtgtggccagcttgacaccagtcggtaactgtacaagaggcgggtttcctgagtatgtcgtgaatgcaagcgcgcccagtcatgtgcaagcagctgtcaactttgcgagagaaaacaacatacggcttgtgattaaaaacaccgggcatgacttcggtggtcgatcagtcggcgcaggctctctcagtgtctggacacattatctaaagagcacggagtttatccctgagtaccaaatagggaactacagtggtatggctgtacgtctcggctccggtgtcgaagcttgggaagtctccaatctcatggcagctcacaacatgacagttgtcgctgcaggctgcaatactgtaggcggaactggcggttggttaagctcgggaggacacagtactgtgacatcaaccttcggactcggagccgatcaagcgctctcaattgatgttgttacagctaacggggccatggtgacagcagatccgttcagaaacacagacctgttttgggcaatgcgcggcggaggcggatctacatacggagtactcgtatcagtcattatgaaggcatacccaccaatcactatatcatcatcttcgctgagcctaactgtatcgaacgcgactacatcaggagcgatacgtgatgttgatactttctggcagggcgttggcacatattacagatttgccgctaaaatactcgacgccggtggttatggatttagttacatctatcccatggcaaatagcacctatcgttttacaacctccagctcgttcccaggcatgagcccatcagtcgcgttcaatttcatgcagccgttgtataaactattacaaggccttgggatcaacgtcgccaaccctacgatcgcatctgctcgcccatacggatcaccgcggtcaggaacaggtgatcgacctgtcaacacaagatatagatcaaggcttttacctcgtgagaactgggaagatgacgctctctttaatgacacaatgactgccatccggacctgcgttgaaggtggattcgaaaataatttctattttcacggtacattgacgtctcccactgagcaagtggcaggatggccaggtagcaacagcgctgtcatacccgcatggcgcaacaatcgcatacatgccatgctcatggatgttcaaccggatgggttcactgcaaagcaagccaccgatagagacactcttatgcaaggatatatgagcttgatacgagaggtctcccctaatgctggctcctacatgaatgagggcgacgttggggagccaaattggcaacgagctttttttggtgagaactatgatcgtttgctcgagatcaaaaagacttgggatccattgcaagtcttttgggcgccgaccactgtgggtagtgagggttggcaagttcaggcggtaaacggttatccgcattcacaaaatggccgtctctgccgcgtggagtag

SEQ ID NO: 10309 - protein, 603 aa, Muscodor strobelii
  misc_feature: SGI Peptide ID NO. 563266
  misc_feature (535)..(579): Pfam Id: PF08031 Pfam Desc: Berberine and berberine like
  misc_feature (132)..(275): Pfam Id: PF01565 Pfam Desc: FAD binding domain
  misc_feature (21)..(602): NCBI GI: 116204239 Blast Desc: CHGG_10003 [Chaetomium globosum CBS 148.51] gi|88176131|gb|EAQ83599.1| CHGG_10003 [Chaetomium globosum CBS 148.51]
  misc_feature (21)..(602): NCBI GI: 171678675 Blast Desc: protein product [Podospora anserina] gi|170937407|emb|CAP62065.1| protein product [Podospora anserina]
  misc_feature (38)..(602): NCBI GI: 116194254 Blast Desc: CHGG_03725 [Chaetomium globosum CBS 148.51] gi|88179638|gb|EAQ87106.1| CHGG_03725 [Chaetomium globosum CBS 148.51]
  misc_feature (29)..(602): NCBI GI: 39963299 Blast Desc: MGG_09727 [Magnaporthe grisea 70-15] gi|145015492|gb|EDK00029.1| MGG_09727 [Magnaporthe grisea 70-15]
  misc_feature (39)..(602): NCBI GI: 145616342 Blast Desc: MGG_02367 [Magnaporthe grisea 70-15] gi|145013094|gb|EDJ97735.1| MGG_02367 [Magnaporthe grisea 70-15]
  misc_feature (23)..(602): NCBI GI: 171678659 Blast Desc: protein product [Podospora anserina] gi|170937399|emb|CAP62057.1| protein product [Podospora anserina]
  misc_feature (34)..(602): NCBI GI: 171683693 Blast Desc: protein product [Podospora anserina] gi|170941806|emb|CAP67460.1| protein product [Podospora anserina]
  misc_feature (38)..(601): NCBI GI: 171682826 Blast Desc: protein product [Podospora anserina] gi|170941372|emb|CAP67022.1| protein product [Podospora anserina]
  misc_feature (39)..(602): NCBI GI: 212526020 Blast Desc: conserved [Penicillium marneffei ATCC 18224] gi|210072565|gb|EEA26652.1| conserved [Penicillium marneffei ATCC 18224]
  misc_feature (24)..(602): NCBI GI: 242779826 Blast Desc: conserved [Talaromyces stipitatus ATCC 10500] gi|218719614|gb|EED19033.1| conserved [Talaromyces stipitatus ATCC 10500]
MKKHASAQFSFFLYLAYNAFIPALGATTSQQRRQDSTRCKVFPGDLDWPSEQQWNSLNSSIGGVLLRPLPAASVCYDGANFNKAQCQFLVSGTSSTRFWLDDPLTELAQWTQGSSCVASLTPVGNCTRGGFPEYVVNASAPSHVQAAVNFARENNIRLVIKNTGHDFGGRSVGAGSLSVWTHYLKSTEFIPEYQIGNYSGMAVRLGSGVEAWEVSNLMAAHNMTVVAAGCNTVGGTGGWLSSGGHSTVTSTFGLGADQALSIDVVTANGAMVTADPFRNTDLFWAMRGGGGSTYGVLVSVIMKAYPPITISSSSLSLTVSNATTSGAIRDVDTFWQGVGTYYRFAAKILDAGGYGFSYIYPMANSTYRFTTSSSFPGMSPSVAFNFMQPLYKLLQGLGINVANPTIASARPYGSPRSGTGDRPVNTRYRSRLLPRENWEDDALFNDTMTAIRTCVEGGFENNFYFHGTLTSPTEQVAGWPGSNSAVIPAWRNNRIHAMLMDVQPDGFTAKQATDRDTLMQGYMSLIREVSPNAGSYMNEGDVGEPNWQRAFFGENYDRLLEIKKTWDPLQVFWAPTTVGSEGWQVQAVNGYPHSQNGRLCRVE

SEQ ID NO: 10310 - DNA, 387 bp, Muscodor strobelii
  misc_feature: SGI EST ID NO. CUFF.24332.0
  misc_feature: Variant of the nucleotide sequence at SEQ ID NO 10308
cggcggaggcggatctacatacggagtactcgtatcagtcattatgaaggcatacccaccaatcactatatcatcatcttcgctgagcctaactgtatcgaacgcgactacatcaggagcgatacgtgatgttgatactttctggcagggcgttggcacatattacagatttgccgctaaaatactcgacgccggtggttatggatttagttacatctatcccatggcaaatagcacctatcgttttacaacctccagctcgttcccaggcatgagcccatcagtcgcgttcaatttcatgcagccgttgtataaactattacaaggccttgggatcaacgtcgccaaccctacgatcgcatctgctcgcccatacggatcaccgcg

SEQ ID NO: 10311 - DNA, 1881 bp, Muscodor strobelii
  misc_feature: SGI cDNA ID NO. 563267
  misc_feature: Encodes the peptide sequence at SEQ ID NO 10312
atggatccattcactatcctcgggatcgcttccaatatctggacatttgtggaagctgggatcaaggtcatcaagacgacaaacgaattgtacagcaaagggagcgatacaacgcaggatgcatctgccatcgaagaatctgtcggggtcatggagcagtccattaactccttgaggtcatctgaagggccccaagaacttcaagaattgtcccaacaatgtcaagtactttcccgtcagctcttcaagatcctcacgaagctcaaaatcaagggcaaaagctcgcgggtgcagtacatcaaaatcgttgtgatttccttcttaaaagctgccgagataacgtcaatcgaaatgaagcttaacaatatacgctccgtccttacaacgtaccagttgacattgttgaacgaaaaagcttcggagttcaagaggaagctcgataagattgaggcgggcgtgaatgcactgtcggaagcgaggggcgaccaactcgcaagacaacggagagacatcatcgctttactacagagtcaatgtactgaagacgtagggaaaaggctccgcgtgatgggagagtctatgagggtgtcggaggtcgaaaccaagattctcaaccagctaagattctcggcgttaaggcgcagacaagatggcatcgaggatgctcaagacggcactttcgcctggctactacgacgctccgatggggaaaccatctcgatgaaggacacgagaaaagcattcgtctcttggctcaaatatggggcagggatcttccacatttcgggcaaggcaggcgctggtaaatcaacattaatgaagttcatcgccatgcacttatcaactcgagagcatgtggagcgcacctgggctaagggaacccatttgtgctacgcgtcctttttcttctacagtggcggcggcgacgacgagaaatctcttgagggtctatatcgctctattctatatacaattctgaacgattgtcccggtctcatgccaaccgtattcccaggcctcttccaaaaagatggcttgttccaagaaagccttttggtagaaatcacacgaccgcaacaaattcgaaatactttccagaggtttatcagcattgcaacaggaggacaatacaagatatgtctattcatcgatgggcttgacgagtatggaggcgatgtcactgagcataggaatctggcagaacaattgagatcttgggctgccagtagtgaaggccacgtcaaattttgcgtgagctcacgaccacacgtgcagtttgctcaaacatttgctccttccggctctttggtgcaccaagttcatctccatgaactgacccgcaacgacatcgcccgccatagtctctccgcgttcaaaggtgatagacattgcgacaacctttctgccttacagtcggagtgtgacgcactagtggaagctattgttgatcgcgcacaaggtgtcttcctatgggttcactttgtcgttcgtttcatcttggaagaggccaaacaagggagcaccagagaagggctatggagaaagttgaatgaagttcccgaaaagattgacgatctctacaaccatctattagggtctctcaagagacaagaccggcatattgcaaatcaaatgctgatggcagtgttgaccaatccgtttcggcactccctcaacgtaatgtgcctcaagtggctcaaagacagtgcgacgtgggataaagtcatgctgagagatcgcttgtatggaaaagaacaagcagaaattgaaattgagagtgctctcaatcatcttaacggctggacacgtggcctcattgagattgataggggggacctacaactctccagaatcaatgagggaaaccatctcacaggctag

SEQ ID NO: 10312 - protein, 626 aa, Muscodor strobelii
  misc_feature: SGI Peptide ID NO. 563267
  misc_feature (220)..(608): NCBI GI: 212540446 Blast Desc: conserved [Penicillium marneffei ATCC 18224] gi|210067677|gb|EEA21769.1| conserved [Penicillium marneffei ATCC 18224]
  misc_feature (1)..(615): NCBI GI: 256721251 Blast Desc: NECHADRAFT_34792 [Nectria haematococca mpVI 77-13-4]
  misc_feature (1)..(610): NCBI GI: 225684243 Blast Desc: conserved [Paracoccidioides brasiliensis Pb03]
  misc_feature (4)..(535): NCBI GI: 256730066 Blast Desc: NECHADRAFT_82694 [Nectria haematococca mpVI 77-13-4]
  misc_feature (1)..(610): NCBI GI: 226293863 Blast Desc: conserved [Paracoccidioides brasiliensis Pb18]
  misc_feature (1)..(608): NCBI GI: 171692629 Blast Desc: protein product [Podospora anserina] gi|170946263|emb|CAP73064.1| protein product [Podospora anserina]
  misc_feature (1)..(566): NCBI GI: 115383708 Blast Desc: [Aspergillus terreus NIH2624] gi|114196093|gb|EAU37793.1| [Aspergillus terreus NIH2624]
  misc_feature (1)..(535): NCBI GI: 46111055 Blast Desc: FG02409.1 [Gibberella zeae PH-1]
  misc_feature (1)..(535): NCBI GI: 256725921 Blast Desc: NECHADRAFT_82115 [Nectria haematococca mpVI 77-13-4]
  misc_feature (60)..(607): NCBI GI: 115490985 Blast Desc: [Aspergillus terreus NIH2624] gi|114196980|gb|EAU38680.1| [Aspergillus terreus NIH2624]
MDPFTILGIASNIWTFVEAGIKVIKTTNELYSKGSDTTQDASAIEESVGVMEQSINSLRSSEGPQELQELSQQCQVLSRQLFKILTKLKIKGKSSRVQYIKIVVISFLKAAEITSIEMKLNNIRSVLTTYQLTLLNEKASEFKRKLDKIEAGVNALSEARGDQLARQRRDIIALLQSQCTEDVGKRLRVMGESMRVSEVETKILNQLRFSALRRRQDGIEDAQDGTFAWLLRRSDGETISMKDTRKAFVSWLKYGAGIFHISGKAGAGKSTLMKFIAMHLSTREHVERTWAKGTHLCYASFFFYSGGGDDEKSLEGLYRSILYTILNDCPGLMPTVFPGLFQKDGLFQESLLVEITRPQQIRNTFQRFISIATGGQYKICLFIDGLDEYGGDVTEHRNLAEQLRSWAASSEGHVKFCVSSRPHVQFAQTFAPSGSLVHQVHLHELTRNDIARHSLSAFKGDRHCDNLSALQSECDALVEAIVDRAQGVFLWVHFVVRFILEEAKQGSTREGLWRKLNEVPEKIDDLYNHLLGSLKRQDRHIANQMLMAVLTNPFRHSLNVMCLKWLKDSATWDKVMLRDRLYGKEQAEIEIESALNHLNGWTRGLIEIDRGDLQLSRINEGNHLTG

SEQ ID NO: 10313 - DNA, 1107 bp, Muscodor strobelii
  misc_feature: SGI cDNA ID NO. 563268
  misc_feature: Encodes the peptide sequence at SEQ ID NO 10314
atggcgggacgcgtgagacatccaatcgacattaaggcgttagagaagtacatcgttcaaaatgttccagagatcaaagtgccattggaggtgaagcagttcggattcggtcagtcaaatccgacatatcaattgatatcaccagatggcagtcgctatgtcatgcgcaagaagccgccgggaaagctactatccaaagctgctcaccaggtcgagcgcgagtatcgcatcatttcctcgctcgggccaacagaggttccggtacccaaagcatattgtctatgcgaagatacgtcagtcataggaactccgttctatattatggagtttcttgacggccgcatcttcgaagatctctctgtaccaaatgtgtctgctgaagaacgaacaaacttgtatcgcgcagcggtacaaactctcgccaaattccatgctgtcgactacaagaaggttggcttagggtcttacggcaaaaccggaaacttttacgatcgccagttagcgacgtggaaacagatatgcaatgcgcagtccaaagccgtggatgtcgataccaagaaaccagttgggccaattccacattttgaggaaatgctgcagtttttcggagacaaaagtcggcagccgcgggaccgcagctctctagtccacggcgactacaaactcgacaatatggtgttccacaagacagaggcccgcgtgattggaattctagactgggaaatgagcacaatcggtcacccgttgtcagatctcgcgaatctgcttgggccatggtatacacaaagcgcaagtagctcgtataacaacactcaagctttcacgcccggagctacgcctggactcccgacgccggatatgattcttgggtggtataaggaggtcgctggatgggaccctgcggtcgagatgccgtgggctctagcatttaatgcgtttcgggctgccgctatttgtcaaggtatcgcggcgagatatgcaacgaggcaagcgagcagtgcgcaagcccagaaatatgcttcggcttttgtaccactcgggaacctcgcttggtccgtcgtccaacaacagttggctagatcgaagagctctggtgcaaagttgtag

SEQ ID NO: 10314 - protein, 368 aa, Muscodor strobelii
  misc_feature: SGI Peptide ID NO. 563268
  misc_feature (30)..(291): Pfam Id: PF01636 Pfam Desc: Phosphotransferase enzyme family
  misc_feature (1)..(356): NCBI GI: 67515981 Blast Desc: AN0272.2 [Aspergillus nidulans FGSC A4] gi|40746989|gb|EAA66145.1| AN0272.2 [Aspergillus nidulans FGSC A4] gi|259489509|tpe|CBF89839.1| TPA: Phosphotransferase enzyme
  misc_feature (1)..(368): NCBI GI: 189203893 Blast Desc: acyl-CoA dehydrogenase family member 11 [Pyrenophora tritici-repentis Pt-1C-BFP] gi|187985381|gb|EDU50869.1| acyl-CoA dehydrogenase family member 11 [Pyrenophora tritici-repentis
  misc_feature (1)..(365): NCBI GI: 70990378 Blast Desc: Phosphotransferase enzyme family domain protein [Aspergillus fumigatus Af293] gi|66847670|gb|EAL88000.1| Phosphotransferase enzyme family domain protein [Aspergillus
  misc_feature (1)..(362): NCBI GI: 238843472 Blast Desc: acyl-CoA dehydrogenase family member 11 [Microsporum canis CBS 113480]
  misc_feature (1)..(356): NCBI GI: 115388385 Blast Desc: conserved [Aspergillus terreus NIH2624] gi|114195782|gb|EAU37482.1| conserved [Aspergillus terreus NIH2624]
  misc_feature (1)..(356): NCBI GI: 256735325 Blast Desc: [Nectria haematococca mpVI 77-13-4]
  misc_feature (1)..(365): NCBI GI: 119497201 Blast Desc: Phosphotransferase enzyme family domain protein [Neosartorya fischeri NRRL 181] gi|119413525|gb|EAW23466.1| Phosphotransferase enzyme family domain protein [Neosartorya NRRL
  misc_feature (1)..(356): NCBI GI: 46105456 Blast Desc: FG00356.1 [Gibberella zeae PH-1]
  misc_feature (1)..(356): NCBI GI: 226278995 Blast Desc: phosphotransferase enzyme family domain-containing protein [Paracoccidioides brasiliensis Pb01]
  misc_feature (1)..(362): NCBI GI: 169766660 Blast Desc: [Aspergillus oryzae RIB40] gi|83765656|dbj|BAE55799.1| protein product [Aspergillus oryzae]
MAGRVRHPIDIKALEKYIVQNVPEIKVPLEVKQFGFGQSNPTYQLISPDGSRYVMRKKPPGKLLSKAAHQVEREYRIISSLGPTEVPVPKAYCLCEDTSVIGTPFYIMEFLDGRIFEDLSVPNVSAEERTNLYRAAVQTLAKFHAVDYKKVGLGSYGKTGNFYDRQLATWKQICNAQSKAVDVDTKKPVGPIPHFEEMLQFFGDKSRQPRDRSSLVHGDYKLDNMVFHKTEARVIGILDWEMSTIGHPLSDLANLLGPWYTQSASSSYNNTQAFTPGATPGLPTPDMILGWYKEVAGWDPAVEMPWALAFNAFRAAAICQGIAARYATRQASSAQAQKYASAFVPLGNLAWSVVQQQLARSKSSGAKL

SEQ ID NO: 10315 - DNA, 1555 bp, Muscodor strobelii
  misc_feature: SGI EST ID NO. CUFF.24346.0
  misc_feature: Variant of the nucleotide sequence at SEQ ID NO 10313
cacaagtagcatactctgaggccccgcccgggagatgctggagcaccgaggacatagctctgtgcctcggttcttggcgtgttttcttcccgcaaaaagtacgcaatgacaggggtagctgccgcttgttcctttcttgaatctttgatgtgaaagccgtgagcgcaatctagcgagaacttcatttcgattgcatctagagaattcagtaatgctcccttagtgtaaacagcttatcatcgagacgtaaaaaggcaatggcgggacgcgtgagacatccaatcgacattaaggcgttagagaagtacatcgttcaaaatgttccagagatcaaagtgccattggaggtgaagcagttcggattcggtcagtcaaatccgacatatcaattgatatcaccagatggcagtcgctatgtcatgcgcaagaagccgccgggaaagctactatccaaagctgctcaccaggtcgagcgcgagtatcgcatcatttcctcgctcgggccaacagaggttccggtacccaaagcatattgtctatgcgaagatacgtcagtcataggaactccgttctatattatggagtttcttgacggccgcatcttcgaagatctctctgtaccaaatgtgtctgctgaagaacgaacaaacttgtatcgcgcagcggtacaaactctcgccaaattccatgctgtcgactacaagaaggttggcttagggtcttacggcaaaaccggaaacttttacgatcgccagttagcgacgtggaaacagatatgcaatgcgcagtccaaagccgtggatgtcgataccaagaaaccagttgggccaattccacattttgaggaaatgctgcagtttttcggagacaaaagtcggcagccgcgggaccgcagctctctagtccacggcgactacaaactcgacaatatggtgttccacaagacagaggcccgcgtgattggaattctagactgggaaatgagcacaatcggtcacccgttgtcagatctcgcgaatctgcttgggccatggtatacacaaagcgcaagtagctcgtataacaacactcaagctttcacgcccggagctacgcctggactcccgacgccggatatgattcttgggtggtataaggaggtcgctggatgggaccctgcggtcgagatgccgtgggctctagcatttaatgcgtttcgggctgccgctatttgtcaaggtatcgcggcgagatatgcaacgaggcaagcgagcagtgcgcaagcccagaaatatgcttcggcttttgtaccactcgggaacctcgcttggtccgtcgtccaacaacagttggctagatcgaagagctctggtgcaaagttgtagaaggcaagcaaaaattgtcatgctagatatccattgaaattcatgacaacatttctaggcttagaaggcagtcatctaccatgtcgctttaggcatgccactagtgtccactggctgtgctatcggtacttcttcgttgtgtaacgatatagatgatacagacatgatcagaaggtctgtttccatcttta

SEQ ID NO: 10316 - DNA, 1359 bp, Muscodor strobelii
  misc_feature: SGI cDNA ID NO. 563269
  misc_feature: Encodes the peptide sequence at SEQ ID NO 10317
atgaattttgagctccctctcgacttacaagaatacataacgaagctagacaacttcattcaagagcaaatcattccaatacaacacgaagacgacaacaatcgtttcttcgaccatcgccgtgaaccttctcgaacgcaatgggacaacggcggtcttcccacaccggagtgggaggcgttactgactagagctcgcaaggtggcagatgatgcagggttttatcgatttcccctaccacggatttatggcggacacgaacacaaagactcaaacctctggatgtgtgcgctgcgttatcatatggcatcacatccaatttacggcggtggtgtaagtcttgcgaatgacttacagaacgaacacagcgttgtggggaacttcccagatttcttgatgctgtatcactggggaagcgagcagcaaaaagcggaattcataaccgcacgacttgctgggaaattccgaatgacattcggactgacagagatacatcacggcagcgatgccacacatatggacacgcatgcttctggatgtactctcaaaaatggaagcagggggtatagcatcacaggcaataagaaatggcagacgggtgcgcactctgcaactcactttcttgtcttcgctcgcacgtctggcaaggcagggtcgccaaagggtatcacggctttcatcattcctagagacacgccaggcatcacaatcaaatcgtatgaatacactctcaatatgccgacggaccatgcgactatcctcttcgaggatgtgcgtgtaccaacatcagcagtacttggtccgctcgacaatggactcgccattgcgcagaccttcacgcatgagaaccgcattcgtcaggctgcaagctcttgtggcgctgcaaaattctgcatcgacaggtctgttaagtatgcccgagaaagggtggtattcggcaaaccattatctaccaaccaggcaatccagtggccacttgttgagctctccacgcaagccgagatgctacgactcctgatcttgagaacggcgagtgaaatggatgacgtgcagcgccgatatcaaggagacattcagacacctccatgggttgcgattgagaagcagctaggacataagattagtatgtgtaactactacgctaataggctcgcaacacaggccgcagacaacgccatccaggtacacggtggcaacggctatagccgccatgagccatttgaacatatttggcgacacttcagacgatatcgcatcaccgagggaagcgaagaagtacagatgcgaaaggtagcaggttatctgtttgggtacaaatccactggtaaagatgtaaatgaaaagaaatctaagctgtag

SEQ ID NO: 10317 - protein, 452 aa, Muscodor strobelii
  misc_feature: SGI Peptide ID NO. 563269
  misc_feature (158)..(214): Pfam Id: PF02770 Pfam Desc: Acyl-CoA dehydrogenase, middle domain
  misc_feature (270)..(436): Pfam Id: PF00441 Pfam Desc: Acyl-CoA dehydrogenase, C-terminal domain
  misc_feature (285)..(425): Pfam Id: PF08028 Pfam Desc: Acyl-CoA dehydrogenase, C-terminal domain
  misc_feature (285)..(413): Pfam Id: PF08028 Pfam Desc: Acyl-CoA dehydrogenase, C-terminal domain
  misc_feature (1)..(452): NCBI GI: 39969817 Blast Desc: MGG_10518 [Magnaporthe grisea 70-15] gi|145010133|gb|EDJ94789.1| MGG_10518 [Magnaporthe grisea 70-15]
  misc_feature (1)..(452): NCBI GI: 258570563 Blast Desc: acyl-CoA dehydrogenase [Uncinocarpus reesii 1704] gi|237904355|gb|EEP78756.1| acyl-CoA dehydrogenase [Uncinocarpus reesii 1704]
  misc_feature (1)..(452): NCBI GI: 240109778 Blast Desc: electron transport oxidoreductase, [Coccidioides posadasii C735 delta SOWgp]
  misc_feature (1)..(443): NCBI GI: 225679680 Blast Desc: acyl-CoA dehydrogenase [Paracoccidioides brasiliensis Pb03]
  misc_feature (1)..(443): NCBI GI: 226291419 Blast Desc: short-chain specific acyl-CoA dehydrogenase [Paracoccidioides brasiliensis Pb18]
  misc_feature (1)..(443): NCBI GI: 226285938 Blast Desc: acyl-CoA dehydrogenase [Paracoccidioides brasiliensis Pb01]
  misc_feature (1)..(442): NCBI GI: 67526845 Blast Desc: AN3880.2 [Aspergillus nidulans FGSC A4] gi|40739955|gb|EAA59145.1| AN3880.2 [Aspergillus nidulans FGSC A4] gi|259481552|tpe|CBF75178.1| TPA: conserved [Aspergillus FGSC
  misc_feature (1)..(452): NCBI GI: 119184087 Blast Desc: CIMG_06888 [Coccidioides immitis RS]
  misc_feature (1)..(452): NCBI GI: 238490124 Blast Desc: acyl-CoA dehydrogenase family protein [Aspergillus flavus NRRL3357] gi|220696712|gb|EED53053.1| acyl-CoA dehydrogenase family protein [Aspergillus flavus NRRL3357]
  misc_feature (1)..(443): NCBI GI: 255938478 Blast Desc: Pc14g00140 [Penicillium chrysogenum Wisconsin 54-1255] gi|211584630|emb|CAP74155.1| Pc14g00140 [Penicillium chrysogenum Wisconsin 54-1255]
  misc_feature (134)..(438): SWISSPROT Homolog: EC 1.3.99.3 Acyl-CoA dehydrogenase
  misc_feature: Useful for introducing or modulating the production of volatile compounds
  misc_feature: Useful for fungicidal and/or biocontrol applications
MNFELPLDLQEYITKLDNFIQEQIIPIQHEDDNNRFFDHRREPSRTQWDNGGLPTPEWEALLTRARKVADDAGFYRFPLPRIYGGHEHKDSNLWMCALRYHMASHPIYGGGVSLANDLQNEHSVVGNFPDFLMLYHWGSEQQKAEFITARLAGKFRMTFGLTEIHHGSDATHMDTHASGCTLKNGSRGYSITGNKKWQTGAHSATHFLVFARTSGKAGSPKGITAFIIPRDTPGITIKSYEYTLNMPTDHATILFEDVRVPTSAVLGPLDNGLAIAQTFTHENRIRQAASSCGAAKFCIDRSVKYARERVVFGKPLSTNQAIQWPLVELSTQAEMLRLLILRTASEMDDVQRRYQGDIQTPPWVAIEKQLGHKISMCNYYANRLATQAADNAIQVHGGNGYSRHEPFEHIWRHFRRYRITEGSEEVQMRKVAGYLFGYKSTGKDVNEKKSKL

SEQ ID NO: 10318 - DNA, 1764 bp, Muscodor strobelii
  misc_feature: SGI EST ID NO. CUFF.24349.0
  misc_feature: Variant of the nucleotide sequence at SEQ ID NO 10316
ctctcatcataactgtatggtagaatctagataccaccaacattttctagcgaaccggtatcatacactagatcaccgaatattgcgcgaaaataagccttctcaatataattgtctgcaggcgtcacgctgcagcgaaatgaacaagcagctgcagttgcaaactcaattaataacaattggaaaacaaacgacataccgcaatgaattttgagctccctctcgacttacaagaatacataacgaagctagacaacttcattcaagagcaaatcattccaatacaacacgaagacgacaacaatcgtttcttcgaccatcgccgtgaaccttctcgaacgcaatgggacaacggcggtcttcccacaccggagtgggaggcgttactgactagagctcgcaaggtggcagatgatgcagggttttatcgatttcccctaccacggatttatggcggacacgaacacaaagactcaaacctctggatgtgtgcgctgcgttatcatatggcatcacatccaatttacggcggtggtgtaagtcttgcgaatgacttacagaacgaacacagcgttgtggggaacttcccagatttcttgatgctgtatcactggggaagcgagcagcaaaaagcggaattcataaccgcacgacttgctgggaaattccgaatgacattcggactgacagagatacatcacggcagcgatgccacacatatggacacgcatgcttctggatgtactctcaaaaatggaagcagggggtatagcatcacaggcaataagaaatggcagacgggtgcgcactctgcaactcactttcttgtcttcgctcgcacgtctggcaaggcagggtcgccaaagggtatcacggctttcatcattcctagagacacgccaggcatcacaatcaaatcgtatgaatacactctcaatatgccgacggaccatgcgactatcctcttcgaggatgtgcgtgtaccaacatcagcagtacttggtccgctcgacaatggactcgccattgcgcagaccttcacgcatgagaaccgcattcgtcaggctgcaagctcttgtggcgctgcaaaattctgcatcgacaggtctgttaagtatgcccgagaaagggtggtattcggcaaaccattatctaccaaccaggcaatccagtggccacttgttgagctctccacgcaagccgagatgctacgactcctgatcttgagaacggcgagtgaaatggatgacgtgcagcgccgatatcaaggagacattcagacacctccatgggttgcgattgagaagcagctaggacataagattagtatgtgtaactactacgctaataggctcgcaacacaggccgcagacaacgccatccaggtacacggtggcaacggctatagccgccatgagccatttgaacatatttggcgacacttcagacgatatcgcatcaccgagggaagcgaagaagtacagatgcgaaaggtagcaggttatctgtttgggtacaaatccactggtaaagatgtaaatgaaaagaaatctaagctgtaggactagcgactataggagcaatctatccgaaaacctcagtaccacctgtgtcgatgcctggtcctttgatcgacgatgggagttatcgggatgagttaatacaatctcactaggatgtatcatgcaggcaagtctaagtgagatagtatcgaacaaacatgacacagaatagcctggtaatgtcgaagaccttatgttcggg

SEQ ID NO: 10319 - DNA, 1896 bp, Muscodor strobelii
  misc_feature: SGI cDNA ID NO. 563270
  misc_feature: Encodes the peptide sequence at SEQ ID NO 10320
atgttaatcgcgcgatctcgaataaagtacgtggccatcgcaacgtttgtcactgttataactctgtaccttgcgctctattacgccaccgacgccgtcaacttcattcctattccttcaccaccatggagcaaaggaacgtccaaggagtcgggacacacgacgacgccagctaagcccagcaagatcgacgacagtcatcctatctccaatttgatcgaaaatgcctatgccaacttcaccgcgcgtcttacgaaacgatcatggagcttagaacacgctgctgcacgttatcgcgaacgccgtggtcgccaccctcccccaggcttcgacaagtggtttgaagctgcgaagagcaacgatgcgatcattgttgaagacttcttcgaccgaattcaccatgacatcaaccccttctggggagtcgatgcgctttcgatgcggcagcaggcccacgcgttacgccacggcattatccgcgtgcgaaatgggaaaataaaacacttcgatggcgataaccgcgacgtctttcgtggtgaccgactggatctgtgggaaaagcttgtccgagacatgctcccacacttgcccgacctcgatatgcctgtgaatctcctcgacgaaccacggatgcttgtcccatgggaagatgtgaacagctacgtggagaaagagcagaaatcgcgacaactctttgcctcgggcaatgaaatgcctggacagacaagtttcaccgaaatagacgcagatcctcaaccatttgacccagaatggatcgacgacagacatcgaatttggaactatatcaacagcgcatgccctcccgacagtcctgctagacaggcccaacccctcgacacgatcagcgatccgatcgatcccgtattccctaaggaacctataaagttatatacagagaaggggttcatcacgaatttcacaaaatcgcaagatccatgcctgcagcctcatctgcgggggatgcatggcacctttgttgagccattcagcatgagcacagcgaacaaactgttcccattcttcagcggttccaagctgcctacgaacaatgagctcttgattccgggtgctatgtatatgtcagatcagacacgctatacgggagacaacaaacacggcggatcatgggccaagaaaaagaatgggatcatatggagaggcacggcaagcgggggccgtaaccaggaaaacaactggtggcactaccagcgtcatcgctttgtgcagatgctgaatacttctacagtcagtcttgtggaaactggagactctgccgtgagcagaacctttaatctcgcagcagccagcacctacgatcttccagcgcagaaagtgggcgcattggggcaatggattggcgaatggagtgatgttggctttaaccggctggattgctggccagaaaggaaagattggctaggaagactacgcaaggattgcccctataccgatccatactttgcccttgtaggctccgtttcgatgggagagatgtataactcgaagttccttcccgacgttgacggaaactcgtactctgcacgatggcgccctttcctgctgagcacaagttgtccgttgaaggctacggtgtatacagaatggcatgacgatcgcctcatgccgtggctacatttcgtgcccttcgacaatacgtatatggatatatacgccatcatggattacttccttgacggacacgatgcccaggcacaacagatcgctgacgaaggtcgcgagtgggcaaccaaagtgttgcgtagagaagacatgatgttatatacatggagacttcttctcgagtatgcccgggtagttgatcctaagagagatcagctcgggtttgttggcgatttgagggatgtatctgcatag

SEQ ID NO: 10320 - protein, 631 aa, Muscodor strobelii
  misc_feature: SGI Peptide ID NO. 563270
  misc_feature (15)..(626): NCBI GI: 46137519 Blast Desc: FG10275.1 [Gibberella zeae PH-1]
  misc_feature (43)..(627): NCBI GI: 189191866 Blast Desc: conserved [Pyrenophora tritici-repentis Pt-1C-BFP] gi|187973878|gb|EDU41377.1| conserved [Pyrenophora tritici-repentis Pt-1C-BFP]
  misc_feature (66)..(627): NCBI GI: 115401162 Blast Desc: [Aspergillus terreus NIH2624] gi|114190110|gb|EAU31810.1| [Aspergillus terreus NIH2624]
  misc_feature (67)..(630): NCBI GI: 119479795 Blast Desc: NFIA_079710 [Neosartorya fischeri NRRL 181] gi|119408080|gb|EAW18029.1| conserved [Neosartorya fischeri NRRL 181]
  misc_feature (1)..(627): NCBI GI: 255937531 Blast Desc: Pc13g13810 [Penicillium chrysogenum Wisconsin 54-1255] gi|211584412|emb|CAP92450.1| Pc13g13810 [Penicillium chrysogenum Wisconsin 54-1255]
  misc_feature (8)..(626): NCBI GI: 154313380 Blast Desc: BC1G_05387 [Botryotinia fuckeliana B05.10] gi|150849456|gb|EDN24649.1| BC1G_05387 [Botryotinia fuckeliana B05.10]
  misc_feature (56)..(626): NCBI GI: 239612127 Blast Desc: capsular associated protein [Ajellomyces dermatitidis ER-3]
  misc_feature (7)..(626): NCBI GI: 169784580 Blast Desc: [Aspergillus oryzae RIB40] gi|83775498|dbj|BAE65618.1| protein product [Aspergillus oryzae]
  misc_feature (7)..(626): NCBI GI: 238508245 Blast Desc: endoplasmic reticulum-resident kdel protein, [Aspergillus flavus NRRL3357] gi|220688840|gb|EED45192.1| endoplasmic reticulum-resident kdel protein, [Aspergillus flavus
  misc_feature (5)..(627): NCBI GI: 256729025 Blast Desc: NECHADRAFT_100333 [Nectria haematococca mpVI 77-13-4]
MLIARSRIKYVAIATFVTVITLYLALYYATDAVNFIPIPSPPWSKGTSKESGHTTTPAKPSKIDDSHPISNLIENAYANFTARLTKRSWSLEHAAARYRERRGRHPPPGFDKWFEAAKSNDAIIVEDFFDRIHHDINPFWGVDALSMRQQAHALRHGIIRVRNGKIKHFDGDNRDVFRGDRLDLWEKLVRDMLPHLPDLDMPVNLLDEPRMLVPWEDVNSYVEKEQKSRQLFASGNEMPGQTSFTEIDADPQPFDPEWIDDRHRIWNYINSACPPDSPARQAQPLDTISDPIDPVFPKEPIKLYTEKGFITNFTKSQDPCLQPHLRGMHGTFVEPFSMSTANKLFPFFSGSKLPTNNELLIPGAMYMSDQTRYTGDNKHGGSWAKKKNGIIWRGTASGGRNQENNWWHYQRHRFVQMLNTSTVSLVETGDSAVSRTFNLAAASTYDLPAQKVGALGQWIGEWSDVGFNRLDCWPERKDWLGRLRKDCPYTDPYFALVGSVSMGEMYNSKFLPDVDGNSYSARWRPFLLSTSCPLKATVYTEWHDDRLMPWLHFVPFDNTYMDIYAIMDYFLDGHDAQAQQIADEGREWATKVLRREDMMLYTWRLLLEYARVVDPKRDQLGFVGDLRDVSA

SEQ ID NO: 10321 - DNA, 2846 bp, Muscodor strobelii
  misc_feature: SGI EST ID NO. CUFF.24352.0
  misc_feature: Variant of the nucleotide sequence at SEQ ID NO 10319
cgcatatattccattctattactcgaagactacctaccttagttatgttaactctcataatacactcacgtagtctgtgacaccgcatcattgctattgattgtttccgaacgatttggcttgacgcagcctatgttcgagttttgctggtcgctataggtccgtgacctacgtatcgtgttacgagttcaggactgttgttcgaataatggtcgaagaatctctcaaccacaatgcgaatcaaaatggacgcaacgcgcatgaaagacgcgttgaagaataccgaaaacgagcgacggtggctacacatcgcgacaaataagtctaccgtatatccatcatagcagctctggatgtcaaatgcatacctaactggggcgtcgggggactgcactggcatacaggctgccgacagcctataaacgtcgacaatggcagcactcgtcgattccactggtcggcatcacagccaggcgggctagccttagcactctttcatatttggctgatcctttgcgccaaggaagggatttcgcgacatggaaaccttttcggccattgagagtgcctaataggattagagccaaccttggcttctaggctgccactgaattgtgggatacggcgtgtaggtgcagataacacatggttccaagtcgtgagtgctgcgccgttgataccgcctcagcccctgggactagtgacccctgcttgactcaatcttctggcttgaatctcgattcccgagtcttgacaatcgctggacggagatattcaaacctaatgcattgtcaaattctaaaacgtcctccgggatgtggaagtgagacatgttaatcgcgcgatctcgaataaagtacgtggccatcgcaacgtttgtcactgttataactctgtaccttgcgctctattacgccaccgacgccgtcaacttcattcctattccttcaccaccatggagcaaaggaacgtccaaggagtcgggacacacgacgacgccagctaagcccagcaagatcgacgacagtcatcctatctccaatttgatcgaaaatgcctatgccaacttcaccgcgcgtcttacgaaacgatcatggagcttagaacacgctgctgcacgttatcgcgaacgccgtggtcgccaccctcccccaggcttcgacaagtggtttgaagctgcgaagagcaacgatgcgatcattgttgaagacttcttcgaccgaattcaccatgacatcaaccccttctggggagtcgatgcgctttcgatgcggcagcaggcccacgcgttacgccacggcattatccgcgtgcgaaatgggaaaataaaacacttcgatggcgataaccgcgacgtctttcgtggtgaccgactggatctgtgggaaaagcttgtccgagacatgctcccacacttgcccgacctcgatatgcctgtgaatctcctcgacgaaccacggatgcttgtcccatgggaagatgtgaacagctacgtggagaaagagcagaaatcgcgacaactctttgcctcgggcaatgaaatgcctggacagacaagtttcaccgaaatagacgcagatcctcaaccatttgacccagaatggatcgacgacagacatcgaatttggaactatatcaacagcgcatgccctcccgacagtcctgctagacaggcccaacccctcgacacgatcagcgatccgatcgatcccgtattccctaaggaacctataaagttatatacagagaaggggttcatcacgaatttcacaaaatcgcaagatccatgcctgcagcctcatctgcgggggatgcatggcacctttgttgagccattcagcatgagcacagcgaacaaactgttcccattcttcagcggttccaagctgcctacgaacaatgagctcttgattccgggtgctatgtatatgtcagatcagacacgctatacgggagacaacaaacacggcggatcatgggccaagaaaaagaatgggatcatatggagaggcacggcaagcgggggccgtaaccaggaaaacaactggtggcactaccagcgtcatcgctttgtgcagatgctgaatacttctacagtcagtcttgtggaaactggagactctgccgtgagcagaacctttaatctcgcagcagccagcacctacgatcttccagcgcagaaagtgggcgcattggggcaatggattggcgaatggagtgatgttggctttaaccggctggattgctggccagaaaggaaagattggctaggaagactacgcaaggattgcccctataccgatccatactttgcccttgtaggctccgtttcgatgggagagatgtataactcgaagttccttcccgacgttgacggaaactcgtactctgcacgatggcgccctttcctgctgagcacaagttgtccgttgaaggctacggtgtatacagaatggcatgacgatcgcctcatgccgtggctacatttcgtgcccttcgacaatacgtatatggatatatacgccatcatggattacttccttgacggacacgatgcccaggcacaacagatcgctgacgaaggtcgcgagtgggcaaccaaagtgttgcgtagagaagacatgatgttatatacatggagacttcttctcgagtatgcccgggtagttgatcctaagagagatcagctcgggtttgttggcgatttgagggatgtatctgcatagtatatgaaagacttgtgccgtcggccaagaaaagtgcagggcatcacgcggttgttatacgtcgtacactatacttaataatagaaagactcgatgaatgaaacgaacacgatattgagg

SEQ ID NO: 10322 - DNA, 1089 bp, Muscodor strobelii
  misc_feature: SGI cDNA ID NO. 563271
  misc_feature: Encodes the peptide sequence at SEQ ID NO 10323
atgtcttccctactccgattcctctcgcacgcggctcttttcgtcgttgcagcagcagcaccttcgttgaacctcagatctgttcaaaatggtacctctacgactaccaagagtcttgtgacgactgacgggtatacctatgtttatgactacgccgcgcctaagcattcctctctgcccacttttcttctcatccacggctacccatctggacgccacgattggcatcaccaagtcccagctctcatcgaagctggatatggtgtgttagctccagattgcttggggtacggagacagctccaagcctaccgcggtcgaggcgtacaacttgaaagatattgcgggacacatgacacaactcctcgacgcagagaatctagactccgttgtaggtgtcggtcatgactggggatctgcaattctgggaagaagcgccgtatactatcccgatcgtttcagcaagcttgctttcctgtctttcggatattcgccaccgggttatctgctggatattgacggtatcaatgagtcgttcctgaaaagtgacggatacactcctcttgggtattggtacttcttcaacacgtgggatgctaccgacatcattagtgcgaatgtgagtactcctaatccgctcgagtcttacttccacctcctctaccacacggattcgctagcttggggagaggactttgcccagatcgcagcagctcgtgcttggcttggctccaacacgactaccgcactaccatcgtggatatctcccgaggaaaaggcatcatggttgcaaacctatagccaaccagatatagtcgtggcaactatcaactattacagagcgctattggggggtgtacaagcagccgacgaagcagttctcacggatgaacagcgcacgctcagagtacctattatcactatcggtggctctcaagatcttgtcacgcgggttgatgaattacctagtagcgaggcgtgggctagtgctgggtatgagcagcatgtcgtagagtcgggacattgggtcatgttggagcagcctgatgaggtcacgcgaattctcaaagagttcgccggttcgaactag

SEQ ID NO: 10323 - protein, 362 aa, Muscodor strobelii
  misc_feature: SGI Peptide ID NO. 563271
  misc_feature (87)..(357): Pfam Id: PF00561 Pfam Desc: alpha/beta hydrolase fold
  misc_feature (32)..(358): NCBI GI: 46139363 Blast Desc: FG11196.1 [Gibberella zeae PH-1]
  misc_feature (35)..(361): NCBI GI: 212538743 Blast Desc: epoxide hydrolase, [Penicillium marneffei ATCC 18224] gi|210069269|gb|EEA23360.1| epoxide hydrolase, [Penicillium marneffei ATCC 18224]
  misc_feature (34)..(361): NCBI GI: 238844169 Blast Desc: conserved [Microsporum canis CBS 113480]
  misc_feature (37)..(359): NCBI GI: 145231136 Blast Desc: An01g14420 [Aspergillus niger] gi|134055961|emb|CAK37437.1| protein product [Aspergillus niger]
  misc_feature (36)..(359): NCBI GI: 242805743 Blast Desc: epoxide hydrolase, [Talaromyces stipitatus ATCC 10500] gi|218715220|gb|EED14642.1| epoxide hydrolase, [Talaromyces stipitatus ATCC 10500]
  misc_feature (37)..(358): NCBI GI: 67538026 Blast Desc: AN5183.2 [Aspergillus nidulans FGSC A4] gi|40743174|gb|EAA62364.1| AN5183.2 [Aspergillus nidulans FGSC A4] gi|259484639|tpe|CBF81033.1| TPA: epoxide hydrolase, nidulans
  misc_feature (45)..(358): NCBI GI: 121716094 Blast Desc: epoxide hydrolase, [Aspergillus clavatus NRRL 1] gi|119403813|gb|EAW14230.1| epoxide hydrolase, [Aspergillus clavatus NRRL 1]
  misc_feature (38)..(358): NCBI GI: 119481839 Blast Desc: epoxide hydrolase, [Neosartorya fischeri NRRL 181] gi|119409102|gb|EAW19051.1| epoxide hydrolase, [Neosartorya fischeri NRRL 181]
  misc_feature (35)..(358): NCBI GI: 156051009 Blast Desc: SS1G_08093 [Sclerotinia sclerotiorum 1980] gi|154692492|gb|EDN92230.1| SS1G_08093 [Sclerotinia sclerotiorum 1980]
  misc_feature (36)..(362): NCBI GI: 154296723 Blast Desc: BC1G_12389 [Botryotinia fuckeliana B05.10] gi|150843228|gb|EDN18421.1| BC1G_12389 [Botryotinia fuckeliana B05.10]
  misc_feature (60)..(362): SWISSPROT Homolog: EC 3.3.2.10 Soluble epoxide hydrolase
MSSLLRFLSHAALFVVAAAAPSLNLRSVQNGTSTTTKSLVTTDGYTYVYDYAAPKHSSLPTFLLIHGYPSGRHDWHHQVPALIEAGYGVLAPDCLGYGDSSKPTAVEAYNLKDIAGHMTQLLDAENLDSVVGVGHDWGSAILGRSAVYYPDRFSKLAFLSFGYSPPGYLLDIDGINESFLKSDGYTPLGYWYFFNTWDATDIISANVSTPNPLESYFHLLYHTDSLAWGEDFAQIAAARAWLGSNTTTALPSWISPEEKASWLQTYSQPDIVVATINYYRALLGGVQAADEAVLTDEQRTLRVPIITIGGSQDLVTRVDELPSSEAWASAGYEQHVVESGHWVMLEQPDEVTRILKEFAGSN

SEQ ID NO: 10324 - DNA, 2391 bp, Muscodor strobelii
  misc_feature: SGI cDNA ID NO. 563272
  misc_feature: Encodes the peptide sequence at SEQ ID NO 10325
atgacaggcagtcaagtcggccgtggccttgccagggctgttggtatcgacgttgatcaacgatccaagacagagccatctgctctactgcaatcagctgctgcaagtctcgaagcgcgatctattgacagctactacgagaccgagcccactatcaaagagtatctccgagagcatgcaccgactttgggaaaagtccagcggtatttccggagtctgttcccattcttaggatggatctttcactacaacactacgtggctcattggggacttcattgccggagtcactgtaggcttcgtggtcgtgccacagggaatggcatacgccttgcttgctgggttgaaacctgaatatggcctttacacgtccttcgtcggattcattctctactttctctttgcgacatcgaaagatatcacaatcggtacagtggctgtaatgtcaactctttgcggaagaattgtcactcgtgtcactggagagcatcccgaatttgcacccgaagagatagctcgtggcctcagtgtcatcgctggctctattctactcttcatcggactagtgcgcctgggatggctcgtcgagttcatcccccttgtcggtatctgttcgttcatgacaggcgctgcattcagcattggcgcaggacaagttccgaagctgctaggtgtcagcggtgtgaacactcgtgatagtacctatctcgttattatcaacacattgcgcgcccttcctacagcgaaaatcgatgctgcgcttggtcttacggcgttgttcctgttatatgccatcagatacttctgcaacttcatggccaagcgacagccatcccgtcaaaagacatggttctttgttagcactctacgattggcctttgtcatcttgctatacacactgataagttggctgtcgaatcgcggtatcacagactctaaaaaagccaagttcgcaatcctcgggactgttccgagtggcttccgtgttcatggcgctcccaagatcaccaccgaactcatctcggcgtttgctcctgatctaccagcaaccatctttgtgttgatcatcgagcatatcgctatctcgaagtcatttggccgcattaataactataccatcaatccttcacaggaactcgtcgcagttgggttcacgaacgtcttcggcccgttcttgggtgcctatcccgccactggtagtttctcgcgaacggccatcaaagcaaaagctggagtccgcacaccactggccggtatcttcactgctattctcgttatcctagcactgtacgctttgaccaaagtgtttttctacatcccgatggcgacgctctcaggtctcatcattcacgccgttggagatctactaactcctccctcaaccgtgtactcattctggcaagtttcgccgattgaggtttttctcttcttcgcgacagtcctcatcatgatctttaccgatctcgagactggtatctacttcacagtcgctgcatcggcagcattgcttttggtccgaattgcaaaagctcacggaaatttcctggggacagtagagatgcatcgtgtcacgggcgagagcgagtctccgctcgagccagatgctacaacaggaggatcgaaacgcgaagcgttccttccgctcaaccgtaaagttggcgccgcaaacatcaacgtcaatatccgcgaacctcatcccggtgtcttcatctaccgctttagtgaagggtttaactacaccaataccgcacactacatggatgagttggttgcatacattcaatcccacactcgaccaaatactttaaacagatatcaaaagctaggtgatcgaccttggaacaatcccggaccgagacggggtcagagtgtcgacgtcgcagatgagcgtcccgtattccgtgctatcattcttgatttcgcagctgtgaacaatgtcgatgtgacatcaattcaaggtctcattgatacacgcacacaactagaccaccatacctaccctgaacgcgccgagtggcacatcgcagatgtgaacaaccgctggacacggcgcgctttggcagcatccgggttcggatttccacgtgcggcttctgctgagggcagttcatggcacccgatattcagcgttgctgcgactggcccacagacatcacctgagaaggcgaacgaagacgcctcaagagtcgttgtgaaggacatcgaagccgggttagatcgcgcttcctcatcttctgccagtgatggtgtgaggcagagcgagacgtcatcagtaagattggcagcactgcagggtgtcaacagaccattcttccatatcgacgttgctgctgctgttgaaagcgcaatcgccgatattgagggagtggttgctcatgagaagctaggatag

SEQ ID NO: 10325 - protein, 796 aa, Muscodor strobelii
  misc_feature: SGI Peptide ID NO. 563272
  misc_feature (186)..(507): Pfam Id: PF00916 Pfam Desc: Sulfate transporter family
  misc_feature (556)..(661): Pfam Id: PF01740 Pfam Desc: STAS domain
  misc_feature (1)..(787): NCBI GI: 238845584 Blast Desc: sulfate permease II [Microsporum canis CBS 113480]
  misc_feature (1)..(787): NCBI GI: 240105564 Blast Desc: sulfate permease, [Coccidioides posadasii C735 delta SOWgp]
  misc_feature (1)..(787): NCBI GI: 119193797 Blast Desc: CIMG_01273 [Coccidioides immitis RS]
  misc_feature (7)..(796): NCBI GI: 189197647 Blast Desc: sulfate permease 2 [Pyrenophora tritici-repentis Pt-1C-BFP] gi|187981109|gb|EDU47735.1| sulfate permease 2 [Pyrenophora tritici-repentis Pt-1C-BFP]
  misc_feature (1)..(795): NCBI GI: 258575015 Blast Desc: sulfate permease II [Uncinocarpus reesii 1704] gi|237901955|gb|EEP76356.1| sulfate permease II [Uncinocarpus reesii 1704]
  misc_feature (7)..(787): NCBI GI: 145607273 Blast Desc: MGG_04126 [Magnaporthe grisea 70-15] gi|145014860|gb|EDJ99428.1| MGG_04126 [Magnaporthe grisea 70-15]
  misc_feature (45)..(787): NCBI GI: 171683461 Blast Desc: protein product [Podospora anserina] gi|170941690|emb|CAP67344.1| protein product [Podospora anserina]
  misc_feature (43)..(788): NCBI GI: 116194686 Blast Desc: CHGG_03941 [Chaetomium globosum CBS 148.51] gi|88179854|gb|EAQ87322.1| CHGG_03941 [Chaetomium globosum CBS 148.51]
  misc_feature (107)..(796): NCBI GI: 169622131 Blast Desc: SNOG_14281 [Phaeosphaeria nodorum SN15] gi|160704705|gb|EAT78518.2| SNOG_14281 [Phaeosphaeria nodorum SN15]
  misc_feature (2)..(781): NCBI GI: 239609340 Blast Desc: sulfate permease II [Ajellomyces dermatitidis ER-3]
MTGSQVGRGLARAVGIDVDQRSKTEPSALLQSAAASLEARSIDSYYETEPTIKEYLREHAPTLGKVQRYFRSLFPFLGWIFHYNTTWLIGDFIAGVTVGFVVVPQGMAYALLAGLKPEYGLYTSFVGFILYFLFATSKDITIGTVAVMSTLCGRIVTRVTGEHPEFAPEEIARGLSVIAGSILLFIGLVRLGWLVEFIPLVGICSFMTGAAFSIGAGQVPKLLGVSGVNTRDSTYLVIINTLRALPTAKIDAALGLTALFLLYAIRYFCNFMAKRQPSRQKTWFFVSTLRLAFVILLYTLISWLSNRGITDSKKAKFAILGTVPSGFRVHGAPKITTELISAFAPDLPATIFVLIIEHIAISKSFGRINNYTINPSQELVAVGFTNVFGPFLGAYPATGSFSRTAIKAKAGVRTPLAGIFTAILVILALYALTKVFFYIPMATLSGLIIHAVGDLLTPPSTVYSFWQVSPIEVFLFFATVLIMIFTDLETGIYFTVAASAALLLVRIAKAHGNFLGTVEMHRVTGESESPLEPDATTGGSKREAFLPLNRKVGAANINVNIREPHPGVFIYRFSEGFNYTNTAHYMDELVAYIQSHTRPNTLNRYQKLGDRPWNNPGPRRGQSVDVADERPVFRAIILDFAAVNNVDVTSIQGLIDTRTQLDHHTYPERAEWHIADVNNRWTRRALAASGFGFPRAASAEGSSWHPIFSVAATGPQTSPEKANEDASRVVVKDIEAGLDRASSSSASDGVRQSETSSVRLAALQGVNRPFFHIDVAAAVESAIADIEGVVAHEKLG

SEQ ID NO: 10326 - DNA, 254 bp, Muscodor strobelii
  misc_feature: SGI EST ID NO. CUFF.24364.0
  misc_feature: Variant of the nucleotide sequence at SEQ ID NO 10324
gtcgaatcgcggtatcacagactctaaaaaagccaagttcgcaatcctcgggactgttccgagtggcttccgtgttcatggcgctcccaagatcaccaccgaactcatctcggcgtttgctcctgatctaccagcaaccatctttgtgttgatcatcgagcatatcgctatctcgaagtcatttggccgcattaataactataccatcaatccttcacaggaactcgtcgcagttgggttcacgaacgtcttcg

SEQ ID NO: 10327 - DNA, 2319 bp, Muscodor strobelii
  misc_feature: SGI cDNA ID NO. 563273
  misc_feature: Encodes the peptide sequence at SEQ ID NO 10328
atgactgctgtccatccgcgtgtgccgggccctcaggcccaaaatcgaccgcacaaacgccagaattcgacacccgcaatattcgacacacagcaaaatgtccctggcctgccaaacagccaattacatagacgattgcatgctcaacagcgagctaaagcgcacagacgaggcatgagccacgacgttcgcttgcaaatgcagtcgtctccgacgcagcaggggtttcccatggtaagaaccgctactaacaacacaggatcaacaagtacatcacagcaagtgatgacagaagcgcagcagcaaagcatagcacgcccgggcccccagcagacttacgcgaacttgacaccaggcgagaactactcacctcaaccgactcctctgatgccaaacttcgagcatcagcaatattttagcgatgtgattgtttctaatgaaatgaacgcactaagttatggcaatggacttgccacacctgacctttccgctttcaacgcatccatacagcctacgcagaacttccaaagcttcccacaaagtcccataacgtccactggttggatgccggagagtgaagacatgggttcaaggaggaattcgcgacgtatcagtaatggtattgcggatcgattcaacaagtttgagaacatgggccgtgagccagtccaaagaccactgacacccccgaaacagaatgaagcagggtatctaccaattactcctagtcagacaccgcatggaagaatccggttttctgaaggctacgacgagacgaatgaggagacagtgcgaccaagtagaaaaccagcaagatctcagacgacatttgacgcaatgcgacatgccgctgagacgacaacaatgagctctggtcaacttcaacgctcttacacgatgccaactacgggatccttcgacccgtctgcaatgactgctcaagagtgggcatgccttggtcagacccctcccggcggactacacatcaagactgactgcggcgacttcccgtctccttcattcccgctaagcgcctcgtctggtttctctcgccccatgtctcccgcaactccacaattggccgacaacaacagtgtattcgacttctcgtcgcctatcagacctcataacacgccgataagcgccttcccagatctcggacaaggtcaggctacaatcagagggccacgatcatcactacacaggcgcggagaatcaaatgctagccttgcaagtgcccttagtatcgccgacatcgatatcgagcagaccagaacagaaacaggtatcaccttggaagagatccaacagtatattcgaggacccgatcccaaagacaataagttcatctgcacattcgagggatgtaacaaaaaattcggccgtaaggagaacatcaagtcccacgtgcaaacccatttgaatgatcgacaatatcagtgccctgagtgtaagaaatgctttgtacgccagcatgatcttaagcgccacgccaagatccacacgggtatcaagccgtacccatgcgaatgtggaaacagatttgcacgtcacgacgccctaacaagacacaagcaaagaggcatgtgcgttggcgctttcgacggcatagtcaagaagcccgttaagcgcgggcgaccacgaaaggcccggccagatgatgatgagcgcatggataagtcagctcgcacacgcaggaggaacaagacgacaaactcagtgtcatcaatatcgtcgcattctggcatgtccgacagctcagccgtcaactcaccagaacacatggaggacttggatatgctagacgacatcatggatgtatcacttggcggcacaacaatgaatcctggaagccttcaagcagcctcgtcttccacggcgccgatgccgattcttgccgttgaccctccaatgagcgtgcattcacctgagagcacccactcctgtgtctcagcattctctcacatgtccatgcatccttcgccacatgcggcagttgagcaagcttcccagcacgccagtccagagaatcccgttgttgcaagcccagcctgtgagctgcccgacttgtcacacgacagctcacctccatcgacgggcaactactacgacacagacccgaactccagcggccttgatcttttgatcacgagcgcaggcgagacatcaggcatgacgagtatgatcggcctaggcgtgaatgacattggagagtacgattcccgtttgttgatgctggatgccgccgatgctaaattcgacagctcatacgacccggacatgttcctcaacaacgagacttttctcttcggagaatga

SEQ ID NO: 10328 - protein, 772 aa, Muscodor strobelii
  misc_feature: SGI Peptide ID NO. 563273
  misc_feature (479)..(501): Pfam Id: PF00096 Pfam Desc: Zinc finger, C2H2 type
  misc_feature (449)..(473): Pfam Id: PF00096 Pfam Desc: Zinc finger, C2H2 type
  misc_feature (3)..(770): NCBI GI: 46123867 Blast Desc: FG06311.1 [Gibberella zeae PH-1]
  misc_feature (13)..(771): NCBI GI: 256732465 Blast Desc: NECHADRAFT_38204 [Nectria haematococca mpVI 77-13-4]
  misc_feature (123)..(735): NCBI GI: 261354558 Blast Desc: metallothionein expression activator [Verticillium albo-atrum VaMs.102]
  misc_feature (14)..(730): NCBI GI: 85092155 Blast Desc: NCU06907 [Neurospora crassa OR74A] gi|28920657|gb|EAA30018.1| [Neurospora crassa OR74A]
  misc_feature (207)..(603): NCBI GI: 156039611 Blast Desc: SS1G_11942 [Sclerotinia sclerotiorum 1980] gi|154697679|gb|EDN97417.1| SS1G_11942 [Sclerotinia sclerotiorum 1980]
  misc_feature (208)..(603): NCBI GI: 154301340 Blast Desc: BC1G_10340 [Botryotinia fuckeliana B05.10] gi|150856241|gb|EDN31433.1| BC1G_10340 [Botryotinia fuckeliana B05.10]
  misc_feature (401)..(609): NCBI GI: 171679000 Blast Desc: protein product [Podospora anserina] gi|170937571|emb|CAP62228.1| protein product [Podospora anserina]
  misc_feature (413)..(601): NCBI GI: 240108156 Blast Desc: C2H2 type zinc finger containing protein [Coccidioides posadasii C735 delta SOWgp]
  misc_feature (413)..(601): NCBI GI: 119187545 Blast Desc: CIMG_03820 [Coccidioides immitis RS]
  misc_feature (182)..(565): NCBI GI: 225555888 Blast Desc: conserved [Ajellomyces capsulatus G186AR]
MTAVHPRVPGPQAQNRPHKRQNSTPAIFDTQQNVPGLPNSQLHRRLHAQQRAKAHRRGMSHDVRLQMQSSPTQQGFPMVRTATNNTGSTSTSQQVMTEAQQQSIARPGPQQTYANLTPGENYSPQPTPLMPNFEHQQYFSDVIVSNEMNALSYGNGLATPDLSAFNASIQPTQNFQSFPQSPITSTGWMPESEDMGSRRNSRRISNGIADRFNKFENMGREPVQRPLTPPKQNEAGYLPITPSQTPHGRIRFSEGYDETNEETVRPSRKPARSQTTFDAMRHAAETTTMSSGQLQRSYTMPTTGSFDPSAMTAQEWACLGQTPPGGLHIKTDCGDFPSPSFPLSASSGFSRPMSPATPQLADNNSVFDFSSPIRPHNTPISAFPDLGQGQATIRGPRSSLHRRGESNASLASALSIADIDIEQTRTETGITLEEIQQYIRGPDPKDNKFICTFEGCNKKFGRKENIKSHVQTHLNDRQYQCPECKKCFVRQHDLKRHAKIHTGIKPYPCECGNRFARHDALTRHKQRGMCVGAFDGIVKKPVKRGRPRKARPDDDERMDKSARTRRRNKTTNSVSSISSHSGMSDSSAVNSPEHMEDLDMLDDIMDVSLGGTTMNPGSLQAASSSTAPMPILAVDPPMSVHSPESTHSCVSAFSHMSMHPSPHAAVEQASQHASPENPVVASPACELPDLSHDSSPPSTGNYYDTDPNSSGLDLLITSAGETSGMTSMIGLGVNDIGEYDSRLLMLDAADAKFDSSYDPDMFLNNETFLFGE

SEQ ID NO: 10329 - DNA, 3120 bp, Muscodor strobelii
  misc_feature: SGI EST ID NO. CUFF.24538.0
  misc_feature: Variant of the nucleotide sequence at SEQ ID NO 10327
ttccgcttcctttacacctccccatatccgaacccatcaagtaatccccaaagtccaaatctcagttatcgtgtctactgctgcctgagtaggcaaaacactgacatagtctgaggaagacgctacttatacacatctagttctcgtctgtcaagttcgctgctgctgctgaggaggtaaaacgaacttcgttgcccggctaggctcgcttgcgcgctgcgtgagttacggacccaattgatagtcctcattcgacaaacaaactctatcgacaacgacaactctgtccggactcgtctttcatcatgactgctgtccatccgcgtgtgccgggccctcaggcccaaaatcgaccgcacaaacgccagaattcgacacccgcaatattcgacacacagcaaaatgtccctggcctgccaaacagccaattacatagacgattgcatgctcaacagcgagctaaagcgcacagacgaggcatgagccacgacgttcgcttgcaaatgcagtcgtctccgacgcagcaggggtttcccatggtaagaaccgctactaacaacacaggatcaacaagtacatcacagcaagtgatgacagaagcgcagcagcaaagcatagcacgcccgggcccccagcagacttacgcgaacttgacaccaggcgagaactactcacctcaaccgactcctctgatgccaaacttcgagcatcagcaatattttagcgatgtgattgtttctaatgaaatgaacgcactaagttatggcaatggacttgccacacctgacctttccgctttcaacgcatccatacagcctacgcagaacttccaaagcttcccacaaagtcccataacgtccactggttggatgccggagagtgaagacatgggttcaaggaggaattcgcgacgtatcagtaatggtattgcggatcgattcaacaagtttgagaacatgggccgtgagccagtccaaagaccactgacacccccgaaacagaatgaagcagggtatctaccaattactcctagtcagacaccgcatggaagaatccggttttctgaaggctacgacgagacgaatgaggagacagtgcgaccaagtagaaaaccagcaagatctcagacgacatttgacgcaatgcgacatgccgctgagacgacaacaatgagctctggtcaacttcaacgctcttacacgatgccaactacgggatccttcgacccgtctgcaatgactgctcaagagtgggcatgccttggtcagacccctcccggcggactacacatcaagactgactgcggcgacttcccgtctccttcattcccgctaagcgcctcgtctggtttctctcgccccatgtctcccgcaactccacaattggccgacaacaacagtgtattcgacttctcgtcgcctatcagacctcataacacgccgataagcgccttcccagatctcggacaaggtcaggctacaatcagagggccacgatcatcactacacaggcgcggagaatcaaatgctagccttgcaagtgcccttagtatcgccgacatcgatatcgagcagaccagaacagaaacaggtatcaccttggaagagatccaacagtatattcgaggacccgatcccaaagacaataagttcatctgcacattcgagggatgtaacaaaaaattcggccgtaaggagaacatcaagtcccacgtgcaaacccatttgaatgatcgacaatatcagtgccctgagtgtaagaaatgctttgtacgccagcatgatcttaagcgccacgccaagatccacacgggtatcaagccgtacccatgcgaatgtggaaacagatttgcacgtcacgacgccctaacaagacacaagcaaagaggcatgtgcgttggcgctttcgacggcatagtcaagaagcccgttaagcgcgggcgaccacgaaaggcccggccagatgatgatgagcgcatggataagtcagctcgcacacgcaggaggaacaagacgacaaactcagtgtcatcaatatcgtcgcattctggcatgtccgacagctcagccgtcaactcaccagaacacatggaggacttggatatgctagacgacatcatggatgtatcacttggcggcacaacaatgaatcctggaagccttcaagcagcctcgtcttccacggcgccgatgccgattcttgccgttgaccctccaatgagcgtgcattcacctgagagcacccactcctgtgtctcagcattctctcacatgtccatgcatccttcgccacatgcggcagttgagcaagcttcccagcacgccagtccagagaatcccgttgttgcaagcccagcctgtgagctgcccgacttgtcacacgacagctcacctccatcgacgggcaactactacgacacagacccgaactccagcggccttgatcttttgatcacgagcgcaggcgagacatcaggcatgacgagtatgatcggcctaggcgtgaatgacattggagagtacgattcccgtttgttgatgctggatgccgccgatgctaaattcgacagctcatacgacccggacatgttcctcaacaacgagacttttctcttcggagaatgagggacttcaacgcaaccttactcaatccgcttcattatgagctcgttctattttgcttcgattctgtcgccaatttcagcttctgcgtcacagacgcattgtattcgtactttgaccacagcgctgggcgtctggcgcccttcgccttgagtttgattgcccttttgttgttaatagacgggtacgatgcgacatgactggttacgagattatagtggtaccgaaaattggggttttcacgacgattatgcaggatgtaataatctgggaacggcgatctgtgcctgtcaggtcgagattgatgtatgatagtgaatttcgatgtatggggtgatttgggttgtgggtcaggcgttttgtgtgtcaattgagatgtggtcctgaccaatgtcttattgactcggaattggagtcggagtcgggttgatgttgatatagagaaggtggatgcggtgattattgaccacaggaaataaatggtattatactctgcgcg

SEQ ID NO: 10330 - DNA, 474 bp, Muscodor strobelii
  misc_feature: SGI cDNA ID NO. 563274
  misc_feature: Encodes the peptide sequence at SEQ ID NO 10331
atgcgtgcgcactcagccctcctctcgtgtgcaccgtggcatgctgcgtttccagccccgaaaatcgccgagccggtatcgcttacccgagaagaggttttgcacaagctgcgtttcgatactaccaatgagttcgtgattgtcgacctgcgtcgaaatgatttcgagggaggcacaattcgaggggcaatcaatcttccagctcagacgctatacccgaccattcctacactgtatgctctgtttaaggcggctgggacgaaatacattatttggtattgcaacgcttgttctcgttccagccgcggggctcgtgccgctggctggctgagcgactatattcaagagaaaggggacaacgagatgcaaagcgtgacgctccaaggtggaatcaagggatgggtgacagctggggacagcttcacagacctgatggatggctatgacgctgcgcattgggctaacgacatttga

SEQ ID NO: 10331 - protein, 157 aa, Muscodor strobelii
  misc_feature: SGI Peptide ID NO. 563274
  misc_feature (9)..(153): NCBI GI: 39945828 Blast Desc: MGG_08034 [Magnaporthe grisea 70-15] gi|145019269|gb|EDK03497.1| MGG_08034 [Magnaporthe grisea 70-15]
  misc_feature (11)..(155): NCBI GI: 169767582 Blast Desc: [Aspergillus oryzae RIB40] gi|83766117|dbj|BAE56260.1| protein product [Aspergillus oryzae]
  misc_feature (11)..(155): NCBI GI: 238484491 Blast Desc: arsenate reductase (Arc2), [Aspergillus flavus NRRL3357] gi|220701534|gb|EED57872.1| arsenate reductase (Arc2), [Aspergillus flavus NRRL3357]
  misc_feature (12)..(153): NCBI GI: 256727245 Blast Desc: NECHADRAFT_19682 [Nectria haematococca mpVI 77-13-4]
  misc_feature (12)..(155): NCBI GI: 255936507 Blast Desc: Pc13g08550 [Penicillium chrysogenum Wisconsin 54-1255] gi|211583900|emb|CAP91924.1| Pc13g08550 [Penicillium chrysogenum Wisconsin 54-1255]
  misc_feature (12)..(156): NCBI GI: 119473052 Blast Desc: arsenate reductase (Arc2), [Neosartorya fischeri NRRL 181] gi|119406632|gb|EAW16583.1| arsenate reductase (Arc2), [Neosartorya fischeri NRRL 181]
  misc_feature (11)..(155): NCBI GI: 171676601 Blast Desc: protein product [Podospora anserina] gi|170936367|emb|CAP61025.1| protein product [Podospora anserina]
  misc_feature (12)..(156): NCBI GI: 70992735 Blast Desc: arsenate reductase (Arc2) [Aspergillus fumigatus Af293] gi|66848849|gb|EAL89178.1| arsenate reductase (Arc2), [Aspergillus fumigatus Af293] gi|159130329|gb|EDP55442.1| (Arc2),
  misc_feature (12)..(153): NCBI GI: 67540384 Blast Desc: AN6362.2 [Aspergillus nidulans FGSC A4] gi|40739556|gb|EAA58746.1| AN6362.2 [Aspergillus nidulans FGSC A4] gi|259479419|tpe|CBF69623.1| TPA: arsenate reductase (Arc2),
  misc_feature (9)..(153): NCBI GI: 238843238 Blast Desc: conserved [Microsporum canis CBS 113480]
MRAHSALLSCAPWHAAFPAPKIAEPVSLTREEVLHKLRFDTTNEFVIVDLRRNDFEGGTIRGAINLPAQTLYPTIPTLYALFKAAGTKYIIWYCNACSRSSRGARAAGWLSDYIQEKGDNEMQSVTLQGGIKGWVTAGDSFTDLMDGYDAAHWANDI

SEQ ID NO: 10332 - DNA, 748 bp, Muscodor strobelii
  misc_feature: SGI EST ID NO. CUFF.24431.0
  misc_feature: Variant of the nucleotide sequence at SEQ ID NO 10330
atgtgaagttggcatgcatggtatgatcatcttgatacccagctgcttcaagctcattttactttcgctcagcgaattaaaacctatgccttctaaactgaagtcttcggaacaaacatgacaactgaatagccgtggcatgctgcgtttccagccccgaaaatcgccgagccggtatcgcttacccgagaagaggttttgcacaagctgcgtttcgatactaccaatgagttcgtgattgtcgacctgcgtcgaaatgatttcgaggtgcttccagactcgtacaatgatttatgactcagctacttaccatcgctgtttgatctctagggaggcacaattcgaggggcaatcaatcttccagctcagacgctatacccgaccattcctacactgtatgctctgtttaaggcggctgggacgaaatacattatttggtattgcaacgcttgttctcgttccagccgcggggctcgtgccgctggctggctgagcgactatattcaagagaaaggggacaacgagatgcaaagcgtgacgctccaaggtggaatcaagggatgggtgacagctggggacagcttcacagacctgatggatggctatgacgctgcgcattgggctaacgacatttgagacgcctgatgcgcagcttatcaaatttggtttacaaagtctagtctgagcgctgaggataagacacattaggaaattgcaagatcacataactttgatgtctatcatcctc

SEQ ID NO: 10333 - DNA, 735 bp, Muscodor strobelii
  misc_feature: SGI cDNA ID NO. 563275
  misc_feature: Encodes the peptide sequence at SEQ ID NO 10334
atgacaacaaaaaccacaacaacgactggaggaggtggctcagggtcaactccaacaggtgtgacaactaccttgcccaagtcttctggcgctgtgtcaacttcggcccccatcacgatttccgggtcatttgatggcggcatgaagatgtatgatcgttcacccaaggtctgtgaagagcaaacagaaaccggtgaagacgacgcgatgttcgtcttggaagatggagctacgctgtcgaacgtaatcatcggtcccaatcaagctgaaggtgttcactgcagaggcacctgcacactgaacaatgtctggtggtctgatgtctgtgaagacgcattgacacttctccagggcagtggtacctcgtatgtcaacggtggcggcgcatttaaggccgaagataaaatcatccaattcaatggatttggtacagttcaggtcaagaatttctacgccaacgactacggcaaggtcgtacgcagttgcggcaactgcagcaacaacggcggcgcccggcacatcatcatgaacggtgtcgtggctgttgatggcggagtgttgtgtggcatcaacaccaactatggtgatacatgctccatcacaaattgctgccaagacgatggcaagaactgtgatcgctataccggcaacaatgatggagacgagccacccaagattggttccggacctgatggaacgtactgtaccgtttcgggtctgtccactagctgctaa

SEQ ID NO: 10334 - protein, 244 aa, Muscodor strobelii
  misc_feature: SGI Peptide ID NO. 563275
  misc_feature (17)..(225): Pfam Id: PF03211 Pfam Desc: Pectate lyase
  misc_feature (20)..(244): NCBI GI: 116201269 Blast Desc: CHGG_08519 [Chaetomium globosum CBS 148.51] gi|88177037|gb|EAQ84505.1| CHGG_08519 [Chaetomium globosum CBS 148.51]
  misc_feature (14)..(244): NCBI GI: 242048820 Blast Desc: pectate lyase [Fusarium oxysporum f. cubense]
  misc_feature (14)..(244): NCBI GI: 3764095 Blast Desc: pectate lyase [Fusarium oxysporum f. sp. lycopersici]
  misc_feature (14)..(244): NCBI GI: 242048822 Blast Desc: pectate lyase [Fusarium oxysporum f. cubense]
  misc_feature (15)..(244): NCBI GI: 168156 Blast Desc: pectate lyase A [Nectria haematococca mpVI] gi|168158|gb|AAA33339.1| pectate lyase A [Nectria haematococca mpVI] gi|256722931|gb|EEU36310.1| polysaccharide lyase family 3
  misc_feature (14)..(244): NCBI GI: 46114270 Blast Desc: FG02977.1 [Gibberella zeae PH-1]
  misc_feature (19)..(244): NCBI GI: 39976397 Blast Desc: conserved [Magnaporthe grisea 70-15] gi|145011878|gb|EDJ96534.1| conserved [Magnaporthe grisea 70-15]
  misc_feature (2)..(244): NCBI GI: 55824412 Blast Desc: pectate lyase [Gibberella zeae]
  misc_feature (2)..(244): NCBI GI: 46136977 Blast Desc: FG10004.1 [Gibberella zeae PH-1]
  misc_feature (21)..(244): NCBI GI: 256731663 Blast Desc: NECHADRAFT_41889 [Nectria haematococca mpVI 77-13-4]
  misc_feature (43)..(166): SWISSPROT Homolog: EC 4.2.2.2 Pectate lyase
  misc_feature (43)..(166): SWISSPROT Homolog: EC 4.2.2.10 Pectin lyase
MTTKTTTTTGGGGSGSTPTGVTTTLPKSSGAVSTSAPITISGSFDGGMKMYDRSPKVCEEQTETGEDDAMFVLEDGATLSNVIIGPNQAEGVHCRGTCTLNNVWWSDVCEDALTLLQGSGTSYVNGGGAFKAEDKIIQFNGFGTVQVKNFYANDYGKVVRSCGNCSNNGGARHIIMNGVVAVDGGVLCGINTNYGDTCSITNCCQDDGKNCDRYTGNNDGDEPPKIGSGPDGTYCTVSGLSTSC

SEQ ID NO: 10335 - DNA, 652 bp, Muscodor strobelii
  misc_feature: SGI EST ID NO. CUFF.24395.0
  misc_feature: Variant of the nucleotide sequence at SEQ ID NO 10333
acaatgtctggtggtctgatgtctgtgaagacgcattgacacttctccagggcagtggtacctcgtatgtcaacggtggcggcgcatttaaggccgaagataaaatcatccaattcaatggatttggtacagttcaggtcaagaatttctacgccaacgactacggcaaggtcgtacgcagttgcggcaactgcagcaacaacggcggcgcccggcacatcatcatgaacggtgtcgtggctgttgatggcggagtgttgtgtggcatcaacaccaactatggtgatacatgctccatcacaaattgctgccaagacgatggcaagaactgtgatcgctataccggcaacaatgatggagacgagccacccaagattggttccggacctgatggaacgtactgtaccgtttcgggtctgtccactagctgctaattctgcttggggcgattgaacacatcacgacgtgaaaaaaaacacgcagctaggggcctgtgaattagctatgcaccgcgtttgtcgtgtagttcgaagtagcagattatttctaatacatctaatttgtagattgccatatcaatgttgcacgcgtagtctagctagttggaagttcttacggcaacgggcagactcgagttgaatgaacaaagtct

SEQ ID NO: 10336 - DNA, 1011 bp, Muscodor strobelii
  misc_feature: SGI cDNA ID NO. 563276
  misc_feature: Encodes the peptide sequence at SEQ ID NO 10337
atgacttattatgctaatggctatcctggagatggttattactccgctgaggttctaggaaccaatgacgctggtacatggtcatatgagaatcctggaacggaaatgatatttgattctccaacttaccaagagccatatcacccaagcttgccaacctgggattcacgctggagctcggagttggaacagcagcctcttttcaatatgcctgtcaatccatatcccgaagcacctctgatgggtacctcttacacgccctcgtctctcatcgatccagcactgctcactgagcaagacgctaatttacaagtgccatttgatggtgtaacaaactcgattgcgcaggcagtgcaaaatccagcttcctcagcagctcactttgaagatggttatctcccggccgcatatcatgaggataacatcaatatacacgggtcccctgttagacagccacgtcgatcgccgcgaaacaggcggtcccatgaatggcagtcccctgaatggcggtcccctaaaccacgaagacaaccacagaaaaagaagaagtctcatcctgctcccacgatgcttcctgagcctttgagcattttggctgatactgataaagtgcagactatggacattgaaaggtacgtgaatcgaagtgtagaagagcgtcaagaggcggtggcaaactccagatttggcaaggtcggacgtcctcttaatgcgttcatgttatatcgcaagaagtactatgctatagcacacacttatcaaaaaaataacatgtctatctctgtagtcgtgggcgatagttggagtcgcgaggacgaacaggtgaggactaaattcgacaaattggctgtcatcgaaaggaggaatatgctcaaggctttcccagactataaatttcaaccacataaaaagaggaaagaggccaaaatgcagcagcaggagccagatagcgacgatgagtggtttcttagagcttacaggcgtcgtcggcagttgggatacttctggtag

SEQ ID NO: 10337 - protein, 336 aa, Muscodor strobelii
  misc_feature: SGI Peptide ID NO. 563276
  misc_feature (232)..(298): Pfam Id: PF00505 Pfam Desc: HMG (high mobility group) box
  misc_feature (159)..(307): NCBI GI: 67526419 Blast Desc: AN3667.2 [Aspergillus nidulans FGSC A4] gi|40740685|gb|EAA59875.1| AN3667.2 [Aspergillus nidulans FGSC A4] gi|259481797|tpe|CBF75653.1| TPA: HMG box protein, (JCVI) A4]
  misc_feature (129)..(307): NCBI GI: 121708322 Blast Desc: HMG box protein [Aspergillus clavatus NRRL 1] gi|119400243|gb|EAW10669.1| HMG box protein [Aspergillus clavatus NRRL 1]
  misc_feature (191)..(329): NCBI GI: 145615506 Blast Desc: MGG_05641 [Magnaporthe grisea 70-15] gi|145022326|gb|EDK06346.1| MGG_05641 [Magnaporthe grisea 70-15]
  misc_feature (159)..(330): NCBI GI: 46108968 Blast Desc: FG01366.1 [Gibberella zeae PH-1]
  misc_feature (165)..(318): NCBI GI: 261356568 Blast Desc: HMG box protein [Verticillium albo-atrum VaMs.102]
  misc_feature (191)..(309): NCBI GI: 171680305 Blast Desc: protein product [Podospora anserina] gi|170939779|emb|CAP65005.1| protein product [Podospora anserina]
  misc_feature (111)..(320): NCBI GI: 115389600 Blast Desc: [Aspergillus terreus NIH2624] gi|114194701|gb|EAU36401.1| [Aspergillus terreus NIH2624]
  misc_feature (167)..(307): NCBI GI: 145229799 Blast Desc: An01g07830 [Aspergillus niger] gi|134055320|emb|CAK37105.1| protein product [Aspergillus niger]
  misc_feature (187)..(332): NCBI GI: 164422772 Blast Desc: NCU09387 [Neurospora crassa OR74A] gi|157069815|gb|EAA34597.2| [Neurospora crassa OR74A]
  misc_feature (180)..(306): NCBI GI: 256735001 Blast Desc: NECHADRAFT_74402 [Nectria haematococca mpVI 77-13-4]
MTYYANGYPGDGYYSAEVLGTNDAGTWSYENPGTEMIFDSPTYQEPYHPSLPTWDSRWSSELEQQPLFNMPVNPYPEAPLMGTSYTPSSLIDPALLTEQDANLQVPFDGVTNSIAQAVQNPASSAAHFEDGYLPAAYHEDNINIHGSPVRQPRRSPRNRRSHEWQSPEWRSPKPRRQPQKKKKSHPAPTMLPEPLSILADTDKVQTMDIERYVNRSVEERQEAVANSRFGKVGRPLNAFMLYRKKYYAIAHTYQKNNMSISVVVGDSWSREDEQVRTKFDKLAVIERRNMLKAFPDYKFQPHKKRKEAKMQQQEPDSDDEWFLRAYRRRRQLGYFW

SEQ ID NO: 10338 - DNA, 436 bp, Muscodor strobelii
  misc_feature: SGI EST ID NO. CUFF.24401.0
  misc_feature: Variant of the nucleotide sequence at SEQ ID NO 10336
cggacgtcctcttaatgcgttcatgttatatcgcaagaagtactatgctatagcacacacttatcaaaaaaataacatgtctatctctgtagtcgtgggcgatagttggagtcgcgaggacgaacaggtgaggactaaattcgacaaattggctgtcatcgaaaggaggaatatgctcaaggctttcccagactataaatttcaaccacataaaaagaggaaagaggccaaaatgcagcagcaggagccagatagcgacgatgagtggtttcttagagcttacaggcgtcgtcggcagttgggatacttctggtaggtatgataagtctccgcataaatagttttccgggcgcaagtctagtgttgatttccatgtaagtattcagtactctcctcaaaataacagaatcttgtatgtatctaaaccctaagccct

SEQ ID NO: 10339 - DNA, 1074 bp, Muscodor strobelii
  misc_feature: SGI cDNA ID NO. 563277
  misc_feature: Encodes the peptide sequence at SEQ ID NO 10340
atgacgaccctgatcgccccccgagccggtggcattcacaaggtcgtctgcttagacgccgttctgtgccctgtccccaaattcgatttccctcacgtgtatgttgagcacgagaatacaataggagaagatcttatcattgaacgcgtgaaagacgcaacgatagtcatcacaacacgtgcatggatgtcggcacgaaccatatcccattgtccaaaactcgagcttatcgcgcttatgtcggtaggatttgacattatagatatggcggcatgccgcgagcgcaaaatcacagtctgcaactcgccagcagcatcagccgagtctgtagcagaacacgcgtttgcactatattttgcagctaagagaaagatagttgagctacatcatatggtacttgaaggagatgagtggccgaagaagaaaaatggattctttcgctatgcacatgtgcctagagtatcttggcacgaaacattgggtattgtaggctacggtagcttgggcaagatcatggagcgcatcggacaagcgctcggtatggaagtcatgatcgcagagcgaaaagggatttctgagtctgcgactagactaggtagaacaccgttcgaccaagtgctgaaaacatgcacagttttgatgatcggatgcccactagatgacgagtcacgtaacatgatagctgagcctgagctcgagaacatgcgtcgagacagtgtagttgtcaacgtggcacgaggaggcgtcatggacgaagcggcacttgtcaaggcgctgaacatgggttggatttctagtgctgcgacagacgttttcgctgtggaaccggcaacgatcacgtctacgcctctcatcacagactgtccatcaaatttaacattatcgccacatgttgcatggtacgcggacaccagctttgaaacactgcagtcgttgatcaaagagaccttagagagctacgtgataggcgagcctagaaacatggttaagggatcgtggtcgttgtactcgaagatttctcgctccaaagcaaatgggtcgtcgggtgcgacggttgtcgaagtcatagtatag

SEQ ID NO: 10340 - protein, 357 aa, Muscodor strobelii
  misc_feature: SGI Peptide ID NO. 563277
  misc_feature (14)..(330): Pfam Id: PF00389 Pfam Desc: D-isomer specific 2-hydroxyacid dehydrogenase, catalytic domain
  misc_feature (115)..(299): Pfam Id: PF02826 Pfam Desc: D-isomer specific 2-hydroxyacid dehydrogenase, NAD binding domain
  misc_feature (13)..(330): NCBI GI: 255953261 Blast Desc: Pc21g03190 [Penicillium chrysogenum Wisconsin 54-1255] gi|211589094|emb|CAP95216.1| Pc21g03190 [Penicillium chrysogenum Wisconsin 54-1255]
  misc_feature (26)..(329): NCBI GI: 256722050 Blast Desc: NECHADRAFT_51178 [Nectria haematococca mpVI 77-13-4]
  misc_feature (46)..(329): NCBI GI: 115492065 Blast Desc: conserved [Aspergillus terreus NIH2624] gi|114197520|gb|EAU39220.1| conserved [Aspergillus terreus NIH2624]
  misc_feature (13)..(329): NCBI GI: 121701253 Blast Desc: glycerate dehydrogenase [Aspergillus clavatus NRRL 1] gi|119397034|gb|EAW07465.1| glycerate dehydrogenase [Aspergillus clavatus NRRL 1]
  misc_feature (13)..(329): NCBI GI: 119495211 Blast Desc: glycerate dehydrogenase [Neosartorya fischeri NRRL 181] gi|119412557|gb|EAW22498.1| glycerate dehydrogenase [Neosartorya fischeri NRRL 181]
  misc_feature (24)..(329): NCBI GI: 229513431 Blast Desc: hydroxypyruvate reductase [Vibrio cholerae TMA 21] gi|229349308|gb|EEO14264.1| hydroxypyruvate reductase [Vibrio cholerae TMA 21]
  misc_feature (24)..(329): NCBI GI: 258622802 Blast Desc: 2-hydroxyacid dehydrogenase family protein [Vibrio mimicus VM573] gi|258584990|gb|EEW09721.1| 2-hydroxyacid dehydrogenase family protein [Vibrio mimicus VM573]
  misc_feature (24)..(329): NCBI GI: 258625827 Blast Desc: 2-hydroxyacid dehydrogenase [Vibrio mimicus VM603] gi|258582065|gb|EEW06935.1| 2-hydroxyacid dehydrogenase [Vibrio mimicus VM603]
  misc_feature (14)..(329): NCBI GI: 260779408 Blast Desc: D-lactate dehydrogenase [Vibrio coralliilyticus ATCC BAA-450] gi|260604498|gb|EEX30798.1| D-lactate dehydrogenase [Vibrio coralliilyticus ATCC BAA-450]
  misc_feature (14)..(327): NCBI GI: 28899452 Blast Desc: D-lactate dehydrogenase [Vibrio parahaemolyticus RIMD 2210633] gi|260363380|ref|ZP_05776232.1| D-lactate dehydrogenase [Vibrio parahaemolyticus K5030] gi|260879314|ref|ZP_05891669.1|
  misc_feature (14)..(330): SWISSPROT Homolog: EC 1.1.1.29 Glycerate dehydrogenase
MTTLIAPRAGGIHKVVCLDAVLCPVPKFDFPHVYVEHENTIGEDLIIERVKDATIVITTRAWMSARTISHCPKLELIALMSVGFDIIDMAACRERKITVCNSPAASAESVAEHAFALYFAAKRKIVELHHMVLEGDEWPKKKNGFFRYAHVPRVSWHETLGIVGYGSLGKIMERIGQALGMEVMIAERKGISESATRLGRTPFDQVLKTCTVLMIGCPLDDESRNMIAEPELENMRRDSVVVNVARGGVMDEAALVKALNMGWISSAATDVFAVEPATITSTPLITDCPSNLTLSPHVAWYADTSFETLQSLIKETLESYVIGEPRNMVKGSWSLYSKISRSKANGSSGATVVEVIV

SEQ ID NO: 10341 - DNA, 747 bp, Muscodor strobelii
  misc_feature: SGI cDNA ID NO. 563278
  misc_feature: Encodes the peptide sequence at SEQ ID NO 10342
atgcctacattccgagtagcgataatcatcaacacagatgataaagagccattgcgcatgatgcgcgagagttacatttccatcttcgaacaattggcaccaaaatcaaaactcgacttttataatggtgtattggacacagatctcttatcgatcttggatacaaattatgacttactagtcattgggggtggcacctatattgttcctcatgacaccccgtggatgatgaggctcagggaatttgagatcaagttatatgctcagcatccggaacaaaaggtaattgcgatatgtttaggtcatcagactagtgcactgaatctgggtggcgagatggattttttgccgggcagaccacaattagcagtagctactataaagctcactgaagatggaaaactctttttcggaaagtcgtcaactttgaatatacacaagttccaccagcgagcggtgaatgttattcagcctggctttaaacgtcttgccgaaaataacgaaattctcatgtcggataacggcaatgtgatcactttccaaggtcatccagagatgacatccgagatgatgagataccttcttctggacaaaactagtgtcacttctggttatgtggcgagggagattcaggaaaaccaggagtccgatgcaacaaaggcattgttagagagagcagatctcgatcatgatgggcttgatatgtggaagactattgtaagctgggcaaaagtcggttctgtataa

SEQ ID NO: 10342 - protein, 248 aa, Muscodor strobelii
  misc_feature: SGI Peptide ID NO. 563278
  misc_feature (5)..(242): NCBI GI: 256722672 Blast Desc: NECHADRAFT_87203 [Nectria haematococca mpVI 77-13-4]
  misc_feature (4)..(244): NCBI GI: 238493225 Blast Desc: conserved [Aspergillus flavus NRRL3357] gi|220696343|gb|EED52685.1| conserved [Aspergillus flavus NRRL3357]
  misc_feature (4)..(242): NCBI GI: 159128278 Blast Desc: copper/iron-regulated glutamine amidotransferase, [Aspergillus fumigatus A1163]
  misc_feature (4)..(242): NCBI GI: 255955063 Blast Desc: Pc21g12570 [Penicillium chrysogenum Wisconsin 54-1255] gi|211589995|emb|CAP96154.1| Pc21g12570 [Penicillium chrysogenum Wisconsin 54-1255]
  misc_feature (4)..(242): NCBI GI: 171685212 Blast Desc: protein product [Podospora anserina] gi|170942567|emb|CAP68219.1| protein product [Podospora anserina]
  misc_feature (2)..(243): NCBI GI: 46139759 Blast Desc: FG11394.1 [Gibberella zeae PH-1]
  misc_feature (4)..(244): NCBI GI: 169783438 Blast Desc: [Aspergillus oryzae RIB40] gi|83774925|dbj|BAE65048.1| protein product [Aspergillus oryzae]
  misc_feature (2)..(244): NCBI GI: 116208714 Blast Desc: CHGG_03650 [Chaetomium globosum CBS 148.51] gi|88184247|gb|EAQ91715.1| CHGG_03650 [Chaetomium globosum CBS 148.51]
  misc_feature (57)..(246): NCBI GI: 85086703 Blast Desc: NCU00262 [Neurospora crassa OR74A] gi|28918828|gb|EAA28497.1| [Neurospora crassa OR74A]
  misc_feature (2)..(242): NCBI GI: 255935227 Blast Desc: Pc13g01960 [Penicillium chrysogenum Wisconsin 54-1255] gi|211583260|emb|CAP91265.1| Pc13g01960 [Penicillium chrysogenum Wisconsin 54-1255]
MPTFRVAIIINTDDKEPLRMMRESYISIFEQLAPKSKLDFYNGVLDTDLLSILDTNYDLLVIGGGTYIVPHDTPWMMRLREFEIKLYAQHPEQKVIAICLGHQTSALNLGGEMDFLPGRPQLAVATIKLTEDGKLFFGKSSTLNIHKFHQRAVNVIQPGFKRLAENNEILMSDNGNVITFQGHPEMTSEMMRYLLLDKTSVTSGYVAREIQENQESDATKALLERADLDHDGLDMWKTIVSWAKVGSV

SEQ ID NO: 10343 - DNA, 1044 bp, Muscodor strobelii
  misc_feature: SGI cDNA ID NO. 563279
  misc_feature: Encodes the peptide sequence at SEQ ID NO 10344
atgagtcaccttgcgattgacgtgattggcgaacttgcacttggctacgacttgaacacacagacgagtgatgagaaccgcttcttcgcgaaggccctgggagtcggtttcttcgtgagcaacatctcattgcactttcccatctttcataaggtccacacgaattggatctttgactacctgatgtgggcgacgcgcgaaaaattcacacgcttgcttgagaagatggttgtctctcgcctggcactcgaaacgcatgctcgacccgatctatattcttttgtcgccaacggcctgccaagtgaggcaccaaagactcgtgacagcgctatttggaaggagtcaatggtatttctctcagctggtggtgacacagtagcgactgcgatgacgtccgtcttcttctatctatcgcgtaatccggactgctacgcgcgtcttgctaacgaggtgcggtcgactttcgccatcggtaatgaaataacagctggatcacaactgtcaagttgtcgctatcttcgtgcatgcattgatgaatctcttcgtatgtcaccaccgatttccgccaatctctggcgcaagcagattgacagcgatcgggagcccttgttcatcgacggccactacattcctcgggataccctgtttggtgttaacatctacgcactgagtcacaattctgagatatttccagatcccttctctttcaatccccagcgctggctcgacgctgacactggcgatggtgtcgctgtgaagtccattctccaagtctttgctagcttctccatcggcccgcgaaattgtgtcgggaaacctctagcatacttggtgatatccattatgattgctaagacactatggtatattgatttcgagcctgtacagggtcctttacgtaacgtgggtgaggccgctgataggggtcggccatatgaattctgcacacatgacggattcaattccagtcatgatggaccgtacttggtcttcagaataagggacggtgtcaatctggaagaaagtttggttgacaatatttag

SEQ ID NO: 10344 - protein, 347 aa, Muscodor strobelii
  misc_feature: SGI Peptide ID NO. 563279
  misc_feature (1)..(316): Pfam Id: PF00067 Pfam Desc: Cytochrome P450
  misc_feature (114)..(287): Pfam Id: PF00067 Pfam Desc: Cytochrome P450
  misc_feature (69)..(335): NCBI GI: 156056276 Blast Desc: SS1G_05490 [Sclerotinia sclerotiorum 1980] gi|154703274|gb|EDO03013.1| SS1G_05490 [Sclerotinia sclerotiorum 1980]
  misc_feature (2)..(335): NCBI GI: 255954725 Blast Desc: Pc21g10830 [Penicillium chrysogenum Wisconsin 54-1255] gi|211589826|emb|CAP95980.1| Pc21g10830 [Penicillium chrysogenum Wisconsin 54-1255]
  misc_feature (2)..(335): NCBI GI: 242771379 Blast Desc: cytochrome P450, [Talaromyces stipitatus ATCC 10500] gi|218721449|gb|EED20867.1| cytochrome P450, [Talaromyces stipitatus ATCC 10500]
  misc_feature (64)..(334): NCBI GI: 156060449 Blast Desc: SS1G_02363 [Sclerotinia sclerotiorum 1980] gi|154699771|gb|EDN99509.1| SS1G_02363 [Sclerotinia sclerotiorum 1980]
  misc_feature (4)..(334): NCBI GI: 145241738 Blast Desc: An09g02000 [Aspergillus niger] gi|134078055|emb|CAK40138.1| protein product [Aspergillus niger]
  misc_feature (2)..(335): NCBI GI: 85092131 Blast Desc: NCU06895 [Neurospora crassa OR74A] gi|28920645|gb|EAA30006.1| conserved [Neurospora crassa OR74A]
  misc_feature (1)..(332): NCBI GI: 121714963 Blast Desc: benzoate 4-monooxygenase cytochrome P450 [Aspergillus clavatus NRRL 1] gi|119403247|gb|EAW13665.1| benzoate 4-monooxygenase cytochrome P450 [Aspergillus clavatus NRRL 1]
  misc_feature (4)..(335): NCBI GI: 169603764 Blast Desc: SNOG_04890 [Phaeosphaeria nodorum SN15] gi|111066161|gb|EAT87281.1| SNOG_04890 [Phaeosphaeria nodorum SN15]
  misc_feature (2)..(334): NCBI GI: 169611945 Blast Desc: SNOG_09088 [Phaeosphaeria nodorum SN15] gi|160702403|gb|EAT83280.2| SNOG_09088 [Phaeosphaeria nodorum SN15]
  misc_feature (2)..(335): NCBI GI: 145608110 Blast Desc: MGG_03375 [Magnaporthe grisea 70-15] gi|145015610|gb|EDK00100.1| MGG_03375 [Magnaporthe grisea 70-15]
  misc_feature (5)..(296): SWISSPROT Homolog: EC 1.14.14.1 Unspecific monooxygenase
MSHLAIDVIGELALGYDLNTQTSDENRFFAKALGVGFFVSNISLHFPIFHKVHTNWIFDYLMWATREKFTRLLEKMVVSRLALETHARPDLYSFVANGLPSEAPKTRDSAIWKESMVFLSAGGDTVATAMTSVFFYLSRNPDCYARLANEVRSTFAIGNEITAGSQLSSCRYLRACIDESLRMSPPISANLWRKQIDSDREPLFIDGHYIPRDTLFGVNIYALSHNSEIFPDPFSFNPQRWLDADTGDGVAVKSILQVFASFSIGPRNCVGKPLAYLVISIMIAKTLWYIDFEPVQGPLRNVGEAADRGRPYEFCTHDGFNSSHDGPYLVFRIRDGVNLEESLVDNI

SEQ ID NO: 10345 - DNA, 402 bp, Muscodor strobelii
  misc_feature: SGI EST ID NO. CUFF.24419.0
  misc_feature: Variant of the nucleotide sequence at SEQ ID NO 10343
ctcagatcgagccatgcggtctttcacgccggtgctgcaagatcatattaatatctacttgcagcaaatgttgaaagcgtcaggtcgaactatcaacatgacaacatagatgagtcaccttgcgattgacgtgattggcgaacttgcacttggctacgacttgaacacacagacgagtgatgagaaccgcttcttcgcgaaggccctgggagtcggtttcttcgtgagcaacatctcattgcactttcccatctttcataaggtccacacgaattggatctttgactacctgatgtgggcgacgcgcgaaaaattcacacgcttgcttgagaagatggttgtctctcgcctggcactcgaaacgcatgctcgacccgatctatattcttttgtcgccaacgg

SEQ ID NO: 10346 - DNA, 1029 bp, Muscodor strobelii
  misc_feature: SGI cDNA ID NO. 563280
  misc_feature: Elevated expression when VOC is produced
  misc_feature: Encodes the peptide sequence at SEQ ID NO 10347
atgacaagacggacgcagcttcggcgacggcctcggacggatcttcgtatctttacgagagatgctgccgctgtggacccggcattaggcgacgatgctgatgattcgatatcaagtgacgatgattcggatgacgagttacctggcgaagaatcagatgacgatgattctccaaccacaagcacattttctgaagtaaagtcttcagcaacaaagacaaccggaacatcggtcgcttctcacgcggccacaactaaattacaaacgacaacctcgtctctgtctagttccgctgttacaagctcttctgttgcgtccatcacaccagctcaaagcttcgccacgattacgatctcaacttcagcatcggtagtttcaaccaccactactccatttgcatcggcgtcaggcgagcttcaatctgtaacaactgcaagtacaccaataactacatcaacatcgacagaaggcatcaatactccacaggccgaaagttccagtgctgccgtgcaagatccgacccatattcacaatgtaggacgtaactcatctcgcaatgctggcgtgatcgctgccgcaacgattggaagtgttgtagtcctagccctgatactgttcatgttttggaaatatcgtcggggtagtagacgagcaaacgacaatcatcaatccagagttggctcatggccgccaaacaatccagagatatcccccgcaagtgcacgggcgagcactaggagatctccgtcaagcattatgaattatttaatgcgcgccgcatatgcagctgaggacggaacggattacaagggaaacgtgtcagacgagaagaatgcagctgggttctacgcaaaagaaaacgaaagtacggagcgactcactttgcctgcgggtgcacagctccggcatccatcagtctcggcccggactgaaatctcaaatgccactgaaagtacatggaggacctggggcgcttcaggggcgcttcatgatctcgaaggcaagggctggacccgccgcttcttttga

SEQ ID NO: 10347 - protein, 342 aa, Muscodor strobelii
  misc_feature: SGI Peptide ID NO. 563280
  misc_feature: Useful for introducing or modulating the production of volatile compounds
MTRRTQLRRRPRTDLRIFTRDAAAVDPALGDDADDSISSDDDSDDELPGEESDDDDSPTTSTFSEVKSSATKTTGTSVASHAATTKLQTTTSSLSSSAVTSSSVASITPAQSFATITISTSASVVSTTTTPFASASGELQSVTTASTPITTSTSTEGINTPQAESSSAAVQDPTHIHNVGRNSSRNAGVIAAATIGSVVVLALILFMFWKYRRGSRRANDNHQSRVGSWPPNNPEISPASARASTRRSPSSIMNYLMRAAYAAEDGTDYKGNVSDEKNAAGFYAKENESTERLTLPAGAQLRHPSVSARTEISNATESTWRTWGASGALHDLEGKGWTRRFF

SEQ ID NO: 10348 - DNA, 1669 bp, Muscodor strobelii
  misc_feature: SGI EST ID NO. CUFF.24471.0
  misc_feature: Variant of the nucleotide sequence at SEQ ID NO 10346
ccgactcattgcgttacgtgaaacgccagacgcgtgtagagcaccaaactgcgcattcaactgcaatagagccaagagtgcgacccaagcttttgatgtactgcaggaagatgggtctcggataagtgtggatgtaaccgagccaagcccgcagcaaacatctgtgaaacttcgacctgtcgccatgtcggcgcaactcttggtcagaaacaaaatcacaatgttcatagtaatgctcgtgccgatcatttgattttgcatgggctatctcattttgacatcctcgtgctccaccattcagacgacaagcattagacattggtggtggggaattcgactacacccagacgtgcgttgtctgacgaccatctgcccagagttctgttgtttcactcctcttggccttgtcgcgacaatgtctgttcacagcaaggaagattggacgacaagtccgaaatgccatttcgacttggcaaatataaagtcaattgctcggcatgccatttgttctgtacacacggacgcagcttcggcgacggcctcggacggatcttcgtatctttacgagagatgctgccgctgtggacccggcattaggcgacgatgctgatgattcgatatcaagtgacgatgattcggatgacgagttacctggcgaagaatcagatgacgatgattctccaaccacaagcacattttctgaagtaaagtcttcagcaacaaagacaaccggaacatcggtcgcttctcacgcggccacaactaaattacaaacgacaacctcgtctctgtctagttccgctgttacaagctcttctgttgcgtccatcacaccagctcaaagcttcgccacgattacgatctcaacttcagcatcggtagtttcaaccaccactactccatttgcatcggcgtcaggcgagcttcaatctgtaacaactgcaagtacaccaataactacatcaacatcgacagaaggcatcaatactccacaggccgaaagttccagtgctgccgtgcaagatccgacccatattcacaatgtaggacgtaactcatctcgcaatgctggcgtgatcgctgccgcaacgattggaagtgttgtagtcctagccctgatactgttcatgttttggaaatatcgtcggggtagtagacgagcaaacgacaatcatcaatccagagttggctcatggccgccaaacaatccagagatatcccccgcaagtgcacgggcgagcactaggagatctccgtcaagcattatgaattatttaatgcgcgccgcatatgcagctgaggacggaacggattacaagggaaacgtgtcagacgagaagaatgcagctgggttctacgcaaaagaaaacgaaagtacggagcgactcactttgcctgcgggtgcacagctccggcatccatcagtctcggcccggactgaaatctcaaatgccactgaaagtacatggaggacctggggcgcttcaggggcgcttcatgatctcgaaggcaagggctggacccgccgcttcttttgagatgcctctccacgaccggatacgattagtatgcaacgagatggtcccaagctcaatatcccatgacagcaatatagaaactgtgcgaactatagaatgaatatcaagatgacgattaaagatcacccacc

SEQ ID NO: 10349 - DNA, 5532 bp, Muscodor strobelii
  misc_feature: SGI cDNA ID NO. 563281
  misc_feature: Encodes the peptide sequence at SEQ ID NO 10350
atggcgacctcacagctcccggaccgcgactactggcaggaggcgtacaacttgttgcgcccggactcgcagaccgttcttgaagatataaagataggcagacgggatgtgttaagagcaacattacagactgcagaggagaaacttgattactgtcagcagaaaggatgcaaattcatcctaccccatggtcaaattgtcatcgtccgcgatgtcgtggaaaagattattcatctaattcaagcgttcattacgagtaatgccactccttcaaatggcctgtccgatgctgcatatctgccatgggctgccgtccgctacatacttcaaatcgccatcagtgaccttatagttggggcagtctgcgtcgtgaccgacttagagttcgttgtgagattactatacgagaacagagaattcgaaagactccgtggtcagcggcctgagacatggacgagggaaacagaagactcgtggattgaatggtacagccacgtgctgtcacttctgtctgtgatcatacaggctcttagaaccgccgccacgaaaaacacatcgtggcccacagaagacaatccatactctgtggtcaaaactgcgaccgtgccgattattaatatgaatcgcaacgtcttaggggttgatagagcacggacgtatgacacattggtacatgaagccgattatcaagattttgtcgaatggctatctgatgtgacaaccgaagttacgaatcatgcacgcgtcactgaccagattatgagagtccacatggacaattattgggaattgagccgctcaagctcaccaggcatattggttgtccatggagcctccaagacaggcaaatcattgttctgctccggtgtagcaggcactttgcaagagcatcataccaagacactaaaggcaacgccgttcgcatatctagactgctctgatttccgactcgatctcgaagagccatctcaattgagaaacattctccactgcatcctcacacagctgtccataagtcgttttcatcagccacgtcaacttcatgcccattctatcattatctcggagttcttgcgtcggaaagctcaaagtgaacttgatggggaagatatcaaacagccaacaactaaagattgtataaatctgatacgagagcttgccgatatcgacccgatcacaatcatcatagattcattcgaccaagttcgagaacacagccgtgcttctcttatgcgtgccttcaactacattatcgcaaactctcacaatgtcgctaggatagtcatcacttgtcgtagcgctcgccaaagactcggcttcgctctgaaagacatccttgatcaaaaacttgaagcgcgcagcgacactagcgtggtttcaaaagtcgattgtggcccatgggtgactcatgaagagattgacgattctcgcccaattcgtaattatagtaacgacaaggctaacatcaaatcagttgctgtaagagcaataaaagaaggcgaatacaatctcgttgcatccatccttagagaatgcccaagcccgaatgagctcttcccacaggaagccgtggcactcgctgcgatttacgggcacaacgctctgatcaggctgctagtagacgcaggatttggttgcaaggagaatggcagtcttgagtcgccactagattgcgcgattcgatcgaatcgggaatccacggcccgtgttttgattgagctcggtgccgatgctgctgacttcagctcatactacaacgatttgatagctgcttcgatacacggaaatgtcagactcgtgaagttgttatttgaggaggcagccaaggcaaacgaccgatggcgtttgtatagtgtcgccttggagactgccctttaccatggacacgatgagcttattgaatatttgctcacgctctacaatactgtacatgtggttatcagttcacataaagacttcggctctgcggtagccaaaagtggacgagatgatatcctgcagcgccttctcggaaaaggcgtattagataaacttttcgaacccgaggggctgggtttccgtacacatggttgtaattggcggcgagagtcgcacatatctcttttgagggcaagctcaccaagtcgaggagatcggtctgatgatggtcgtagtagacggccaagggatcatataatgcagaaaccattggaagtctacaaagatatccttgctcaagcggctcgttccattgagtccagtctcagaattgcattagaacggtccgcgaagcgcagcaaagctcgcagtcttaaaacggacatccggactaaatctgcagtgctaagtgactgtgctctggaggtatgggtagatcaaggcaacgaacgaggagtggctctacttctagagcggaagagagaaatcggtctccaacacagtgacctaatacgggctattaaacatgcggcattgggcgggcgcatgacaatcatgcaacagattctcgatcatgtttccgcaccaattccgatttcagaagcgactgagttccttgagaagacagtttccaagggccatcttgacagcacgacctcactacttgagctcgtcgacgcggaggaatggaatgaacagaacctcgcagagctaatctcacaggcctgccaatcatctaataatgctctcatcgagaaaatagtcgcattcgccaaaaagttcatttctactgaatgcatcagggaggaactcgaatctgcactatctcattatgtcctaaaagttggcggtgaggagacagcaaagctggtacaatgcattcatcagcaaattaagagtgttagctcccaagatacactccaaccccctcacaaatacaatctactagaaacagtcggaatcaaaatagaaattgctagtgaacatggcgtcggcagtgagagcacgggaagaacaatgagcgccgaaggaggagaacaaggcactacactcttagtgaacgttggcgaacacgttcgaattcaaaatgacgactatggattatcattgcaagaagcctgcaaagatgaccagctgtcagaaatacagacgctcctcaaacatagaagcctctgggacaacttcgataaagatatcaatcgttgcttgatcatcgcttcatcatacggatatgcaagcatcgtccgcatgctcctcgatgccggtgctgaggtcaacgctgaggccaatgacgttcaagtgcatctggtccaaggctattgggacaatgtctacggaagggaaaccccgaaagacaaaaagcatactccgatgagcgtggctctcgatcggatcaaaggtctaacatgcatgaccccgtttcgggagcaaggaaatcttgaagactacgaggatgtcatcgaggcgcttgtcagtcacggtgttgatgtcaattgtgttatgggtgaaccgggcctgcccctccacactgctgctaatcgggatgcgagaagggccttgcaatctctcatcgatggtggagccgatgtgaactgtatcgtcgatggggaaacacccttaacggtcgttcacgacatcaggactgctcgtatactgcttgatcatggtgctcaattgcctgagcagcttgatgcaaaagaactgttcattggtcgattattggaatttttcgatgacgataaacacaacctgtcttgcgactactcgctccaagatgtcttcgcaaatggtattggcgctcttcttcggctatttctagaaatgctgaacttaacagaatgttacccccagttcccgctaattctccaaatggtttgtgcactcggtgatcgacaatacgtcgattttctcctgcagcgaggcgtcgatgtcaatgccggttgcggttattatggtacggcgctgcaagccgctacccgcaacggacacacagacttggtgcaacagcttctcgaagctggtgcctccccaaatatcacgggaggagcgcacttcagcgctcttcgagcagcagtcaaaggtcaacatgccagcgtcgttcgagcgctactgtcgttcgaagcggacgcgaatctcatcccagagccggacgatcaagaccctgatgaagaagtggaaaagtcactcattgaattatccatgtctctgaacaatgaagtgataacgttgatgttgcttgacgcgggggcaaaaatagacttcaaaaacgagatcgggcactatgcgcccctatgggcatgcgtctatggcagtctgaatgtgttaaagcgattcctcgcggctggatggaatccaaatgcagcagtagtaacgaacggtccctgggagctcaacttctcctacgacagtattgcgccaatacatatggcttgctactacggccacaattcgatcattcaattcctactagacagaggcgtcgaaatagaaatcgggatgggcaaatcctcaaccagcgcttcaagaacgcccttagtcatcgccgcggaacgaaatcacctcaatgcaatccgtcttctcgtcaacgcgggagcggacttaaatcgggggctcgcgagatggggcacgccattgacgtctgcggccgagaacggtcacactgatgccgttcgtcttcttctgctttacggcgcggttgtgtacgaccccgaacatcaaatcaaccatctagtgtgtagttggagatctgactcccttactgttctcgaacttttagccgaagcagctatacgtcttccaaacggtagagaggccatagtcaaagccatagaagcttggaaccgctggaacttcccagtccgctttgttgaaaactggaacgagagccacttgagccttctcaacgaacacgtaggacccacgcctggtggcttacttgcggcatgcatcaaggggtctgcgacagttgtgagatccatgctcgacggcggcattttcgcagatacacgtaatgagaaagacttcagcgcactacacctcgctacacgcttcctgcacgctgatgtcgtagaagtgcttctacagcacggggctgatgccctaaatgacactcgtcctgagtacggtaatttgatcaatgctgccatgttcagtcttgtcaaaaagtgtcttccagacaaggcgaccccgttattcgaagaagaaaagagaatgcaaaagtggcattggaactcatggggctgtccacaggagatcagctgtgagagaatcgtcaccttactcatcgagcacggcgtcgaagcctcacatgacccattcctcttcggcacaagcttccacctcgcatgtttcataggtaacgagacgatcatcaaactcctcttgtctaagggggcggacgtgcactcgactgccggctatttcggtagtcccctgtttgcggccattcacagaaagaactacagagctgttgagatcttgctgcaggagggtgttgatccggatacttgtcaccatgaattaggaacagcgttgatgtatgcgcgtcgatacaaggctgaggatattgctgaattgttgctttggtctggagcaacacctgaagaggagcactga

SEQ ID NO: 10350 - protein, 1843 aa, Muscodor strobelii
  misc_feature: SGI Peptide ID NO. 563281
  misc_feature (1645)..(1677): Pfam Id: PF00023 Pfam Desc: Ankyrin repeat
  misc_feature (1037)..(1069): Pfam Id: PF00023 Pfam Desc: Ankyrin repeat
  misc_feature (1479)..(1511): Pfam Id: PF00023 Pfam Desc: Ankyrin repeat
  misc_feature (1479)..(1507): Pfam Id: PF00023 Pfam Desc: Ankyrin repeat
  misc_feature (1292)..(1321): Pfam Id: PF00023 Pfam Desc: Ankyrin repeat
  misc_feature (1441)..(1473): Pfam Id: PF00023 Pfam Desc: Ankyrin repeat
  misc_feature (1749)..(1778): Pfam Id: PF00023 Pfam Desc: Ankyrin repeat
  misc_feature (975)..(1837): NCBI GI: 242816359 Blast Desc: multiple ankyrin repeats single kh domain protein, [Talaromyces stipitatus ATCC 10500] gi|218715100|gb|EED14523.1| multiple ankyrin repeats single kh domain protein, [Talaromyces
  misc_feature (520)..(1832): NCBI GI: 242816359 Blast Desc: multiple ankyrin repeats single kh domain protein, [Talaromyces stipitatus ATCC 10500] gi|218715100|gb|EED14523.1| multiple ankyrin repeats single kh domain protein, [Talaromyces
  misc_feature (977)..(1837): NCBI GI: 67526171 Blast Desc: AN3543.2 [Aspergillus nidulans FGSC A4] gi|40739678|gb|EAA58868.1| AN3543.2 [Aspergillus nidulans FGSC A4] gi|259481936|tpe|CBF75924.1| TPA: conserved [Aspergillus FGSC
  misc_feature (980)..(1837): NCBI GI: 67526171 Blast Desc: AN3543.2 [Aspergillus nidulans FGSC A4] gi|40739678|gb|EAA58868.1| AN3543.2 [Aspergillus nidulans FGSC A4] gi|259481936|tpe|CBF75924.1| TPA: conserved [Aspergillus FGSC
  misc_feature (959)..(1837): NCBI GI: 189502738 Blast Desc: Aasi_1435 [Candidatus Amoebophilus asiaticus 5a2] gi|189498179|gb|ACE06726.1| Aasi_1435 [Candidatus Amoebophilus asiaticus 5a2]
  misc_feature (971)..(1837): NCBI GI: 242760147 Blast Desc: Pfs, NACHT and Ankyrin domain protein [Talaromyces stipitatus ATCC 10500] gi|218723125|gb|EED22542.1| Pfs, NACHT and Ankyrin domain protein [Talaromyces stipitatus ATCC 10500]
  misc_feature (976)..(1837): NCBI GI: 242816359 Blast Desc: multiple ankyrin repeats single kh domain protein, [Talaromyces stipitatus ATCC 10500] gi|218715100|gb|EED14523.1| multiple ankyrin repeats single kh domain protein, [Talaromyces
  misc_feature (1100)..(1837): NCBI GI: 242760147 Blast Desc: Pfs, NACHT and Ankyrin domain protein [Talaromyces stipitatus ATCC 10500] gi|218723125|gb|EED22542.1| Pfs, NACHT and Ankyrin domain protein [Talaromyces stipitatus ATCC 10500]
  misc_feature (554)..(1537): NCBI GI: 67526171 Blast Desc: AN3543.2 [Aspergillus nidulans FGSC A4] gi|40739678|gb|EAA58868.1| AN3543.2 [Aspergillus nidulans FGSC A4] gi|259481936|tpe|CBF75924.1| TPA: conserved [Aspergillus FGSC
  misc_feature (990)..(1839): NCBI GI: 238576464 Blast Desc: MPER_12988 [Moniliophthora perniciosa FA553] gi|215449006|gb|EEB88973.1| MPER_12988 [Moniliophthora perniciosa FA553]
MATSQLPDRDYWQEAYNLLRPDSQTVLEDIKIGRRDVLRATLQTAEEKLDYCQQKGCKFILPHGQIVIVRDVVEKIIHLIQAFITSNATPSNGLSDAAYLPWAAVRYILQIAISDLIVGAVCVVTDLEFVVRLLYENREFERLRGQRPETWTRETEDSWIEWYSHVLSLLSVIIQALRTAATKNTSWPTEDNPYSVVKTATVPIINMNRNVLGVDRARTYDTLVHEADYQDFVEWLSDVTTEVTNHARVTDQIMRVHMDNYWELSRSSSPGILVVHGASKTGKSLFCSGVAGTLQEHHTKTLKATPFAYLDCSDFRLDLEEPSQLRNILHCILTQLSISRFHQPRQLHAHSIIISEFLRRKAQSELDGEDIKQPTTKDCINLIRELADIDPITIIIDSFDQVREHSRASLMRAFNYIIANSHNVARIVITCRSARQRLGFALKDILDQKLEARSDTSVVSKVDCGPWVTHEEIDDSRPIRNYSNDKANIKSVAVRAIKEGEYNLVASILRECPSPNELFPQEAVALAAIYGHNALIRLLVDAGFGCKENGSLESPLDCAIRSNRESTARVLIELGADAADFSSYYNDLIAASIHGNVRLVKLLFEEAAKANDRWRLYSVALETALYHGHDELIEYLLTLYNTVHVVISSHKDFGSAVAKSGRDDILQRLLGKGVLDKLFEPEGLGFRTHGCNWRRESHISLLRASSPSRGDRSDDGRSRRPRDHIMQKPLEVYKDILAQAARSIESSLRIALERSAKRSKARSLKTDIRTKSAVLSDCALEVWVDQGNERGVALLLERKREIGLQHSDLIRAIKHAALGGRMTIMQQILDHVSAPIPISEATEFLEKTVSKGHLDSTTSLLELVDAEEWNEQNLAELISQACQSSNNALIEKIVAFAKKFISTECIREELESALSHYVLKVGGEETAKLVQCIHQQIKSVSSQDTLQPPHKYNLLETVGIKIEIASEHGVGSESTGRTMSAEGGEQGTTLLVNVGEHVRIQNDDYGLSLQEACKDDQLSEIQTLLKHRSLWDNFDKDINRCLIIASSYGYASIVRMLLDAGAEVNAEANDVQVHLVQGYWDNVYGRETPKDKKHTPMSVALDRIKGLTCMTPFREQGNLEDYEDVIEALVSHGVDVNCVMGEPGLPLHTAANRDARRALQSLIDGGADVNCIVDGETPLTVVHDIRTARILLDHGAQLPEQLDAKELFIGRLLEFFDDDKHNLSCDYSLQDVFANGIGALLRLFLEMLNLTECYPQFPLILQMVCALGDRQYVDFLLQRGVDVNAGCGYYGTALQAATRNGHTDLVQQLLEAGASPNITGGAHFSALRAAVKGQHASVVRALLSFEADANLIPEPDDQDPDEEVEKSLIELSMSLNNEVITLMLLDAGAKIDFKNEIGHYAPLWACVYGSLNVLKRFLAAGWNPNAAVVTNGPWELNFSYDSIAPIHMACYYGHNSIIQFLLDRGVEIEIGMGKSSTSASRTPLVIAAERNHLNAIRLLVNAGADLNRGLARWGTPLTSAAENGHTDAVRLLLLYGAVVYDPEHQINHLVCSWRSDSLTVLELLAEAAIRLPNGREAIVKAIEAWNRWNFPVRFVENWNESHLSLLNEHVGPTPGGLLAACIKGSATVVRSMLDGGIFADTRNEKDFSALHLATRFLHADVVEVLLQHGADALNDTRPEYGNLINAAMFSLVKKCLPDKATPLFEEEKRMQKWHWNSWGCPQEISCERIVTLLIEHGVEASHDPFLFGTSFHLACFIGNETIIKLLLSKGADVHSTAGYFGSPLFAAIHRKNYRAVEILLQEGVDPDTCHHELGTALMYARRYKAEDIAELLLWSGATPEEEH

SEQ ID NO: 10351 - DNA, 1479 bp, Muscodor strobelii
  misc_feature: SGI cDNA ID NO. 563282
  misc_feature: Reduced expression when VOC is produced
  misc_feature: Encodes the peptide sequence at SEQ ID NO 10352
atgacgcacgtcgacttcctcctccacgaaacggcgacgggctacgccctcttcaaggtcgtccaccagcaagatgccgtggcattgcgcctcgacgaggtccgcagcgccggccaggacctcggaaagctcggcaagatggtccagctgacctcgtatgccgtctggcggtctgccgctgaggcgcttgagaacatccacagcgtgtccgagggcctcatgaccgactacctcaaatccaccctcgaactcaacctgccctcttccaagaagtccaagatcgtgctcggcctcgcagacaagaccttggccggctccatcaaggccgcctttcccggtgtcgaatgcgagactggcgacacctccgaagtcgtagccgacctgctccgtggaattcgcctgttttcctccaagctgctcaagggactcaatgagggtgatgaggagaaggctcaactcggtcttggccatgcttactcgaggagtaaggtcaagttcaacgttcaccgcaacgacaaccacatcataagatccatcgctactctcgataacctcgataagggtatcaaccttttcagccagaaactcagagagtggtactcatggcacttcccggaactttatgcgatcgcttctgataatctcacctacgcgaaattggcgctgtttatcggtgacaaggccacgctctctgacgacaagctgcacgaactggcctccataatgggtgatgatgaggaaaaggctcaagagatcatcaacaaggctaagatgagcatgggccgggaactgagtgccgtcgacctcgagaatgtgaccacctttgcgaagaaggtctcgagccttgccgaataccgacgaactttgtacagctaccttgtggacaagatgagccaggtcgctcccaatttggcatctctgatcggcgagactgtggctgcccgtcttatccagaaggccggatcattgaccaacttatccaaatatcctgcctcgacgctccagattctgggtgctgagaaggctcttttccgtgccttgaaggccaaaatccaacacccccaaggtcgtatcagccgatacctcgccaacaagtgtagtattgctgcgcgtattgacaacttttccgagcacccctccaagaagtttggtgaagttctgcgcggccaggttgaggacaggctcgaattctacgccactggcaagaaaccgaccaagaactccgatgccatggacaaggctgttgctgatttgttagccgagggcgacgatatggccatcgacacggaggagattgacgcaccactccccaagacatcagaagaagccggcaagaaagagaagaagtccaaggacaagaaggagaagaaagataaaaaggaggacaagaaagataagaagcgccgacacagcgaagccgcaggggaggacgacggcgagaagaagaagaaaaagaagaagagggcatccgaggtctaa

SEQ ID NO: 10352 - protein, 492 aa, Muscodor strobelii
  misc_feature: SGI Peptide ID NO. 563282
  misc_feature (271)..(401): Pfam Id: PF01798 Pfam Desc: snoRNA binding domain
  misc_feature (5)..(72): Pfam Id: PF08156 Pfam Desc: NOP5NT (NUC127) domain
  misc_feature (174)..(226): Pfam Id: PF08060 Pfam Desc: NOSIC (NUC001) domain
  misc_feature (271)..(350): Pfam Id: PF01798 Pfam Desc: snoRNA binding domain
  misc_feature (355)..(401): Pfam Id: PF01798 Pfam Desc: snoRNA binding domain
  misc_feature (1)..(435): NCBI GI: 156039375 Blast Desc: SS1G_11824 [Sclerotinia sclerotiorum 1980] gi|154697561|gb|EDN97299.1| SS1G_11824 [Sclerotinia sclerotiorum 1980]
  misc_feature (1)..(436): NCBI GI: 46138851 Blast Desc: FG10940.1 [Gibberella zeae PH-1]
  misc_feature (1)..(437): NCBI GI: 256729037 Blast Desc: [Nectria haematococca mpVI 77-13-4]
  misc_feature (1)..(433): NCBI GI: 39973241 Blast Desc: MGG_07915 [Magnaporthe grisea 70-15] gi|145012729|gb|EDJ97383.1| MGG_07915 [Magnaporthe grisea 70-15]
  misc_feature (5)..(433): NCBI GI: 119492009 Blast Desc: pre-rRNA processing nucleolar protein Sik1, [Neosartorya fischeri NRRL 181] gi|119411659|gb|EAW21602.1| pre-rRNA processing nucleolar protein Sik1, [Neosartorya fischeri
  misc_feature (1)..(434): NCBI GI: 164424643 Blast Desc: protein SIK1 [Neurospora crassa OR74A] gi|157070601|gb|EAA28813.2| protein SIK1 [Neurospora crassa OR74A]
  misc_feature (5)..(420): NCBI GI: 70999884 Blast Desc: pre-rRNA processing nucleolar protein Sik1 [Aspergillus fumigatus Af293] gi|66852296|gb|EAL92621.1| pre-rRNA processing nucleolar protein Sik1, [Aspergillus fumigatus Af293]
  misc_feature (5)..(436): NCBI GI: 119195045 Blast Desc: nucleolar protein NOP56 [Coccidioides immitis RS]
  misc_feature (5)..(436): NCBI GI: 240105051 Blast Desc: SIK1 protein, [Coccidioides posadasii C735 delta SOWgp]
  misc_feature (5)..(431): NCBI GI: 242786087 Blast Desc: pre-rRNA processing nucleolar protein Sik1, [Talaromyces stipitatus ATCC 10500] gi|218720880|gb|EED20299.1| pre-rRNA processing nucleolar protein Sik1, [Talaromyces ATCC
  misc_feature: Useful for introducing or modulating the production of volatile compounds
MTHVDFLLHETATGYALFKVVHQQDAVALRLDEVRSAGQDLGKLGKMVQLTSYAVWRSAAEALENIHSVSEGLMTDYLKSTLELNLPSSKKSKIVLGLADKTLAGSIKAAFPGVECETGDTSEVVADLLRGIRLFSSKLLKGLNEGDEEKAQLGLGHAYSRSKVKFNVHRNDNHIIRSIATLDNLDKGINLFSQKLREWYSWHFPELYAIASDNLTYAKLALFIGDKATLSDDKLHELASIMGDDEEKAQEIINKAKMSMGRELSAVDLENVTTFAKKVSSLAEYRRTLYSYLVDKMSQVAPNLASLIGETVAARLIQKAGSLTNLSKYPASTLQILGAEKALFRALKAKIQHPQGRISRYLANKCSIAARIDNFSEHPSKKFGEVLRGQVEDRLEFYATGKKPTKNSDAMDKAVADLLAEGDDMAIDTEEIDAPLPKTSEEAGKKEKKSKDKKEKKDKKEDKKDKKRRHSEAAGEDDGEKKKKKKKRASEV

SEQ ID NO: 10353 - DNA, 1894 bp, Muscodor strobelii
  misc_feature: SGI EST ID NO. CUFF.24477.0
  misc_feature: Variant of the nucleotide sequence at SEQ ID NO 10351
gaaaattttggattcgaagcttcaattcagatttgctgctgccgaatccaatcgacgacatttgcgccattcgacatcccaccgtcggcacccctcgcaatcatgacgcacgtcgacttcctcctccacgaaacggcgacgggctacgccctcttcaaggtcgtccaccagcaagatgccgtggcattgcgcctcgacgaggtccgcagcgccggccaggacctcggaaagctcggcaagatggtccagctgacctcgtatgccgtctggcggtctgccgctgaggcgcttgagaacatccacagcgtgtccgagggcctcatgaccgactacctcaaatccaccctcgaactcaacctgccctcttccaagaagtccaagatcgtgctcggcctcgcagacaagaccttggccggctccatcaaggccgcctttcccggtgtcgaatgcgagactggcgacacctccgaagtcgtagccgacctgctccgtggaattcgcctgttttcctccaagctgctcaagggactcaatgagggtgatgaggagaaggctcaactcggtcttggccatgcttactcgaggagtaaggtcaagttcaacgttcaccgcaacgacaaccacatcataagatccatcgctactctcgataacctcgataagggtatcaaccttttcagccagaaactcagagagtggtactcatggcacttcccggaactttatgcgatcgcttctgataatctcacctacgcgaaattggcgctgtttatcggtgacaaggccacgctctctgacgacaagctgcacgaactggcctccataatgggtgatgatgaggaaaaggctcaagagatcatcaacaaggctaagatgagcatgggccgggaactgagtgccgtcgacctcgagaatgtgaccacctttgcgaagaaggtctcgagccttgccgaataccgacgaactttgtacagctaccttgtggacaagatgagccaggtcgctcccaatttggcatctctgatcggcgagactgtggctgcccgtcttatccagaaggccggatcattgaccaacttatccaaatatcctgcctcgacgctccagattctgggtgctgagaaggctcttttccgtgccttgaaggccaaaatccaacacccccaagtacggcttgatctaccacagcagttttattggaagagctggacccaaggacaagggtcgtatcagccgatacctcgccaacaagtgtagtattgctgcgcgtattgacaacttttccgagcacccctccaagaagtttggtgaagttctgcgcggccaggttgaggacaggctcgaattctacgccactggcaagaaaccgaccaagaactccgatgccatggacaaggctgttgctgatttgttagccgagggcgacgatatggccatcgacacggaggagattgacgcaccactccccaagacatcagaagaagccggcaagaaagagaagaagtccaaggacaagaaggagaagaaagataaaaaggaggacaagaaagataagaagcgccgacacagcgaagccgcaggggaggacgacggcgagaagaagaagaaaaagaagaagagggcatccgaggtctaagatggcttcgagtctagatgtgttgtcgttatctgacgtgtcttacgcatggttcacgggcgttccggatgtaggggtatgtcttttgtctacgggtgttgtatgtgtgaatacctgggatcatacccattgtgtttccctcctttcctctgtcgaactccttggcctcgtactactatttgctgccgtgtctgtgtggcagaggggaataaaaatcaaaacttcaataattcgatttggatggtgataagatggtca

SEQ ID NO: 10354 - DNA, 1311 bp, Muscodor strobelii
  misc_feature: SGI cDNA ID NO. 563283
  misc_feature: Encodes the peptide sequence at SEQ ID NO 10355
atgtcgaacaccgacttcctcgggcgggcaatcgacacggtccgccgcgccatcgacgccgacaacggcaaccaatacgataaagcctaccagctgtactaccaatccctcgagctcttcatgctagccctaaaatgggagaagaaccccaagtccaaggagatgatccgccagaagacagcagagtatatggaccgcgccgagaagctaaaggcgcacttatccgacgccgaagcgaagcgcaaaaaacccggcatggtaggggctaacggctcctccacgggcggcactggcaagggcaaacaggacggtgaagatggcgctgtcgacgaagactcgaagaaattgcgcaatgcacttgcgggtgcgattctgcaggataggccgaatgtcaagtgggatgatgtcgcgggtctggacggggccaaggaggcgttgaaagaggctgttctgctgccgatcaagttcccacatctgtttgttgggaagcggaagccgtggaagggtatcctgctctatggtccgcccggtacgggtaagagttatttggccaaggccgttgctaccgaggccaagagcacgttcttcagtgttagctcgagtgatttggtcagtaagtggatgggtgaaagtgaacggttggtaaaacaactcttcgccatggcacgagagaacaaaccctccatcatattcatcgacgaagtcgacgccctctgtggtccccgaggcgaaggcgaatccgaagcatcgcggcgcatcaaaaccgaaatgctcgtacagatggatggcgttggcaaggactcgacaggcgtgctcgtactaggcgctaccaacatcccctggcaactcgacgccgcgatccgaagacgatttcagcggagagtccacatcagtctgcctgatgtcggcgcaaggacgaccatgttcaaaatcgctattggagagacacctaccacgttaaagaacgatgattacagagaacttgcgaagctggctgatggatactcgggaagtgatattacgattgcggtgcaggatgctcttatgcagccagtgcggaagattcaacaggcgacgcattttaaagaggtccaaaaagacggcgaaacgcgactaacgccctgctcccccggcgacaagggcgcaaaagaaatgacgtgggacgacgtagaagcagagctactcctcgagcccctggtagatttcaaggatttcgtcaaagctataaagtcgtcccgccccacggtcgcagatgaggacttgaagcggaattctgactggactaaggagtttggcagtgaaggaaactaa

SEQ ID NO: 10355 - protein, 436 aa, Muscodor strobelii
  misc_feature: SGI Peptide ID NO. 563283
  misc_feature (169)..(353): Pfam Id: PF00004 Pfam Desc: ATPase family associated with various cellular activities (AAA)
  misc_feature (6)..(74): Pfam Id: PF04212 Pfam Desc: MIT (microtubule interacting and transport) domain
  misc_feature (371)..(432): Pfam Id: PF09336 Pfam Desc: Vps4 C terminal oligomerisation domain
  misc_feature (1)..(435): NCBI GI: 116203993 Blast Desc: conserved [Chaetomium globosum CBS 148.51] gi|88176008|gb|EAQ83476.1| conserved [Chaetomium globosum CBS 148.51]
  misc_feature (1)..(435): NCBI GI: 85089655 Blast Desc: vacuolar protein sorting-associated protein VPS4 [Neurospora crassa OR74A] gi|28919362|gb|EAA28812.1| vacuolar protein sorting-associated protein VPS4 [Neurospora crassa OR74A]
  misc_feature (1)..(435): NCBI GI: 171678873 Blast Desc: protein product [Podospora anserina] gi|170937507|emb|CAP62165.1| protein product [Podospora anserina]
  misc_feature (1)..(435): NCBI GI: 156039377 Blast Desc: SS1G_11825 [Sclerotinia sclerotiorum 1980] gi|154697562|gb|EDN97300.1| SS1G_11825 [Sclerotinia sclerotiorum 1980]
  misc_feature (1)..(435): NCBI GI: 145252200 Blast Desc: An16g03010 [Aspergillus niger] gi|134083158|emb|CAK48610.1| protein product [Aspergillus niger]
  misc_feature (1)..(435): NCBI GI: 238484427 Blast Desc: vacuolar sorting ATPase Vps4, [Aspergillus flavus NRRL3357] gi|220701502|gb|EED57840.1| vacuolar sorting ATPase Vps4, [Aspergillus flavus NRRL3357]
  misc_feature (1)..(435): NCBI GI: 121705368 Blast Desc: vacuolar sorting ATPase Vps4, [Aspergillus clavatus NRRL 1] gi|119399093|gb|EAW09521.1| vacuolar sorting ATPase Vps4, [Aspergillus clavatus NRRL 1]
  misc_feature (1)..(435): NCBI GI: 255934450 Blast Desc: Pc12g16060 [Penicillium chrysogenum Wisconsin 54-1255] gi|211583023|emb|CAP81233.1| Pc12g16060 [Penicillium chrysogenum Wisconsin 54-1255]
  misc_feature (1)..(435): NCBI GI: 115384726 Blast Desc: vacuolar protein sorting-associated protein VPS4 [Aspergillus terreus NIH2624] gi|114196602|gb|EAU38302.1| vacuolar protein sorting-associated protein VPS4 [Aspergillus
  misc_feature (1)..(435): NCBI GI: 169767528 Blast Desc: [Aspergillus oryzae RIB40] gi|83766090|dbj|BAE56233.1| protein product [Aspergillus oryzae]
  misc_feature (114)..(433): SWISSPROT Homolog: EC 3.6.4.3 Microtubule-severing ATPase
MSNTDFLGRAIDTVRRAIDADNGNQYDKAYQLYYQSLELFMLALKWEKNPKSKEMIRQKTAEYMDRAEKLKAHLSDAEAKRKKPGMVGANGSSTGGTGKGKQDGEDGAVDEDSKKLRNALAGAILQDRPNVKWDDVAGLDGAKEALKEAVLLPIKFPHLFVGKRKPWKGILLYGPPGTGKSYLAKAVATEAKSTFFSVSSSDLVSKWMGESERLVKQLFAMARENKPSIIFIDEVDALCGPRGEGESEASRRIKTEMLVQMDGVGKDSTGVLVLGATNIPWQLDAAIRRRFQRRVHISLPDVGARTTMFKIAIGETPTTLKNDDYRELAKLADGYSGSDITIAVQDALMQPVRKIQQATHFKEVQKDGETRLTPCSPGDKGAKEMTWDDVEAELLLEPLVDFKDFVKAIKSSRPTVADEDLKRNSDWTKEFGSEGN

SEQ ID NO: 10356 - DNA, 3141 bp, Muscodor strobelii
  misc_feature: SGI EST ID NO. CUFF.24647.1
  misc_feature: Variant of the nucleotide sequence at SEQ ID NO 10354
cgcgcaatgagttataccattgaaactttcatgcgagatcgaaatttaaaccacccaccatggcatctagattatgcttaacggccttccatcaagacttatctcatccttactggtcccgaaaatagagatctccaggtcgtgatgagctgtcagtctcaggctttccagtgctgcatacaactcttgtgccattcacatagtcttatgagacatactcattgtgacgccgggctatcctctttctcaagcactttgagatttgattgtccacaaacattgacaggacgttgaaagtgtcccgtcgcattctcgtcccagccctcgacaagttcccatcgtgatactcatggaaacggggtgtgcttctcgtcgaactcatttcttgccctgaggtgcaccgccaggttgcaggcctgcttgagtctgtatgatatctcccttcttcttttctatcttttcttggatctcctttatctgtccctctgtgcggtcactggccaaggtcacaaccattagtacccgttcagcagcccccaaatagtattatttcactcacatctccttgttgatgaactccaagcggcccttgaccgtgctctctgcttctaccttctcctgcttcagcagtatggggccagcaattttgtatatgctctctccatccttcagtctctcaaactcctagcatcgtattaatgagaaagtggaacggtagtactgggctaagatccttataccttctgcacccctgtgttctcttgtctctgggcctctaatctctgctgagcatcgactgctgtctgcagttcttgctgaaatttttggtactcttcagacagtgcctggatcttggcttgagcttctgccatggctgcttcgccagactttgtgctgcacgcgaaaccaacaaccaaggcgtgacggtgaagtttttatgtcaaaatttgaaaggtgggatgattagagtgacggatccgattatttacctgacttcaagctcctggaggccgtagtatatctctattgctccaaatcagagctccagcatcgcggggcattcaagttactgagctgcccatggttgtggcttgcgcatgtaaattaaccaatcgataaggacttcagatccagctccttcaaagtcagagcccctccagatttcaaggaggctagacctgttcgaggccctgggctacgactatccttggctaaggtacggtaggcaggccaacgtcacaacttgaacactgaccctctcatcccacgataccctcccacctactcctctacgtagcgctcgtcaacgacttcgctatctgcctgtacccaagatagcctttggcgtgctcgatccatcgttgtgctacttaggtcgttttcctacgagggccagtatcgggaaacaaatccatctcacgcctaacaaacgcccgataccccaaccccaaccccagcgcccgcgtaaaccaagatcgacaacaccagcagctgcaacaatgtcgaacaccgacttcctcgggcgggcaatcgacacggtccgccgcgccatcgacgccgacaacggcaaccaatacgataaagcctaccagctgtactaccaatccctcgagctcttcatgctagccctaaaatgggagaagaaccccaagtccaaggagatgatccgccagaagacagcagagtatatggaccgcgccgagaagctaaaggcgcacttatccgacgccgaagcgaagcgcaaaaaacccggcatggtaggggctaacggctcctccacgggcggcactggcaagggcaaacaggacggtgaagatggcgctgtcgacgaagactcgaagaaattgcgcaatgcacttgcgggtgcgattctgcaggataggccgaatgtcaagtgggatgatgtcgcgggtctggacggggccaaggaggcgttgaaagaggctgttctgctgccgatcaagttcccacatctgtttgttgggaagcggaagccgtggaagggtatcctgctctatggtccgcccggtacgggtaagagttatttggccaaggccgttgctaccgaggccaagagcacgttcttcagtgttagctcgagtgatttggtcagtaagtggatgggtgaaagtgaacggttggtaaaacaactcttcgccatggcacgagagaacaaaccctccatcatattcatcgacgaagtcgacgccctctgtggtccccgaggcgaaggcgaatccgaagcatcgcggcgcatcaaaaccgaaatgctcgtacagatggatggcgttggcaaggactcgacaggcgtgctcgtactaggcgctaccaacatcccctggcaactcgacgccgcgatccgaagacgatttcagcggagagtccacatcagtctgcctgatgtcggcgcaaggacgaccatgttcaaaatcgctattggagagacacctaccacgttaaagaacgatgattacagagaacttgcgaagctggctgatggatactcgggaagtgatattacgattgcggtgcaggatgctcttatgcagccagtgcggaagattcaacaggcgacgcattttaaagaggtccaaaaagacggcgaaacgcgactaacgccctgctcccccggcgacaagggcgcaaaagaaatgacgtgggacgacgtagaagcagagctactcctcgagcccctggtagatttcaaggatttcgtcaaagctataaagtcgtcccgccccacggtcgcagatgaggacttgaagcggaattctgactggactaaggagtttggcagtgaaggaaactaaaccccgaaataaaagggggatgagacgagaaacgaaagaaacggatggcgcagaaattacatagtacagaacgatgggaagcgacggggcgaggcgaggatggcattattcgggcgtttgaggcgtcgtattggatcggattgggttggtgctcggggagattacatggtcgtggtgatatttagatcatcgattatcggctatgattactactacatactacagacgatgactttcagatctggcaagaacaagacttgatgccacataatgaaaatgtcgcttcaattagactacgcccgttgtcattatctgagttcataatagcctc

SEQ ID NO: 10357 - DNA, 375 bp, Muscodor strobelii
  misc_feature: SGI cDNA ID NO. 563284
  misc_feature: Encodes the peptide sequence at SEQ ID NO 10358
atggcagaagctcaagccaagatccaggcactgtctgaagagtaccaaaaatttcagcaagaactgcagacagcagtcgatgctcagcagagattagaggcccagagacaagagaacacaggggtgcagaaggagtttgagagactgaaggatggagagagcatatacaaaattgctggccccatactgctgaagcaggagaaggtagaagcagagagcacggtcaagggccgcttggagttcatcaacaaggagattgaccgcacagagggacagataaaggagatccaagaaaagatagaaaagaagaagggagatatcatacagactcaagcaggcctgcaacctggcggtgcacctcagggcaagaaatga

SEQ ID NO: 10358 - protein, 124 aa, Muscodor strobelii
  misc_feature: SGI Peptide ID NO. 563284
  misc_feature (9)..(114): Pfam Id: PF01920 Pfam Desc: Prefoldin subunit
  misc_feature (1)..(113): NCBI GI: 145604827 Blast Desc: MGG_07931 [Magnaporthe grisea 70-15] gi|145012748|gb|EDJ97402.1| MGG_07931 [Magnaporthe grisea 70-15]
  misc_feature (1)..(124): NCBI GI: 171678871 Blast Desc: protein product [Podospora anserina] gi|170937506|emb|CAP62164.1| protein product [Podospora anserina]
  misc_feature (5)..(124): NCBI GI: 85089653 Blast Desc: NCU06941 [Neurospora crassa OR74A] gi|28919361|gb|EAA28811.1| conserved [Neurospora crassa OR74A]
  misc_feature (4)..(108): NCBI GI: 261354733 Blast Desc: conserved [Verticillium albo-atrum VaMs.102]
  misc_feature (1)..(120): NCBI GI: 238840915 Blast Desc: conserved [Microsporum canis CBS 113480]
  misc_feature (1)..(108): NCBI GI: 46138897 Blast Desc: FG10963.1 [Gibberella zeae PH-1]
  misc_feature (21)..(118): NCBI GI: 256729024 Blast Desc: NECHADRAFT_19887 [Nectria haematococca mpVI 77-13-4]
  misc_feature (1)..(108): NCBI GI: 169767530 Blast Desc: [Aspergillus oryzae RIB40] gi|83766091|dbj|BAE56234.1| protein product [Aspergillus oryzae]
  misc_feature (1)..(112): NCBI GI: 121705366 Blast Desc: prefoldin subunit 6, [Aspergillus clavatus NRRL 1] gi|119399092|gb|EAW09520.1| prefoldin subunit 6, [Aspergillus clavatus NRRL 1]
  misc_feature (1)..(107): NCBI GI: 115384728 Blast Desc: conserved [Aspergillus terreus NIH2624] gi|114196603|gb|EAU38303.1| conserved [Aspergillus terreus NIH2624]
MAEAQAKIQALSEEYQKFQQELQTAVDAQQRLEAQRQENTGVQKEFERLKDGESIYKIAGPILLKQEKVEAESTVKGRLEFINKEIDRTEGQIKEIQEKIEKKKGDIIQTQAGLQPGGAPQGKK

SEQ ID NO: 10359 - DNA, 3185 bp, Muscodor strobelii
  misc_feature: SGI EST ID NO. CUFF.24646.0
  misc_feature: Variant of the nucleotide sequence at SEQ ID NO 10357
gaggctattatgaactcagataatgacaacgggcgtagtctaattgaagcgacattttcattatgtggcatcaagtcttgttcttgccagatctgaaagtcatcgtctgtagtatgtagtagtaatcatagccgataatcgatgatctaaatatcaccacgaccatgtaatctccccgagcaccaacccaatccgatccaatacgacgcctcaaacgcccgaataatgccatcctcgcctcgccccgtcgcttcccatcgttctgtactatgtaatttctgcgccatccgtttctttcgtttctcgtctcatcccccttttatttcggggtttagtttccttcactgccaaactccttagtccagtcagaattccgcttcaagtcctcatctgcgaccgtggggcgggacgactttatagctttgacgaaatccttgaaatctaccaggggctcgaggagtagctctgcttctacgtcgtcccacgtcatttcttttgcgcccttgtcgccgggggagcagggcgttagtcgcgtttcgccgtctttttggacctgggatgcgtgttagtcttgggtggtttaaaaggggaaaggaaaacaagaaggggggttcgaggcggatagagagtagagtagggagatagtttagaatgtacctctttaaaatgcgtcgcctgttgaatcttccgcactggctgcataagagcatcctgcaccgcaatcgtaatatcacttcccgagtatccatcagccagcttcgcaagttctctgtaatcatcgttctttaacgtggtaggtgtctctccaatagcgattttgaacatggtcgtccttgcgccgacatcaggcagactgatgtggactctccgctgaaatcgtcttcggatcgcggcgtcgagttgccaggggatgttggtagcgcctagtacgagcacgcctgtcgagtccttgccaacgccatccatctgtacgagcatttcggttttgatgcgccgcgatgcttcggattcgccttcgcctcggggaccacagagggcgtcgacttcgtcgatgaatatgatggagggtttgttctctcgtgccatggcgaagagttgttttaccaacctgtaagccaacatattagcactgacgcattaaagtagtaagggggtaacactacataccgttcactttcacccatccacttactgaccaaatcactcgagctaacactgaagaacgtgctcttggcctcggtagcaacggccttggccaaataactcttacccgtaccgggcggaccatagagcaggatacccttccacggcttccgcttcccaacaaacagatgtgggaacttgatcggcagcagaacagcctctttcaacgcctccttggccccgtccagacccgcgacatcatcccacttgacattcggcctatcctgcagaatcgcacccgcaagtgcattgcgcaatttcttcgagtcttcgtcgacagcgccatcttcaccgtcctgtttgcccttgccagtgccgcccgtggaggagccgttagcccctaccatgccgggttttttgcgcttcgcttcggcgtcggataagtgcgcctttagcttctcggcgcggtccatatactctgctgtcttctggcggatcatctccttggacttggggttcttctcccattttagggctagcatgaagagctcgagggattggtagtacagctggtaggctttatcgtattggttgccgttgtcggcgtcgatggcgcggcggaccgtgtcgattgcccgcccgaggaagtcggtgttcgacattgttgcagctgctggtgttgtcgatcttggtttacgcgggcgctggggttggggttggggtatcgggcgtttgttaggcgtgagatggatttgtttcccgatactggccctcgtaggaaaacgacctaagtagcacaacgatggatcgagcacgccaaaggctatcttgggtacaggcagatagcgaagtcgttgacgagcgctacgtagaggagtaggtgggagggtatcgtgggatgagagggtcagtgttcaagttgtgacgttggcctgcctaccgtaccttagccaaggatagtcgtagcccagggcctcgaacaggtctagcctccttgaaatctggaggggctctgactttgaaggagctggatctgaagtccttatcgattggttaatttacatgcgcaagccacaaccatgggcagctcagtaacttgaatgccccgcgatgctggagctctgatttggagcaatagagatatactacggcctccaggagcttgaagtcaggtaaataatcggatccgtcactctaatcatcccacctttcaaattttgacataaaaacttcaccgtcacgccttggttgttggtttcgcgtgcagcacaaagtctggcgaagcagccatggcagaagctcaagccaagatccaggcactgtctgaagagtaccaaaaatttcagcaagaactgcagacagcagtcgatgctcagcagagattagaggcccagagacaagagaacacaggggtgcagaaggagtttgagagactgaaggatggagagagcatatacaaaattgctggccccatactgctgaagcaggagaaggtagaagcagagagcacggtcaagggccgcttggagttcatcaacaaggagattgaccgcacagagggacagataaaggagatccaagaaaagatagaaaagaagaagggagatatcatacagactcaagcaggcctgcaacctggcggtgcacctcagggcaagaaatgagttcgacgagaagcacaccccgtttccatgagtatcacgatgggaacttgtcgagggctgggacgagaatgcgacgggacactttcaacgtcctgtcaatgtttgtggacaatcaaatctcaaagtgcttgagaaagaggatagcccggcgtcacaatgagtatgtctcataagactatgtgaatggcacaagagttgtatgcagcactggaaagcctgagactgacagctcatcacgacctggagatctctattttcgggaccagtaaggatgagataagtcttgatggaaggccgttaagcataatctagatgccatggtgggtggtttaaatttcgatctcgcatgaaagtttcaatggtataactcattgcgcg

SEQ ID NO: 10360 - DNA, 1710 bp, Muscodor strobelii
  misc_feature: SGI cDNA ID NO. 563285
  misc_feature: Encodes the peptide sequence at SEQ ID NO 10361
atgccttcacaagctgtgcctgcggacgacattggtcgtcccttgagtgtcaaggagctctcggagcgtgctgccaattatcaatggaacgctaatatccctttgaaaacttggctgcgcacagctcagacgctatttcaagaaggaaatatatatctgaatgagggaaaactgtcccaagcctatctcctatacctccgctatactagtctcatgctcgacaacctcaggcagcatcccgaagtcttacagagcaaagacgccaaaaatgcactgaaatccaagatatccaatgtcaaggatgtcttgcatcatctcgagaagctcaagcctatcatacaacgccaatatgaggaatggtatgctgcgcagctgcagaaacaacaaaggtccaccagcgatgagcatgatggtgccgaggatcatgcagagcatgcactctcagcctacaagcagcatgcttctagggaccctgccctgtcatctgccagtcgcatactggatgcaggtcagaatcaagatcttgccatccagctagcccagcgggagtttaaacgcagagatgagaagaagaggactgcccgacaagctggtatgactccacaacaggagcaaacacgccgagctgctgggttttggaacaattggacagatgagttagcagataggcaagcagaggaggaggagatatttcggcgacaaatgacttcttccagacagaactatgatgccaacctctacgatttcagccaccaaccggctgtcagtcgaaaggacactctgccaggactgtcgcaacctgctaagcagtactcctacccgtccatcaccaagtcgacccccgtagactatgacccccagcaacaccgccagagtactccgcgactcgaccaaccccccttaccacccaagaagccagaaggctacgtctcccaccagttacctcccctagcgccagaacttccggctaaaacaccaatggacatggggcagaagctcccaaagcttcacaagtctgctggctcccaggagctgcccagtcgccctcctaaagtagtagaatccgaggcccagcctgtgcagaagcaacaaggcgtgtccttcaagccagcagcctatctcgagaacggtagcccaatccgacccatctttcttcctcgtggtttacgccgcaagtttctcgacattgcttctgagcacaccaaaaaaggactagagatgtgtggcatcttgtgcggcactgctgttaacaacgcgctgttcattcgttgcctactcatccccgagcagaattgcacttcagacacgtgtgagacggtgaatgaaggcgcaatgctcgactactgtctcagcgaggacttgctgatgcttggctggatccatacccatccgacccagacctgcttcatgagctcacgagatctgcacacgcagtccggataccaggtcatgctccctgagagtattgcgattgtgtgtgcgcccaagttcgagccttcatatggcatcttccgtctcaccaatccccctggtcttccacatatcctcgagtgcaaccagtcggccactttccaccaacattctgtcgacaacctatataccggcgcagagcacccgcccggtcacgtgtatgagcacgataatctagactggtacgtggaggatatcagacccgaggctaagctcagtatgccgagcaagaaattctag

SEQ ID NO: 10361 - protein, 569 aa, Muscodor strobelii
  misc_feature: SGI Peptide ID NO. 563285
  misc_feature (378)..(487): Pfam Id: PF01398 Pfam Desc: Mov34/MPN/PAD-1 family
  misc_feature (392)..(487): Pfam Id: PF01398 Pfam Desc: Mov34/MPN/PAD-1 family
  misc_feature (13)..(559): NCBI GI: 261354735 Blast Desc: STAM-binding protein [Verticillium albo-atrum VaMs.102]
  misc_feature (13)..(551): NCBI GI: 116203997 Blast Desc: CHGG_09882 [Chaetomium globosum CBS 148.51] gi|88176010|gb|EAQ83478.1| CHGG_09882 [Chaetomium globosum CBS 148.51]
  misc_feature (11)..(558): NCBI GI: 156042970 Blast Desc: SS1G_11284 [Sclerotinia sclerotiorum 1980] gi|154695669|gb|EDN95407.1| SS1G_11284 [Sclerotinia sclerotiorum 1980]
  misc_feature (11)..(558): NCBI GI: 154313348 Blast Desc: BC1G_05371 [Botryotinia fuckeliana B05.10] gi|150849440|gb|EDN24633.1| BC1G_05371 [Botryotinia fuckeliana B05.10]
  misc_feature (14)..(560): NCBI GI: 71000052 Blast Desc: endosome-associated ubiquitin isopeptidase (AmsH) [Aspergillus fumigatus Af293] gi|66852380|gb|EAL92705.1| endosome-associated ubiquitin isopeptidase (AmsH), [Aspergillus
  misc_feature (13)..(569): NCBI GI: 164424647 Blast Desc: NCU06939 [Neurospora crassa OR74A] gi|157070603|gb|EAA28809.2| [Neurospora crassa OR74A]
  misc_feature (15)..(559): NCBI GI: 145604829 Blast Desc: MGG_13915 [Magnaporthe grisea 70-15] gi|145012749|gb|EDJ97403.1| MGG_13915 [Magnaporthe grisea 70-15]
  misc_feature (14)..(558): NCBI GI: 115384830 Blast Desc: ATEG_01597 [Aspergillus terreus NIH2624] gi|114196654|gb|EAU38354.1| ATEG_01597 [Aspergillus terreus NIH2624]
  misc_feature (1)..(560): NCBI GI: 145234009 Blast Desc: An02g12490 [Aspergillus niger] gi|134057317|emb|CAK44516.1| protein product [Aspergillus niger]
  misc_feature (14)..(559): NCBI GI: 119492256 Blast Desc: endosome-associated ubiquitin isopeptidase (AmsH), [Neosartorya fischeri NRRL 181] gi|119411727|gb|EAW21670.1| endosome-associated ubiquitin isopeptidase (AmsH), [Neosartorya
  misc_feature (226)..(557): SWISSPROT Homolog: EC 3.1.2.15 Ubiquitin thiolesterase
MPSQAVPADDIGRPLSVKELSERAANYQWNANIPLKTWLRTAQTLFQEGNIYLNEGKLSQAYLLYLRYTSLMLDNLRQHPEVLQSKDAKNALKSKISNVKDVLHHLEKLKPIIQRQYEEWYAAQLQKQQRSTSDEHDGAEDHAEHALSAYKQHASRDPALSSASRILDAGQNQDLAIQLAQREFKRRDEKKRTARQAGMTPQQEQTRRAAGFWNNWTDELADRQAEEEEIFRRQMTSSRQNYDANLYDFSHQPAVSRKDTLPGLSQPAKQYSYPSITKSTPVDYDPQQHRQSTPRLDQPPLPPKKPEGYVSHQLPPLAPELPAKTPMDMGQKLPKLHKSAGSQELPSRPPKVVESEAQPVQKQQGVSFKPAAYLENGSPIRPIFLPRGLRRKFLDIASEHTKKGLEMCGILCGTAVNNALFIRCLLIPEQNCTSDTCETVNEGAMLDYCLSEDLLMLGWIHTHPTQTCFMSSRDLHTQSGYQVMLPESIAIVCAPKFEPSYGIFRLTNPPGLPHILECNQSATFHQHSVDNLYTGAEHPPGHVYEHDNLDWYVEDIRPEAKLSMPSKKF

SEQ ID NO: 10362 - DNA, 3639 bp, Muscodor strobelii
  misc_feature: SGI EST ID NO. CUFF.24618.1
  misc_feature: Variant of the nucleotide sequence at SEQ ID NO 10360
cgcaggagctgcagggaaacttgtcgtcaataacatctgacgatggacctgcacacctctcccaactgcttcatttccgtgtcgctggtccgacgccgtcgactccacgctgcttcacatgctccatatctctcgcattgctaaacaacattgatctcactcttacctccacagcattgccattgcaaactgtcgacaacacccagcgccacgtcagccacttccaggcaacaagaagagcaaagagggcaaagagagcaaactcatctgtgctagatcatccatcagaaaacctacaatgtactcttaatccttaattgctgctttccaaacgttccgactctccccgactgtcacgatcgttgatcgaatgcgagactcccatagccattcgcatctctgcgtgcgccgaccagccctttcaatatgccttcacaagctgtgcctgcggacgacattggtcgtcccttgagtgtcaaggagctctcggagcgtgctgccaattatcaatggaacgctaatatccctttgaaaacttggctgcgcacagctcagacgctatttcaagaaggaaatatatatctgaatgagggaaaactgtcccaagcctatctcctatacctccgctatactagtctcatgctcgacaacctcaggcagcatcccgaagtcttacagagcaaagacgccaaaaatgcactgaaatccaagatatccaatgtcaaggatgtcttgcatcatctcgagaagctcaagcctatcatacaacgccaatatgaggaatggtatgctgcgcagctgcagaaacaacaaaggtccaccagcgatgagcatgatggtgccgaggatcatgcagagcatgcactctcagcctacaagcagcatgcttctagggaccctgccctgtcatctgccagtcgcatactggatgcaggtcagaatcaagatcttgccatccagctagcccagcgggagtttaaacgcagagatgagaagaagaggactgcccgacaagctggtatgactccacaacaggagcaaacacgccgagctgctgggttttggaacaattggacagatgagttagcagataggcaagcagaggaggaggagatatttcggcgacaaatgacttcttccagacagaactatgatgccaacctctacgatttcagccaccaaccggctgtcagtcgaaaggacactctgccaggactgtcgcaacctgctaagcagtactcctacccgtccatcaccaagtcgacccccgtagactatgacccccagcaacaccgccagagtactccgcgactcgaccaaccccccttaccacccaagaagccagaaggctacgtctcccaccagttacctcccctagcgccagaacttccggctaaaacaccaatggacatggggcagaagctcccaaagcttcacaagtctgctggctcccaggagctgcccagtcgccctcctaaagtagtagaatccgaggcccagcctgtgcagaagcaacaaggcgtgtccttcaagccagcagcctatctcgagaacggtagcccaatccgacccatctttcttcctcgtggtttacgccgcaagtttctcgacattgcttctgagcacaccaaaaaaggactagagatgtgtggcatcttgtgcggcactgctgttaacaacgcgctgttcattcgttgcctactcatccccgagcagaattgcacttcagacacgtgtgagacggtgaatgaaggcgcaatgctcgactactgtctcagcgaggacttgctgatgcttggctggatccatacccatccgacccagacctgcttcatgagctcacgagatctgcacacgcagtccggataccaggtcatgctccctgagagtattgcgattgtgtgtgcgcccaagttcgagccttcatatggcatcttccgtctcaccaatccccctggtcttccacatatcctcgagtgcaaccagtcggccactttccaccaacattctgtcgacaacctatataccggcgcagagcacccgcccggtcacgtgtatgagcacgataatctagactggtacgtggaggatatcagacccgaggctaagctcagtatgccgagcaagaaattctagagcatcccctttggttgggctcgctgtggcttaggcccgggcgacatgggcagatgcttgttgcaagcgtgttccttaaacggaccgggatttggtgcatatcaagatcgtgcacctaggcgtgtcacattacaagagaagtgaaagagagaatgatacccttaagacttgtttttctttccctttgccgtttttgcttgagcgccctgaaatttttgtgtttgcgtctgtctttttaactatagcatggcactggcgttattctcgatgggtgctaaacgtgtagacgcattaacaggcgttctctgtgatttaactttggcggagagggggttctatcttcacgcctagaggcacggcgaaacggtacctggttgatgtgaaagggcgtggtttgtggctgtcaaatcggtctgcactgttcgttgatgtagcacactgtacccgggtaattcagtacaaggtcataatcgcaaatctgccaatccgatgtgcctctatgtgaagttgcagtgctgattattgacttgagtgtaccttcccttgagcgcacaagatgattcaagcagcagaagattacgctgcaccgttccgccaagttgcccaccctggtggtatgtaccaccagtaccttgatatcatcaaatgatgtcgatattcattcctcaatcgcagaaccaactcattcctccaccttgcaaagcaaaacgccaaatcaacgaaggtgtaaaaaggctgcgtgcgtaactgccagctcatgatctgccaggagcctgtctccaacaatttcaaagaatggagccatcttcctgttgcaatcgaagggttggtcaagccatcgtttccgctggccaaatgatgggtgcattatttgggtcatgactttggctcgtaatagattggtaattcaagctaggcatcgtagccagtcggccattggcaaacattgccaatgtgagacgccagacggagtgattgtcgtcgttcgaggatcattgtcaacaatgttcagagcttgtaggtgaatcggtcatcgcttgagatgtgtgaagggaatgtacagaagatggcactcatgacaagagtcactatgaacgtggtcggtatcctccatcagatgctctagcgcgagtcttaacatgttgaaaaggctgaaacccccctccctacctgcctttgattgatggttacttctcctcgtagatgttttcgattatctttgcagcgttatctatgattgctgcactattgtcttgtgcatcatcttctgcaccgtcttcgttactggtctgttcgggagggttgagcaaagcttgaactgcgggatatctctggggattatccttgatgtcgttgaacacagccatatgcaaagacgttgtgtgaaagcctttgcgagaatgcggccgacccttgtgtcgagagtacatgtcttcgacaatttttcgcgccataatatgctctactccagagaagtcggctgaagtagtctctgtatcaacg

SEQ ID NO: 10363 - DNA, 1296 bp, Muscodor strobelii
  misc_feature: SGI cDNA ID NO. 563286
  misc_feature: Encodes the peptide sequence at SEQ ID NO 10364
atgatcactattcgacggaccagcagtagaactgttgaggctgggcaggatgctagctttgagctgcacgcagattctactgacgcccagaacgtcaggaacaccaaggctgctatcctagaattgattgttcgtgagctagaggctgacaaagctgccgataacgctgctgataacgctgaatcctggactcctgtacctgtaccaatcgcacaggtcgatcaagatattgtcaacgcattcgtcgagctgatgtacagaattcacgacgggaatgcgcctcatcggaaaagaaataccgaggaactcatcatggcacatatcgacaaacttgaggtacctctcatagctgaagacaacaatcagcccgatcagcttgtatcatttaccggtgagcgattggacttcaacatgcccgacttcatggcgacatgcgccgcttttcttctgaagacacctctacaatcaggcaagttggcgcccgataacctgttcaactactacgttgacttcacccatccgaagccgtgccatgactttttccagaaacacccactgtttgagtcgatcacgactcgagatatttcatctcctacccagcatttgcccagcgacaacttgatgcgcatgtacgccaagttagatgcggaccaaaaagctgcggtagcatcattagacaaggcaatgcatggacttgcctcggttacagggtgtttcgggagtggcaaaacaacgttcagcctgttttgtctgaaagcaattgaggagaacgatcaaaatagcaagatccttgtttgcggcccaaataactctgtcttggatgatatccccccgaagtaccgggatctctgtactgaagctgggttcaccaatattgatgagaccatcccgctcagagtctacacctttccttctgatctcactgcaggacatcgaagcctcacacgtatgcttcgcgcgaacgaacccgagcctgttgccgttgatacagagactacttcagccgacttctctggagtagagcatattatggcgcgaaaaattgtcgaagacatgtactctcgacacaagggtcggccgcattctcgcaaaggctttcacacaacgtctttgcatatggctgtgttcaacgacatcaaggataatccccagagatatcccgcagttcaagctttgctcaaccctcccgaacagaccagtaacgaagacggtgcagaagatgatgcacaagacaatagtgcagcaatcatagataacgctgcaaagataatcgaaaacatctacgaggagaagtaa

SEQ ID NO: 10364 - protein, 431 aa, Muscodor strobelii
  misc_feature: SGI Peptide ID NO. 563286
  misc_feature (190)..(276): NCBI GI: 268637806 Blast Desc: DDB_G0285243 [Dictyostelium discoideum AX4] gi|256012898|gb|EEU04084.1| DDB_G0285243 [Dictyostelium discoideum AX4]
  misc_feature (165)..(289): NCBI GI: 256733645 Blast Desc: NECHADRAFT_35401 [Nectria haematococca mpVI 77-13-4]
MITIRRTSSRTVEAGQDASFELHADSTDAQNVRNTKAAILELIVRELEADKAADNAADNAESWTPVPVPIAQVDQDIVNAFVELMYRIHDGNAPHRKRNTEELIMAHIDKLEVPLIAEDNNQPDQLVSFTGERLDFNMPDFMATCAAFLLKTPLQSGKLAPDNLFNYYVDFTHPKPCHDFFQKHPLFESITTRDISSPTQHLPSDNLMRMYAKLDADQKAAVASLDKAMHGLASVTGCFGSGKTTFSLFCLKAIEENDQNSKILVCGPNNSVLDDIPPKYRDLCTEAGFTNIDETIPLRVYTFPSDLTAGHRSLTRMLRANEPEPVAVDTETTSADFSGVEHIMARKIVEDMYSRHKGRPHSRKGFHTTSLHMAVFNDIKDNPQRYPAVQALLNPPEQTSNEDGAEDDAQDNSAAIIDNAAKIIENIYEEK

SEQ ID NO: 10365 - DNA, 927 bp, Muscodor strobelii
  misc_feature: SGI cDNA ID NO. 563287
  misc_feature: Encodes the peptide sequence at SEQ ID NO 10366
atggcgctcccgataaaagaaggaaaaataccctacgatgccaaaggagcaggaaagccatgtgaaacatactacaaagtagtcggagacctcaaatcgggcaaaacgcccgtcgtagcaatgcacggcggtcctggaggtggccacgaatacctccaccccctaacagatctctacacaaactatggactcccagtgatattctacgaccaaatcgggtgtggcgcctcaacacacttacgagagaaaatgggcgatgactcattctggaccatcgagctcttcgtgcaggaactagagaacctcatcacgcactttaacttgcacgaaacgggattccatctcttcggactaagttggggcggcatgttttgttcgctctacgcgagtaggaaaccagaagggttggggaggctgataatggtgagttcgccggcgagtataccgctttatctcgaggggctgcaggatatattgcaagagatgggtcctgaggcgcaggagattgtgaagagatgtgatgcggaagggacgcaggatagcgaggagtatcagggggtttgtgcgaggtttggaaagatgcatacttgtcggcttgatccgccgccgccggagctgcaacaggcttttaagcatttgaaggaggatgggactagtattttgactatgcaaggacattcccgcttcgtcttcacgggagcggcgtttaaggactatgaaggagcgaaggaatggggccatttgattgacgtcccgacgctggtcgcgaatggcgagttcgatcatgtgagagataaatgttttgcgccgtggttttggcatatccccaaggtcaggtgggtatcgctaaagggtgctagccatgttggacaatgggaggcgagggagaggcttatggggcttgcgggtgagttcttgacgacgtga

SEQ ID NO: 10366 - protein, 308 aa, Muscodor strobelii
  misc_feature: SGI Peptide ID NO. 563287
  misc_feature (64)..(304): Pfam Id: PF00561 Pfam Desc: alpha/beta hydrolase fold
  misc_feature (1)..(306): NCBI GI: 145252800 Blast Desc: An16g06070 [Aspergillus niger] gi|134083468|emb|CAK46945.1| protein product [Aspergillus niger]
  misc_feature (1)..(306): NCBI GI: 154314339 Blast Desc: BC1G_05263 [Botryotinia fuckeliana B05.10] gi|150848908|gb|EDN24101.1| BC1G_05263 [Botryotinia fuckeliana B05.10]
  misc_feature (5)..(307): NCBI GI: 156036178 Blast Desc: SS1G_12775 [Sclerotinia sclerotiorum 1980] gi|154698183|gb|EDN97921.1| SS1G_12775 [Sclerotinia sclerotiorum 1980]
  misc_feature (22)..(307): NCBI GI: 242217665 Blast Desc: [Postia placenta Mad-698-R] gi|220726210|gb|EED80167.1| [Postia placenta Mad-698-R]
  misc_feature (3)..(306): NCBI GI: 256376806 Blast Desc: proline-specific peptidase [Actinosynnema mirum DSM 43827] gi|255921109|gb|ACU36620.1| proline-specific peptidase [Actinosynnema mirum DSM 43827]
  misc_feature (22)..(306): NCBI GI: 145595300 Blast Desc: proline-specific peptidase [Salinispora tropica CNB-440] gi|145304637|gb|ABP55219.1| proline-specific peptidase [Salinispora tropica CNB-440]
  misc_feature (23)..(308): NCBI GI: 254406800 Blast Desc: proline imino-peptidase [Streptomyces sviceus ATCC 29083] gi|197716230|gb|EDY60264.1| proline imino-peptidase [Streptomyces sviceus ATCC 29083]
  misc_feature (1)..(306): NCBI GI: 83593515 Blast Desc: peptidase S33, tricorn interacting factor 1 [Rhodospirillum rubrum ATCC 11170] gi|83576429|gb|ABC22980.1| Peptidase S33, tricorn interacting factor 1 [Rhodospirillum ATCC
  misc_feature (4)..(308): NCBI GI: 256781407 Blast Desc: proline-specific peptidase [Streptomyces hygroscopicus ATCC 53653]
  misc_feature (6)..(306): NCBI GI: 13470803 Blast Desc: proline iminopeptidase [Mesorhizobium loti MAFF303099] gi|14021546|dbj|BAB48158.1| proline iminopeptidase [Mesorhizobium loti MAFF303099]
  misc_feature (21)..(306): SWISSPROT Homolog: EC 3.4.11.5 Prolyl aminopeptidase
MALPIKEGKIPYDAKGAGKPCETYYKVVGDLKSGKTPVVAMHGGPGGGHEYLHPLTDLYTNYGLPVIFYDQIGCGASTHLREKMGDDSFWTIELFVQELENLITHFNLHETGFHLFGLSWGGMFCSLYASRKPEGLGRLIMVSSPASIPLYLEGLQDILQEMGPEAQEIVKRCDAEGTQDSEEYQGVCARFGKMHTCRLDPPPPELQQAFKHLKEDGTSILTMQGHSRFVFTGAAFKDYEGAKEWGHLIDVPTLVANGEFDHVRDKCFAPWFWHIPKVRWVSLKGASHVGQWEARERLMGLAGEFLTT

SEQ ID NO: 10367 - DNA, 1271 bp, Muscodor strobelii
  misc_feature: SGI EST ID NO. CUFF.24486.0
  misc_feature: Variant of the nucleotide sequence at SEQ ID NO 10365
ggataaggcatatagttgagtaggttctgtactaattgtgtcatcacttatagattctatttcgtgttgtaactacctctcatctcgacttattagtatacccatgccctaactctcaatcgctatacttagcacctcaagcactgagaacataccagaatggcgctcccgataaaagaaggaaaaataccctacgatgccaaaggagcaggaaagccatgtgaaacatactacaaagtagtcggagacctcaaatcgggcaaaacgcccgtcgtagcaatgcacggcggtcctggaggtggccacgaatacctccaccccctaacagatctctacacaaactatggactcccagtgatattctacgaccaaatcgggtgtggcgcctcaacacacttacgagagaaaatgggcgatgactcattctggaccatcgagctcttcgtgcaggaactagagaacctcatcacgcactttaacttgcacgaaacgggattccatctcttcggactaagttggggcggcatgttttgttcgctctacgcgagtaggaaaccagaagggttggggaggctgataatggtgagttcgccggcgagtataccgctttatctcgaggggctgcaggatatattgcaagagatgggtcctgaggcgcaggagattgtgaagagatgtgatgcggaagggacgcaggatagcgaggagtatcagggggtttgtgcgaggtttggaaagatgcatacttgtcggcttgatccgccgccgccggagctgcaacaggcttttaagcatttgaaggaggatgggactagtattttgactatgcaaggacattcccgcttcgtcttcacgggagcggcgtttaaggactatgaaggagcgaaggaatggggccatttgattgacgtcccgacgctggtcgcgaatggcgagttcgatcatgtgagagataaatgttttgcgccgtggttttggcatatccccaaggtcaggtgggtatcgctaaagggtgctagccatgttggacaatgggaggcgagggagaggcttatggggcttgcgggtgagttcttgacgacgtgatgggtccgaggtcaggaaccggaggcagcgtgataggggtggtggtgtcgcaatgtgtacctgatatatgacttaaacaacgatttctaagtaattatcaaaaagtacgcatcctgccttccgaaggtgatcgcacagtagccgttaacgtgcaaatcttcagagagtgcaccttaaattttttc

SEQ ID NO: 10368 - DNA, 501 bp, Muscodor strobelii
  misc_feature: SGI cDNA ID NO. 563288
  misc_feature: Encodes the peptide sequence at SEQ ID NO 10369
atgcctgcgctactaactatgagacatgagacgacagacattggcagcaattctgacgttcgtattgtcttagaggttgccgatgtttcattcgctgatagaaaggaagttatcttaatgggccattcttacggtggcatacctgcctgcatcgcgacacgtggaaatggagttgctgagcgcaaaacagcagggttaattggaggcttcagccacgtcgtgttcctttgtgcccttatgatttcaactgtcgggacatctctcatgtctctcatcggcgaggaaataccggagtggcagggaggagagtcggaagacaagaagcaactcgttgttaacatcaaagatagagatgccttattcagcgatctcacgctcgaaaaagcaaacaagtatttcgatgatcttgtaccgcaatctttcgctgctgtcgcgcaaccggtggacttctctgtatcccgatatcacgatccacaagacttacatagtgtgcgagaatga

SEQ ID NO: 10369 - protein, 166 aa, Muscodor strobelii
  misc_feature: SGI Peptide ID NO. 563288
  misc_feature (1)..(150): NCBI GI: 256725652 Blast Desc: NECHADRAFT_43023 [Nectria haematococca mpVI 77-13-4]
  misc_feature (1)..(159): NCBI GI: 46114986 Blast Desc: FG03335.1 [Gibberella zeae PH-1]
  misc_feature (1)..(150): NCBI GI: 256720418 Blast Desc: NECHADRAFT_105756 [Nectria haematococca mpVI 77-13-4]
  misc_feature (19)..(150): NCBI GI: 256731227 Blast Desc: NECHADRAFT_85253 [Nectria haematococca mpVI 77-13-4]
  misc_feature (18)..(159): NCBI GI: 46122843 Blast Desc: FG05799.1 [Gibberella zeae PH-1]
  misc_feature (16)..(158): NCBI GI: 156063354 Blast Desc: [Sclerotinia sclerotiorum 1980] gi|154697129|gb|EDN96867.1| [Sclerotinia sclerotiorum 1980]
  misc_feature (35)..(157): NCBI GI: 259487984 Blast Desc: TPA: conserved [Aspergillus nidulans FGSC A4]
  misc_feature (35)..(157): NCBI GI: 67524189 Blast Desc: AN2552.2 [Aspergillus nidulans FGSC A4] gi|40745501|gb|EAA64657.1| AN2552.2 [Aspergillus nidulans FGSC A4]
  misc_feature (17)..(155): NCBI GI: 145251583 Blast Desc: An15g07840 [Aspergillus niger] gi|134082840|emb|CAK42671.1| protein product [Aspergillus niger]
  misc_feature (13)..(142): NCBI GI: 67524969 Blast Desc: AN2942.2 [Aspergillus nidulans FGSC A4] gi|40744337|gb|EAA63513.1| AN2942.2 [Aspergillus nidulans FGSC A4] gi|259486119|tpe|CBF83706.1| TPA: conserved [Aspergillus FGSC
MPALLTMRHETTDIGSNSDVRIVLEVADVSFADRKEVILMGHSYGGIPACIATRGNGVAERKTAGLIGGFSHVVFLCALMISTVGTSLMSLIGEEIPEWQGGESEDKKQLVVNIKDRDALFSDLTLEKANKYFDDLVPQSFAAVAQPVDFSVSRYHDPQDLHSVRE

SEQ ID NO: 10370 - DNA, 1356 bp, Muscodor strobelii
  misc_feature: SGI cDNA ID NO. 563289
  misc_feature: Encodes the peptide sequence at SEQ ID NO 10371
atggccagctcgaagcaggagaagtttgaattcgtcacgtcggagccgaacaaaaagttatccaaagagacccattcaaaaatccggcgacacgccacaagagccgtactcgaagcccgccggaatgccgacggatcccacgcgaaagctaagcaagccccccgagctcccagagtcccccgaaacctgcctctctcgaccctggaactgctcgtcggagattgcggcctcaacagcctgaatctgtcggcgctagcgtctgttcaccttggacccgccgcggcagcatcattgcatgcgcagcctagccagctcaagcgtctcctatcctgccagcaggcatcatatttctcttttattccggctcggttcagcgaggtcgtagtattagaggatgcgtatcgatgtcttctcgtagccgctcattcaatgctggtgccgaataagaaagcgagtaataagagtgtgctcagttactatggaaagtcactcagaagcctgcaagttgcagtcgacgaccctaccagtcggcacactgccgaaacactctgtgccgtggcacttctagcactgtttgagatattgaactctccggccggcgatctctggagccagcatatgcggggtgcttctcggctaatccaaagtagaggccccgaaagtttctcgtccgacttcgacatgtccctgctcaccctactggggcctccaatgtgcgccgagtccttggcgagcaatacagagtgtttcctagatgatccagtctggaccaaggttctattaaacgcagtccgaccatccgactctttctcggaacgatcagcgctctccattggcgccttgatgataatgtgccaggttcccggattagcaaaacgtaccgaagacgcggttaccgcccattcagtaggcgaagatgcagagtttgatgagattgtgaagaagctttattcggtacgagcgcaaataatggcctggcgtcggaacttcaacactgtgttgatcaaagctgtggacaagaagcctatagagccggaagacaggcgatacgaattattgggcatgtctttggtgttccatctcatcgctagcaggatgttggcttgcattgcaccaaaggaacgtcgactgctcgaggatgaggttcagaacgttgccttagagcttaagcaactgcacgattcactagacgcacctgacagcgaaaactcacgggccggtttcttcctatctcagaaagctatgtttgctactcttgcttttgaaacgcatgacttgatcaacgatatcgacggagttaaggttattgatcttgcatcctttcagttgtggtggaggcgaaggccgatgaaatga

SEQ ID NO: 10371 - protein, 451 aa, Muscodor strobelii
  misc_feature: SGI Peptide ID NO. 563289
  misc_feature (65)..(300): NCBI GI: 67527863 Blast Desc: AN4181.2 [Aspergillus nidulans FGSC A4] gi|40740090|gb|EAA59280.1| [Aspergillus nidulans FGSC A4] gi|259481220|tpe|CBF74542.1| TPA: conserved [Aspergillus nidulans
  misc_feature (76)..(289): NCBI GI: 156054402 Blast Desc: SS1G_06049 [Sclerotinia sclerotiorum 1980] gi|154703829|gb|EDO03568.1| SS1G_06049 [Sclerotinia sclerotiorum 1980]
  misc_feature (159)..(336): NCBI GI: 70982969 Blast Desc: C6 finger domain protein [Aspergillus fumigatus Af293] gi|66844637|gb|EAL84974.1| C6 finger domain protein, [Aspergillus fumigatus Af293] gi|159123897|gb|EDP49016.1| C6 finger domain
  misc_feature (115)..(327): NCBI GI: 242779275 Blast Desc: conserved [Talaromyces stipitatus ATCC 10500] gi|218723030|gb|EED22448.1| conserved [Talaromyces stipitatus ATCC 10500]
  misc_feature (148)..(323): NCBI GI: 115402561 Blast Desc: [Aspergillus terreus NIH2624] gi|114189203|gb|EAU30903.1| [Aspergillus terreus NIH2624]
  misc_feature (160)..(347): NCBI GI: 119483860 Blast Desc: C6 finger domain protein, [Neosartorya fischeri NRRL 181] gi|119409989|gb|EAW19936.1| C6 finger domain protein, [Neosartorya fischeri NRRL 181]
  misc_feature (160)..(325): NCBI GI: 255939358 Blast Desc: Pc16g00240 [Penicillium chrysogenum Wisconsin 54-1255] gi|211585071|emb|CAP92694.1| Pc16g00240 [Penicillium chrysogenum Wisconsin 54-1255]
  misc_feature (138)..(303): NCBI GI: 242789355 Blast Desc: conserved [Talaromyces stipitatus ATCC 10500] gi|218717931|gb|EED17351.1| conserved [Talaromyces stipitatus ATCC 10500]
  misc_feature (133)..(333): NCBI GI: 67539968 Blast Desc: AN6154.2 [Aspergillus nidulans FGSC A4] gi|40738750|gb|EAA57940.1| AN6154.2 [Aspergillus nidulans FGSC A4] gi|259479654|tpe|CBF70076.1| TPA: C6 finger domain protein,
  misc_feature (56)..(259): NCBI GI: 242811484 Blast Desc: TSTA_097760 [Talaromyces stipitatus ATCC 10500] gi|218714097|gb|EED13520.1| TSTA_097760 [Talaromyces stipitatus ATCC 10500]
MASSKQEKFEFVTSEPNKKLSKETHSKIRRHATRAVLEARRNADGSHAKAKQAPRAPRVPRNLPLSTLELLVGDCGLNSLNLSALASVHLGPAAAASLHAQPSQLKRLLSCQQASYFSFIPARFSEVVVLEDAYRCLLVAAHSMLVPNKKASNKSVLSYYGKSLRSLQVAVDDPTSRHTAETLCAVALLALFEILNSPAGDLWSQHMRGASRLIQSRGPESFSSDFDMSLLTLLGPPMCAESLASNTECFLDDPVWTKVLLNAVRPSDSFSERSALSIGALMIMCQVPGLAKRTEDAVTAHSVGEDAEFDEIVKKLYSVRAQIMAWRRNFNTVLIKAVDKKPIEPEDRRYELLGMSLVFHLIASRMLACIAPKERRLLEDEVQNVALELKQLHDSLDAPDSENSRAGFFLSQKAMFATLAFETHDLINDIDGVKVIDLASFQLWWRRRPMK

SEQ ID NO: 10372 - DNA, 3082 bp, Muscodor strobelii
  misc_feature: SGI EST ID NO. CUFF.24528.0
  misc_feature: Variant of the nucleotide sequence at SEQ ID NO 10370
ccccaactcaggtgccatgcatgattgacagaagctactgcgtaggatgttcaggtagtatcgaaggggctgtgtgaggccgagccagtgaacgggtgagcatgatactaccatcgacagaagatggtgtttctccactttttctagcttcacttcagtgatgcaggcttgatcaggggcggcgacaacctagacgccgtaagccaggacaccaggcgttgagcatctctttaccatacactagcggcatttgcaaaatcctcagacttcaacataaccagttacataattcgtctagtcattaaatctagacactctcgtatgcgagatacttaccgccgatcttctgacccgtattgatgtcccttgttttagcttgagtctcaaggtcttatcgcgccgcagagagacgaacgaccagccaacgtcatggccagctcgaagcaggagaagtttgaattcgtcacgtcggagccgaacaaaaagttatccaaagagacccattcaaaaatccggcgacacgccacaagagccgtactcgaagcccgccggaatgccgacggatcccacgcgaaagctaagcaagccccccgagctcccagagtcccccgaaacctgcctctctcgaccctggaactgctcgtcggagattgcggcctcaacagcctgaatctgtcggcgctagcgtctgttcaccttggacccgcgtacgtccaccatgtattttatcgcaactaaggcgccttgattgattcaattgttgatttgattttgttcgtcagcgcggcagcatcattgcatgcgcagcctagccagctcaagcgtctcctatcctgccagcaggcatcatatttctcttttattccggctcggttcagcgaggtcgtagtattagaggatgcgtatcgatgtcttctcgtagccgctcattcaatgctggtgccgaataagaaagcgagtaataagagtgtgctcagttactatggaaagtcactcagaagcctgcaagttgcagtcgacgaccctaccagtcggcacactgccgaaacactctgtgccgtggcacttctagcactgtttgagatattgaactctccggccggcgatctctggagccagcatatgcggggtgcttctcggctaatccaaagtagaggccccgaaagtttctcgtccgacttcgacatgtccctgctcaccctactggggcctccaatgtgcgccgagtccttggcgagcaatacagagtgtttcctagatgatccagtctggaccaaggttctattaaacgcagtccgaccatccgactctttctcggaacgatcagcgctctccattggcgccttgatgataatgtgccaggttcccggattagcaaaacgtaccgaagacgcggttaccgcccattcagtaggcgaagatgcagagtttgatgagattgtgaagaagctttattcggtacgagcgcaaataatggcctggcgtcggaacttcaacactgtgttgatcaaagctgtggacaagaagcctatagagccggaagacaggcgatacgaattattgggcatgtctttggtgttccatctcatcgctagcaggatgttggcttgcattgcaccaaaggaacgtcgactgctcgaggatgaggttcagaacgttgccttagagcttaagcaactgcacgattcactagacgcacctgacagcgaaaactcacgggccggtttcttcctatctcagaaagctatgtttgctactcttgcttttgaaacgcatgacttgatcaacgatatcgacggagttaaggttattgatcttgcatcctttcagttgtggtggaggcgaaggccgatgaaatgaaagtcataaaccccatcccagttacgagctacgcagagcctactaggccaggattacaagatatcatatctgaatcctcaattcctaatgcgactcgaattccaacacactgggcaacatcattcttgtcgaagaaaacctgttcgcgtcggtcattgaagaacaactcgaggaccggcgaatttgcgttcggatcttctactccatttcaatcaccgcgctggacgatcctgacacaatcaatactcccaacgctacagtcatagcacttcagtgttgataatgcgcccgcaatcatatcggcttgtactctggacgaaagcaccattgcaacgatccacgtcccgcaattgtgacaatgcttcgtagtcgacgtgccatcctctacgaacaaattcgtgctgttgactaacggataacgaacaccaagtggtatggcagcaacgcaatactcacttgaatacatacgattgagctctatatcaccatactcctgattttgtctatcgaatcctgaatttgccgccgagtcattggaccatttgggttttaacggcgaaaccgattggacaagaaaacataagtactcgatctcaacctgtgattctttgataggtaatcaacaactttagaaggtgccatctttgacgggaactaacgccctttaagtcatgcaaatgattagtattcaggcactttggctagcccacaggaagaatagtggtgatattgccccaccatctttgtcccaaagggggatttgcctgagatgggcaagaccaatcatgtcaaagagtcgacgcaaatactcgatcgagcatgggacaatatgctggtgtacactatgtgcttgactcaaattctgacccggaagcaattaatcagactttcttcgtaacacagcctttctcatgatcagaatggtagagtagttgcgaactagtccacttaggtatttgctacacttcctgattacgagtcgacttgggaatcattttgtcctaggatggtatgtgcgaggataatatatactcattccatgtgcgatgtaagactcatacgccactggtcatgaggtagacgataaagcttctatgaatgtgaaccttattagatgattgactattgtgatcatcgcggttagccaggctacgacgatacagattcggcatggctagaatatgagtgggagccgacacatatataaaacctgacatgatgc

SEQ ID NO: 10373 - DNA, 573 bp, Muscodor strobelii
  misc_feature: SGI cDNA ID NO. 563290
  misc_feature: Encodes the peptide sequence at SEQ ID NO 10374
atggctccttcttggactcatctacccgagtggaacgagatgctcgaacagaataagaagtggcaggctaccaaacaagaaccatatccaaagctctcagaagcggcgcaagtcggctttcggccacctagtgtccttatcttctcttgtcttgatcctcgagcctcgccagaagaacttcttgaccttaggggtcacgaagccttcgttatcaggaatctcgggggccgtgtagccccaagcctgaaagagctagtcctcgcggagacgttaactcaaggccaagcgattaaggaggtcatcgtaatgcaccacaccgactgcggtcttacacacctggatggtgaacaggtcctagctgggctcaagtctcagtatcctgaccgagaggagatcccgaaactactttcattcccgacgtatgacggaagttcggtcgccaaacacatggatgtcctcaaagcagacgtcaaattcatcaaggacttaccgtatgttcgtcaggagcttaaggacaataccaaaggctatctttacgatattggcacagggagtcttactctcgccgagtga

SEQ ID NO: 10374 - protein, 190 aa, Muscodor strobelii
  misc_feature: SGI Peptide ID NO. 563290
  misc_feature (38)..(190): Pfam Id: PF00484 Pfam Desc: Carbonic anhydrase
  misc_feature (43)..(80): Pfam Id: PF00484 Pfam Desc: Carbonic anhydrase
  misc_feature (9)..(184): NCBI GI: 242783861 Blast Desc: conserved [Talaromyces stipitatus ATCC 10500] gi|218720418|gb|EED19837.1| conserved [Talaromyces stipitatus ATCC 10500]
  misc_feature (12)..(186): NCBI GI: 242789964 Blast Desc: conserved [Talaromyces stipitatus ATCC 10500] gi|218718058|gb|EED17478.1| conserved [Talaromyces stipitatus ATCC 10500]
  misc_feature (9)..(187): NCBI GI: 212545609 Blast Desc: conserved [Penicillium marneffei ATCC 18224] gi|210064478|gb|EEA18573.1| conserved [Penicillium marneffei ATCC 18224]
  misc_feature (42)..(186): NCBI GI: 126134315 Blast Desc: PICST_57799 [Pichia stipitis CBS 6054] gi|126095831|gb|ABN65653.1| [Pichia stipitis CBS 6054]
  misc_feature (42)..(186): NCBI GI: 148657787 Blast Desc: carbonic anhydrase [Roseiflexus sp. RS-1] gi|148569897|gb|ABQ92042.1| carbonic anhydrase [Roseiflexus sp. RS-1]
  misc_feature (42)..(186): NCBI GI: 162449584 Blast Desc: carbonate hydratase [Sorangium cellulosum 'So ce 56'] gi|161160166|emb|CAN91471.1| carbonate hydratase [Sorangium cellulosum 'So ce 56']
  misc_feature (24)..(186): NCBI GI: 156741318 Blast Desc: carbonic anhydrase [Roseiflexus castenholzii DSM 13941] gi|156232646|gb|ABU57429.1| carbonic anhydrase [Roseiflexus castenholzii DSM 13941]
  misc_feature (42)..(188): NCBI GI: 46114256 Blast Desc: FG02970.1 [Gibberella zeae PH-1]
  misc_feature (14)..(184): NCBI GI: 94969794 Blast Desc: carbonic anhydrase [Candidatus Koribacter versatilis Ellin345] gi|94551844|gb|ABF41768.1| carbonic anhydrase [Candidatus Koribacter versatilis Ellin345]
  misc_feature (18)..(190): NCBI GI: 256720674 Blast Desc: NECHADRAFT_85616 [Nectria haematococca mpVI 77-13-4]
  misc_feature (43)..(188): SWISSPROT Homolog: EC 4.2.1.1 Carbonate dehydratase
MAPSWTHLPEWNEMLEQNKKWQATKQEPYPKLSEAAQVGFRPPSVLIFSCLDPRASPEELLDLRGHEAFVIRNLGGRVAPSLKELVLAETLTQGQAIKEVIVMHHTDCGLTHLDGEQVLAGLKSQYPDREEIPKLLSFPTYDGSSVAKHMDVLKADVKFIKDLPYVRQELKDNTKGYLYDIGTGSLTLAE

SEQ ID NO: 10375 - DNA, 558 bp, Muscodor strobelii
  misc_feature: SGI cDNA ID NO. 563291
  misc_feature: Encodes the peptide sequence at SEQ ID NO 10376
atggcgccttcaatagatgataagcctccaagccaggcaacagccctcatcaacccgaatcctcaattacagtcatactactactcacttgaatcccggataggatacaggctacttcttggcggaacgagacattttggatactgggatgaggatacttacttcccgtcattttcgcaaggcctgcgtaaaatggaagacaagatggcggaggccctcgcattgccgcccggaagtcaagtcttggacgccgggtgtggcgtcgggcacgtggccttgcgcatggccaccaagcatgggttgcgcgtagaagccatcgatgtcgttgaacaccatgtggtcaaggccgctcggaacttcaaacgtgcaggtctgcctgagagtcaagcgcgagcccgcctaatggactatcataatctagattcatttgatagtgaatcatttgatgggatttacactatggagacattcgtgcacgctaccgatcctcaggccgtccttaagggatttttatcggcttctaagacccggtgggcggcttgttcaattcgaatatga

SEQ ID NO: 10376 - protein, 185 aa, Muscodor strobelii
  misc_feature: SGI Peptide ID NO. 563291
  misc_feature (82)..(173): Pfam Id: PF08241 Pfam Desc: Methyltransferase domain
  misc_feature (82)..(168): Pfam Id: PF08241 Pfam Desc: Methyltransferase domain
  misc_feature (82)..(170): Pfam Id: PF08242 Pfam Desc: Methyltransferase domain
  misc_feature (1)..(175): NCBI GI: 115386180 Blast Desc: conserved [Aspergillus terreus NIH2624] gi|114190629|gb|EAU32329.1| conserved [Aspergillus terreus NIH2624]
  misc_feature (11)..(170): NCBI GI: 171685456 Blast Desc: protein product [Podospora anserina] gi|170942689|emb|CAP68342.1| protein product [Podospora anserina]
  misc_feature (10)..(171): NCBI GI: 256724677 Blast Desc: NECHADRAFT_101488 [Nectria haematococca mpVI 77-13-4]
  misc_feature (10)..(170): NCBI GI: 116194087 Blast Desc: CHGG_06761 [Chaetomium globosum CBS 148.51] gi|88182674|gb|EAQ90142.1| CHGG_06761 [Chaetomium globosum CBS 148.51]
  misc_feature (11)..(175): NCBI GI: 119175635 Blast Desc: CIMG_09630 [Coccidioides immitis RS]
  misc_feature (11)..(175): NCBI GI: 255956867 Blast Desc: Pc21g22160 [Penicillium chrysogenum Wisconsin 54-1255] gi|211590897|emb|CAP97113.1| Pc21g22160 [Penicillium chrysogenum Wisconsin 54-1255]
  misc_feature (11)..(170): NCBI GI: 145251662 Blast Desc: An16g00300 [Aspergillus niger] gi|134082880|emb|CAK42710.1| protein product [Aspergillus niger]
  misc_feature (20)..(171): NCBI GI: 156059348 Blast Desc: SS1G_03686 [Sclerotinia sclerotiorum 1980] gi|154701473|gb|EDO01212.1| SS1G_03686 [Sclerotinia sclerotiorum 1980]
  misc_feature (3)..(117): NCBI GI: 261354412 Blast Desc: conserved [Verticillium albo-atrum VaMs.102]
  misc_feature (21)..(170): NCBI GI: 238839520 Blast Desc: cyclopropane-fatty-acyl-phospholipid synthase [Microsporum canis CBS 113480]
  misc_feature (23)..(175): SWISSPROT Homolog: EC 2.1.1.41 Sterol 24-C-methyltransferase
MAPSIDDKPPSQATALINPNPQLQSYYYSLESRIGYRLLLGGTRHFGYWDEDTYFPSFSQGLRKMEDKMAEALALPPGSQVLDAGCGVGHVALRMATKHGLRVEAIDVVEHHVVKAARNFKRAGLPESQARARLMDYHNLDSFDSESFDGIYTMETFVHATDPQAVLKGFLSASKTRWAACSIRI

SEQ ID NO: 10377 - DNA, 1731 bp, Muscodor strobelii
  misc_feature: SGI EST ID NO. CUFF.24531.0
  misc_feature: Variant of the nucleotide sequence at SEQ ID NO 10375
gaaataggtgtggtaaacctagatacttacctaggtttacagctatctgtaggtgatgattataggcgagtgtggagacagacgacatggaagtagcatttcatgctagcacaagaatgctgcgcgcaccaagaaaacgcagagaatgtgatgagtatgggggccctttcgtacatacaaagacatacttctggcctgggcgaaaatgaacatgtcaacgaccaccctaaatcactacttcagcagtcgtactgtgcatgagaagggttctgacatttgatcaccaaccgcccaggcttcagcaacgggcgcagtgccaacggacccactaccagcacccaagatagagcgtcacagggacgaccttacagctcatctcaagaaaagcactctaccagaaagacactgcgattcaatcagccctcacaccgcgaccatggcgccttcaatagatgataagcctccaagccaggcaacagccctcatcaacccgaatcctcaattacagtcatactactactcacttgaatcccggataggatacaggctacttcttggcggaacgagacattttggatactgggatgaggatacttacttcccgtcattttcgcaaggcctgcgtaaaatggaagacaagatggcggaggccctcgcattgccgcccggaagtcaagtcttggacgccgggtgtggcgtcgggcacgtggccttgcgcatggccaccaagcatgggttgcgcgtagaagccatcgatgtcgttgaacaccatgtggtcaaggccgctcggaacttcaaacgtgcaggtctgcctgagagtcaagcgcgagcccgcctaatggactatcataatctagattcatttgatagtgaatcatttgatgggatttacactatggagacattcgtgcacgctaccgatcctcaggccgtccttaagggatttttatcggcttctaagacccggtgggcggcttgttcaattcgaatatgacaatagtattgcgaatgattcacctcgggaggtagcggaaactatgaggcaggtgaatgagtactcagctatgcctacgaatgccatatcgcatcctggagtgttcaaacaaatgttagaggacgcgggctttgaagatatcgtggttcgcgattactccaaaaacatcgtaccaatgacgcgaatattcttccttctcgcatgggttccctatcttttcgtgcggctgtgcgggctcgaacgatggttcgtcaatactgttgcgggagtcggatcttaccgtggacgggaccattggaattacgttgcaatatccgcgacaaaaccaggtgacacatcaattgaggcgtcaaagtcgaaatgattgaccatctactatcttattcaaagggactgcggcgttgaaacctgttaccaaaaaattcatttgtctcactcgtcttttctagttctgctgagtcgtcacttctagatttgtgggacttcagagtggaagagcattgcatggagtcatggccaaaaagagtgcaaagcactctatcgtgcaatcagatagcatgtattgatctatagagtgtttacgtgaagccagctaaaatcggggcctcagggcaagatatgcgaagttttgcactcactcggcgagagtaagactccctgtgccaatatcgtaaagatagcctttggtattgtccttaagctcctgacgaacatacggtaagtccttgatgaatttg

SEQ ID NO: 10378 - DNA, 303 bp, Muscodor strobelii
  misc_feature: SGI cDNA ID NO. 563292
  misc_feature: Reduced expression when VOC is produced
  misc_feature: Encodes the peptide sequence at SEQ ID NO 10379
atgagaccgtctatgagagtatacaccaccgagccactgcatccagctgcgctcgcactagcctcaaaatccagcacagtgccgaaaaggatattacttccagctctagcatggctgggcgctgcctctgtcgtcactttctatgtgcagggtcagctcggacagagatccagcagtttcgatcgtatcttcgctcaacaaaacacacccgaagtcgaggaggcaaggaaaagagatcttctagtcgagacgtacggagatcctcgaaatagtctgctcaatatcttgggttggaccaattga

SEQ ID NO: 10379 - protein, 100 aa, Muscodor strobelii
  misc_feature: SGI Peptide ID NO. 563292
  misc_feature (1)..(98): NCBI GI: 171683770 Blast Desc: protein product [Podospora anserina] gi|170941845|emb|CAP67498.1| protein product [Podospora anserina]
  misc_feature (21)..(98): NCBI GI: 164424774 Blast Desc: NCU05338 [Neurospora crassa OR74A] gi|157070655|gb|EAA34034.2| [Neurospora crassa OR74A]
  misc_feature (21)..(98): NCBI GI: 28881331 Blast Desc: [Neurospora crassa]
  misc_feature (19)..(98): NCBI GI: 62953152 Blast Desc: [Gibberella fujikuroi]
  misc_feature (24)..(98): NCBI GI: 46123101 Blast Desc: FG05928.1 [Gibberella zeae PH-1]
  misc_feature (32)..(98): NCBI GI: 256727222 Blast Desc: NECHADRAFT_33570 [Nectria haematococca mpVI 77-13-4]
  misc_feature (23)..(97): NCBI GI: 46111393 Blast Desc: FG02578.1 [Gibberella zeae PH-1]
  misc_feature (24)..(98): NCBI GI: 261359839 Blast Desc: [Verticillium albo-atrum VaMs.102]
  misc_feature (18)..(97): NCBI GI: 256725771 Blast Desc: NECHADRAFT_102726 [Nectria haematococca mpVI 77-13-4]
  misc_feature (13)..(98): NCBI GI: 145602258 Blast Desc: MGG_05058 [Magnaporthe grisea 70-15] gi|145010693|gb|EDJ95349.1| MGG_05058 [Magnaporthe grisea 70-15]
  misc_feature: Useful for introducing or modulating the production of volatile compounds
MRPSMRVYTTEPLHPAALALASKSSTVPKRILLPALAWLGAASVVTFYVQGQLGQRSSSFDRIFAQQNTPEVEEARKRDLLVETYGDPRNSLLNILGWTN

SEQ ID NO: 10380 - DNA, 1745 bp, Muscodor strobelii
  misc_feature: SGI EST ID NO. CUFF.24603.0
  misc_feature: Variant of the nucleotide sequence at SEQ ID NO 10378
caacaaaccacattttcaagagatacttaagcaaaaatgattatttattaccaggccgccatgcaggctcccattattatgttgcacaattgtgacatcggccctcgcctcatcacagacatccagcctaaacacagcagacaattctaaaacgcatcacgccaactgctatacacaaattacacttgtcaaagtactctattactgttaatcatgagaccgtctatgagagtatacaccaccgagccactgcatccagctgcgctcgcactagcctcaaaatccagcacagtgccgaaaaggatattacttccagctctagcatggctgggcgctgcctctgtcgtcactttctatgtgcagggtcagctcggacagagatccagcagtttcgatcgtatcttcgctcaacaaaacacacccgaagtcgaggaggcaaggaaaagagatcttctagtcgagacgtacggagatcctcgaaatagtctgctcaatatcttgggttggaccaattgaagacaagactatgtacatatcatgaattttgcttgtgctttgtcagatgggacatacggtggagttcaggtcgcgatcggattaagtataattgtaataaatattgtaagagtttgatacaacttccatgacgaaagtctctccggttcaacttgaaagactctttatgaaacgcagactatattgacagaaacctcataagagaccacataggaggatgtactctgcaagggatcgaacatgaacaacgacagttcatcacgtaaactgaatctagatcatcaaaagccttctccgcgatgccattcgcgtcaacaatattgcatatgtaagtttgaagaaagtgactttcgacagacccattaggctcagagtagaggcaattgaaatcattgcgcctttacagccttcacgattgctagtgcaggttcggcgagaaaggatttccaaagatccgggtctttcttgatacattgcgcattctcgtaaggctcgatttccacatcgacgaatccatacttctcgtgcagcttcgttgatccagaatagcttatttccatggaggctgcttcgatgtcaattaatgctgaagggacttcgtagcgatacttgataccgccagggacatcttcgaaattcttaaacctgataccgagttcgcctgtcgttacggccggagctcttgggttgcaaaccctgacaccaatgaagcgaccgcccggtttcgcgtacttcgagatattactccacatcccttcaagcattgccacactctcagcatggtcaaacacgtagtttgcaaaaatgatgtcgtattcagaccgcaatggcaagtgatcgagaggctttgagacatctgcttcgagccaacgaattgcagacttagaggggtggtctaccctctgaccctgatgcatcattccaggggagatatcgacgacatctacggcgccagcgcctgcgtcgagagcttgccgtgcgcggatgccgctgccgccaccgagatcaagaattgttgctcctgtgggttggcccagagccaagagaaaaagctcctcgtccaattcagaaaatggcatcgaatagaacttttcgtcataattggaagcttgaacctcatattcacctttcatctgatatccagcttccatggtgtagatgagaatatattgccgtgatagggttcttcgcgtagatgaatcaaggcaaaggagtatgtccacatggag

SEQ ID NO: 10381 - DNA, 762 bp, Muscodor strobelii
  misc_feature: SGI cDNA ID NO. 563293
  misc_feature: Elevated expression when VOC is produced
  misc_feature: Encodes the peptide sequence at SEQ ID NO 10382
atggaagctggatatcagatgaaaggtgaatatgaggttcaagcttccaattatgacgaaaagttctattcgatgccattttctgaattggacgaggagctttttctcttggctctgggccaacccacaggagcaacaattcttgatctcggtggcggcagcggcatccgcgcacggcaagctctcgacgcaggcgctggcgccgtagatgtcgtcgatatctcccctggaatgatgcatcagggtcagagggtagaccacccctctaagtctgcaattcgttggctcgaagcagatgtctcaaagcctctcgatcacttgccattgcggtctgaatacgacatcatttttgcaaactacgtgtttgaccatgctgagagtgtggcaatgcttgaagggatgtggagtaatatctcgaagtacgcgaaaccgggcggtcgcttcattggtgtcagggtttgcaacccaagagctccggccgtaacgacaggcgaactcggtatcaggtttaagaatttcgaagatgtccctggcggtatcaagtatcgctacgaagtcccttcagcattaattgacatcgaagcagcctccatggaaataagctattctggatcaacgaagctgcacgagaagtatggattcgtcgatgtggaaatcgagccttacgagaatgcgcaatgtatcaagaaagacccggatctttggaaatcctttctcgccgaacctgcactagcaatcgtgaaggctgtaaaggcgcaatga

SEQ ID NO: 10382 - protein, 253 aa, Muscodor strobelii
  misc_feature: SGI Peptide ID NO. 563293
  misc_feature (48)..(150): Pfam Id: PF08241 Pfam Desc: Methyltransferase domain
  misc_feature (48)..(148): Pfam Id: PF08242 Pfam Desc: Methyltransferase domain
  misc_feature (8)..(251): NCBI GI: 171680552 Blast Desc: protein product [Podospora anserina] gi|170939903|emb|CAP65129.1| protein product [Podospora anserina]
  misc_feature (1)..(238): NCBI GI: 171695498 Blast Desc: protein product [Podospora anserina] gi|170947991|emb|CAP60155.1| protein product [Podospora anserina]
  misc_feature (10)..(151): NCBI GI: 238482877 Blast Desc: conserved [Aspergillus flavus NRRL3357] gi|220700727|gb|EED57065.1| conserved [Aspergillus flavus NRRL3357]
  misc_feature (24)..(221): NCBI GI: 238482521 Blast Desc: methyltransferase, [Aspergillus flavus NRRL3357] gi|220700549|gb|EED56887.1| methyltransferase, [Aspergillus flavus NRRL3357]
  misc_feature (7)..(251): NCBI GI: 149179371 Blast Desc: PM8797T_10439 [Planctomyces maris DSM 8797] gi|148841807|gb|EDL56212.1| PM8797T_10439 [Planctomyces maris DSM 8797]
  misc_feature (24)..(221): NCBI GI: 169765910 Blast Desc: [Aspergillus oryzae RIB40] gi|83765281|dbj|BAE55424.1| protein product [Aspergillus oryzae]
  misc_feature (39)..(151): NCBI GI: 169784990 Blast Desc: [Aspergillus oryzae RIB40] gi|83775703|dbj|BAE65823.1| protein product [Aspergillus oryzae]
  misc_feature (7)..(186): NCBI GI: 258566569 Blast Desc: [Uncinocarpus reesii 1704] gi|237907730|gb|EEP82131.1| [Uncinocarpus reesii 1704]
  misc_feature (7)..(153): NCBI GI: 156055742 Blast Desc: SS1G_05223 [Sclerotinia sclerotiorum 1980] gi|154703007|gb|EDO02746.1| SS1G_05223 [Sclerotinia sclerotiorum 1980]
  misc_feature (6)..(249): NCBI GI: 134103550 Blast Desc: ToxA protein [Saccharopolyspora erythraea NRRL 2338] gi|133916173|emb|CAM06286.1| ToxA protein [Saccharopolyspora erythraea NRRL 2338]
  misc_feature: Useful for introducing or modulating the production of volatile compounds
MEAGYQMKGEYEVQASNYDEKFYSMPFSELDEELFLLALGQPTGATILDLGGGSGIRARQALDAGAGAVDVVDISPGMMHQGQRVDHPSKSAIRWLEADVSKPLDHLPLRSEYDIIFANYVFDHAESVAMLEGMWSNISKYAKPGGRFIGVRVCNPRAPAVTTGELGIRFKNFEDVPGGIKYRYEVPSALIDIEAASMEISYSGSTKLHEKYGFVDVEIEPYENAQCIKKDPDLWKSFLAEPALAIVKAVKAQ

SEQ ID NO: 10383 - DNA, 591 bp, Muscodor strobelii
  misc_feature: SGI cDNA ID NO. 563294
  misc_feature: Encodes the peptide sequence at SEQ ID NO 10384
atgcgtacggaatgccttgactatactctgatgcctaatgccgcaatgtgtggaccacacacactatgttgtccagcaaccaaagcgttttgtttcacctatgcgttcactacggaagatagccctggcgcaactttcacacatgtgcaatgcgccgagtctgctggttttggagagctctacccctatccgcctgaatcaatcacagcaacgggaaacgccgatgccgaagcttctgcaacgacgtctatatccatacagcccgtgaatactcacacgtcgacttcatcgcattcaatctccactgcggctgtggtaggaggcgcaataggagctgtcctgatcgttctcttgattattgtaggcattgtgctcgtcatcaagcgacgtcgccagcgacagagacgccaatttgacaccgaggggccagacaaagcaatagacacagcaaatgaagacaccaatctggaagatagagacccagcagcacccaacggcctcgcctgggcgaccgaagagcttcggaccgaattggccactaaacgcaaaatctccaagtgcactaaatcccttaacctctcatcctattga

SEQ ID NO: 10384 - protein, 196 aa, Muscodor strobelii
  misc_feature: SGI Peptide ID NO. 563294
MRTECLDYTLMPNAAMCGPHTLCCPATKAFCFTYAFTTEDSPGATFTHVQCAESAGFGELYPYPPESITATGNADAEASATTSISIQPVNTHTSTSSHSISTAAVVGGAIGAVLIVLLIIVGIVLVIKRRRQRQRRQFDTEGPDKAIDTANEDTNLEDRDPAAPNGLAWATEELRTELATKRKISKCTKSLNLSSY

SEQ ID NO: 10385 - DNA, 738 bp, Muscodor strobelii
  misc_feature: SGI cDNA ID NO. 563295
  misc_feature: Encodes the peptide sequence at SEQ ID NO 10386
atgattgtcgccaaatattttgctctggccattttggctgtattgccagtaagtggcgctttaacccataagggtgtagattggtcctcggtgctcgtcgaggaaaaggctgggcggtcttatacaaccacaagtggcactaagcaagctctcgaaacaattatcaagtccagcggagcaaacaccgtgcgtcagcgagtttgggtgaacccctctgatggcaactacaacctcgcgtacaaccttcaaattgcaaagcgagcacaggcggctggactgaagatttatctggatcttcattttagtgacacgtgggctgatcccgcgcaccaaagcatcccgtcaggatggccaacggacttgagcagtctcacttggaagctgtataactatacattagatgtgtcaaactcctttgcatcagcaggtatcacgccttccattatttcgatcgggaatgaaatcacaaatggacttctatggccgaccggaaaatataccaactttaataatgttgcatcactgctgcattctgctgcattcggcatcaaggacagcaactttgccaccaagcccagcatcatgatacatacagataacggctggaactgggacacacagcaatggttttggagttcagtccttggagcaggaccactcctaacaaccgatttcgacatgatgggcgtgtcgtactatcctgtcagtctccggctttccaatttcttaaagagatga

SEQ ID NO: 10386 - protein, 245 aa, Muscodor strobelii
  misc_feature: SGI Peptide ID NO. 563295
  misc_feature (23)..(243): Pfam Id: PF07745 Pfam Desc: Glycosyl hydrolase family 53
  misc_feature (23)..(234): Pfam Id: PF07745 Pfam Desc: Glycosyl hydrolase family 53
  misc_feature (1)..(234): NCBI GI: 116192277 Blast Desc: CHGG_05856 [Chaetomium globosum CBS 148.51] gi|88181769|gb|EAQ89237.1| CHGG_05856 [Chaetomium globosum CBS 148.51]
  misc_feature (7)..(234): NCBI GI: 154289225 Blast Desc: BC1G_16209 [Botryotinia fuckeliana B05.10] gi|150850727|gb|EDN25920.1| BC1G_16209 [Botryotinia fuckeliana B05.10]
  misc_feature (5)..(234): NCBI GI: 156041212 Blast Desc: SS1G_11585 [Sclerotinia sclerotiorum 1980] gi|154695968|gb|EDN95706.1| SS1G_11585 [Sclerotinia sclerotiorum 1980]
  misc_feature (10)..(234): NCBI GI: 38567044 Blast Desc: arabinogalactan endo-1, 4-beta-galactosidase [Neurospora crassa]
  misc_feature (10)..(234): NCBI GI: 164428725 Blast Desc: arabinogalactan endo-1,4-beta-galactosidase [Neurospora crassa OR74A] gi|157072255|gb|EAA35929.2| arabinogalactan endo-1,4-beta-galactosidase [Neurospora crassa
  misc_feature (20)..(234): NCBI GI: 56404451 Blast Desc: arabinogalactan endo-1,4-beta-galactosidase [Neurospora crassa OR74A] gi|157072255|gb|EAA35929.2| arabinogalactan endo-1,4-beta-galactosidase [Neurospora crassa
  misc_feature (18)..(234): NCBI GI: 261359029 Blast Desc: arabinogalactan endo-1,4-beta-galactosidase [Verticillium albo-atrum VaMs.102]
  misc_feature (11)..(234): NCBI GI: 145608026 Blast Desc: MGG_09726 [Magnaporthe grisea 70-15] gi|145015493|gb|EDK00030.1| MGG_09726 [Magnaporthe grisea 70-15]
  misc_feature (1)..(234): NCBI GI: 256728999 Blast Desc: NECHADRAFT_40212 [Nectria haematococca mpVI 77-13-4]
  misc_feature (20)..(234): NCBI GI: 56404452 Blast Desc: NECHADRAFT_40212 [Nectria haematococca mpVI 77-13-4]
  misc_feature (20)..(234): SWISSPROT Homolog: EC 3.2.1.89 Arabinogalactan endo-1,4-beta-galactosidase
MIVAKYFALAILAVLPVSGALTHKGVDWSSVLVEEKAGRSYTTTSGTKQALETIIKSSGANTVRQRVWVNPSDGNYNLAYNLQIAKRAQAAGLKIYLDLHFSDTWADPAHQSIPSGWPTDLSSLTWKLYNYTLDVSNSFASAGITPSIISIGNEITNGLLWPTGKYTNFNNVASLLHSAAFGIKDSNFATKPSIMIHTDNGWNWDTQQWFWSSVLGAGPLLTTDFDMMGVSYYPVSLRLSNFLKR

SEQ ID NO: 10387 - DNA, 1260 bp, Muscodor strobelii
  misc_feature: SGI cDNA ID NO. 563296
  misc_feature: Elevated expression when VOC is produced
  misc_feature: Encodes the peptide sequence at SEQ ID NO 10388
atgcgcactgaatattcgattgttctgcttgcggcttgcggcgagcttgtcacggctgcaaggagctcatttcgatcgagagtcgcgttgaatgacggctcgagtaaaatcgccaggaacatccgcaaatgtctcggcccacctccaccaacggtctattttccattgaatttccgatacggattcagtgaaaaaataaccaccgatctcgtcataccaggtcaaaatggcactatcaaagtctgttttgatcaaggttctgagagctattggttgttggacaaaggcgcagtctacaactggggttgtgacggactcttttgtctgggtccatgcaacatcagtgcgactccggcctacgattattctgcgtcacctgacgccacgaaacctgttcctttcgagtacttcaatgcatatggtgatgccacaaagtttattgtcggagatactgctgtcgaagacacggtacgcgggggagacgacgggaaatgtacccctcgagacatctcatacgaccaaggaattttaggaactgccccttatcgacatgatgctgattggaccacagtcggacctcatcctcggcagcatcttctcgaaaagggcacaatcaaagccgccgtccagtcgatgtggatggataagcgaccatctggagtaaaagatacttacaccggtggtgcactcttcggcggaatcgatttgagtaaatttaccggacccttagtgaaggtccgaagcctaaggcccgaacccggatctgtgggatattacgttgctccaccaatgatcagcttccagggcaagaagattagcactgccggctctggcgtagatcggtgcctagtagactcgggaactcgaaacgatgcgcttcccattggatttgatgatgcagaggcgttttacgaggcgaccgggctggtcgaaagtcctaacggctggacatcctggcctggtgagtgcgacagcgttccgttggacgtgacactcgatttgaagttccctggtatgaaaaatggaacttcagttgatgttaagattccgctaaagaattacgtacgatgggattcaggtgaaaagggactttgtaggttgaacattaatcttggctcttgcactctcgccgcaccgttcagctccgcggctttcttcgccgccgacgacgaacatggagagatcgcctttgcacagggtggaatttctgagatgggcagtgggccatccgagaacgatattgtgctaagaataccttaa

SEQ ID NO: 10388 - protein, 419 aa, Muscodor strobelii
  misc_feature: SGI Peptide ID NO. 563296
  misc_feature (52)..(369): NCBI GI: 154317078 Blast Desc: BC1G_03441 [Botryotinia fuckeliana B05.10] gi|150844858|gb|EDN20051.1| BC1G_03441 [Botryotinia fuckeliana B05.10]
  misc_feature (26)..(234): NCBI GI: 156049131 Blast Desc: SS1G_08272 [Sclerotinia sclerotiorum 1980] gi|154692671|gb|EDN92409.1| SS1G_08272 [Sclerotinia sclerotiorum 1980]
  misc_feature (73)..(408): NCBI GI: 256729915 Blast Desc: NECHADRAFT_101314 [Nectria haematococca mpVI 77-13-4]
  misc_feature (51)..(353): NCBI GI: 50553708 Blast Desc: YALI0E22374p [Yarrowia lipolytica] gi|49650134|emb|CAG79860.1| YALI0E22374p [Yarrowia lipolytica]
  misc_feature (63)..(294): NCBI GI: 154322142 Blast Desc: BC1G_01218 [Botryotinia fuckeliana B05.10] gi|150850465|gb|EDN25658.1| BC1G_01218 [Botryotinia fuckeliana B05.10]
  misc_feature (53)..(410): NCBI GI: 145248205 Blast Desc: An13g02130 [Aspergillus niger] gi|134081101|emb|CAK41612.1| protein product [Aspergillus niger]
  misc_feature (39)..(408): NCBI GI: 145254317 Blast Desc: An18g01320 [Aspergillus niger] gi|134084172|emb|CAK47205.1| protein product [Aspergillus niger]
  misc_feature (79)..(414): NCBI GI: 45201336 Blast Desc: AGR240Wp [Ashbya gossypii ATCC 10895] gi|44986190|gb|AAS54730.1| AGR240Wp [Ashbya gossypii ATCC 10895]
  misc_feature (149)..(399): NCBI GI: 169598015 Blast Desc: SNOG_01805 [Phaeosphaeria nodorum SN15] gi|160707642|gb|EAT91454.2| SNOG_01805 [Phaeosphaeria nodorum SN15]
  misc_feature (77)..(407): NCBI GI: 46122187 Blast Desc: FG05471.1 [Gibberella zeae PH-1]
  misc_feature: Useful for introducing or modulating the production of volatile compounds
MRTEYSIVLLAACGELVTAARSSFRSRVALNDGSSKIARNIRKCLGPPPPTVYFPLNFRYGFSEKITTDLVIPGQNGTIKVCFDQGSESYWLLDKGAVYNWGCDGLFCLGPCNISATPAYDYSASPDATKPVPFEYFNAYGDATKFIVGDTAVEDTVRGGDDGKCTPRDISYDQGILGTAPYRHDADWTTVGPHPRQHLLEKGTIKAAVQSMWMDKRPSGVKDTYTGGALFGGIDLSKFTGPLVKVRSLRPEPGSVGYYVAPPMISFQGKKISTAGSGVDRCLVDSGTRNDALPIGFDDAEAFYEATGLVESPNGWTSWPGECDSVPLDVTLDLKFPGMKNGTSVDVKIPLKNYVRWDSGEKGLCRLNINLGSCTLAAPFSSAAFFAADDEHGEIAFAQGGISEMGSGPSENDIVLRIP

SEQ ID NO: 10389 - DNA, 1001 bp, Muscodor strobelii
  misc_feature: SGI EST ID NO. CUFF.24579.0
  misc_feature: Variant of the nucleotide sequence at SEQ ID NO 10387
gggcagcgatctacaatccctggtatcgaaactgcacttatcgatgcctattcggtacgcgggggagacgacgggaaatgtacccctcgagacatctcatacgaccaaggaattttaggaactgccccttatcgacatgatgctgattggaccacagtcggacctcatcctcggcagcatcttctcgaaaagggcacaatcaaagccgccgtccagtcgatgtggatggataagcgaccatctggagtaaaagatacttacaccggtggtgcactcttcggcggaatcgatttgagtaaatttaccggacccttagtgaaggtccgaagcctaaggcccgaacccggatctgtgggatattacgttgctccaccaatgatcagcttccagggcaagaagattagcactgccggctctggcgtagatcggtgcctagtagactcgggaactcgaaacgatgcgcttcccattggatttgatgatgcagaggcgttttacgaggcgaccgggctggtcgaaagtcctaacggctggacatcctggcctggtgagtgcgacagcgttccgttggacgtgacactcgatttgaagttccctggtatgaaaaatggaacttcagttgatgttaagattccgctaaagaattacgtacgatgggattcaggtgaaaagggactttgtaggttgaacattaatcttggctcttgcactctcgccgcaccgttcagctccgcggctttcttcgccgccgacgacgaacatggagagatcgcctttgcacagggtggaatttctgagatgggcagtgggccatccgagaacgatattgtgctaagaataccttaagataaccaattattgccgacggggcatcttcgtacacagatacaatgcgatctccatatatcttaagatggtttcgtatttttttatagattgcagtttaaatggtcatcacttgggcatgatagaggacaaataaacctacaatcttatctggg

SEQ ID NO: 10390 - DNA, 870 bp, Muscodor strobelii
  misc_feature: SGI cDNA ID NO. 563297
  misc_feature: Encodes the peptide sequence at SEQ ID NO 10391
atgataggagaagtgtgtgaccagctgaggaaccttcaggtgggcaccgatgaagtactagaaagagatgagagagctggggatcttgagtcacgagatcgtctcgaggataagtacacaaagtacatgacaaaaattgaggacgcaatcagccagatgcgttcgatgcatgatgacaagttgatagacttgcaagacacagtttcccggcttgagctcgaattagagcaagccaaaaagctcacgccacgctctggcgtagattttaatcatgaaaaatttgagctcgaggcacaaatacgtgcgctcgaagatgataaggaagcgcttcagagcgataagaacgagctccttcttaccataagggagcagaatgacacagatcaagcgcagcaagaagaaatcaaacggttgcaaagcgcaactgaagctgcgaacggccacggactccagtacgacgccctggagaaggagcatgtcgccttaatgaatgactacagctatttggaggagaactacagctatttgaaggagaagcatgtagtgctcggggatcgcaacaaggaccttgtccgggagctctccaaatatggcccaacgcgttccatgtgtcgtattcgagcagaacccgacgtgttagaagacaagctcatggacatctcaaatcctacaggtggtccttggaaatgtttacgtgtgacagaaaagaccaagaatgttcaaggtaaagagagcaccaagcataccgattatcaattcgaacgtgtcttcggcccccaagacagcaatgctgtcgtgtatgaggcaatgaggaatttctcagacatggcactgcaatgctcatctgttaacgtcgtagggttcggctaa

SEQ ID NO: 10391 - protein, 289 aa, Muscodor strobelii
  misc_feature: SGI Peptide ID NO. 563297
  misc_feature (198)..(289): NCBI GI: 213404052 Blast Desc: kinesin-like protein [Schizosaccharomyces japonicus yFS275] gi|212000845|gb|EEB06505.1| kinesin-like protein [Schizosaccharomyces japonicus yFS275]
MIGEVCDQLRNLQVGTDEVLERDERAGDLESRDRLEDKYTKYMTKIEDAISQMRSMHDDKLIDLQDTVSRLELELEQAKKLTPRSGVDFNHEKFELEAQIRALEDDKEALQSDKNELLLTIREQNDTDQAQQEEIKRLQSATEAANGHGLQYDALEKEHVALMNDYSYLEENYSYLKEKHVVLGDRNKDLVRELSKYGPTRSMCRIRAEPDVLEDKLMDISNPTGGPWKCLRVTEKTKNVQGKESTKHTDYQFERVFGPQDSNAVVYEAMRNFSDMALQCSSVNVVGFG

SEQ ID NO: 10392 - DNA, 552 bp, Muscodor strobelii
  misc_feature: SGI EST ID NO. CUFF.24582.0
  misc_feature: Variant of the nucleotide sequence at SEQ ID NO 10390
gctatttgaaggagaagcatgtagtgctcggggatcgcaacaaggaccttgtccgggagctctccaaatatggcccaacgcgttccatgtgtcgtattcgagcagaacccgacgtgttagaagacaagctcatggacatctcaaatcctacaggtggtccttggaaatgtttacgtgtgacagaaaagaccaagaatgttcaaggtaaagagagcaccaagcataccgattatcaattcgaacgtgtcttcggcccccaagacagcaatgctgtcgtgtatgaggcaatgaggaatttctcagacatggcactgcaatgctcatctgttaacgtcgtagggttcggctaaactgggagcgggaagactcataccttcgttggcacgaaggccgatccaggaattatcccgagacatattgagggttactttcaaatggctgaggcctctgatgatggttaccagtacgaattcactatctctgccgtcgagttctatatgggcagcatgctcgacctgattgacgcgcaatcaaaaaatatcggtaagtgga

SEQ ID NO: 10393 - DNA, 573 bp, Muscodor strobelii
  misc_feature: SGI cDNA ID NO. 563298
  misc_feature: Reduced expression when VOC is produced
  misc_feature: Encodes the peptide sequence at SEQ ID NO 10394
atgctcaccgacagtgttgcgctactggcgctgtccgccctcacgctggtttcggcccaggccaattccaactcgagcttcaagatcgaccccacgctggtcgacgacaacctaaaaaacacctggtgcaacaccgaatacaacagctgcgtcactctctgcggctctgtctccgtcgacaactgcaactcgaccacgcttgacttcgaatgcgagtgttctagcggcacattccccgacatgaacaagtaccgagacaccatcccctggttcgtctgcgaccagctccagtccaactgcattatccagaacgagaacaacgccgccggccagttgaactgctccaacacctacggcttcaagtgcgccaacgcgaccatcgcggacaatgccggcactggcgcttctgacggcaccaccacctccagcgcctcgtccagccccaccggcgcctcccagaccacctcggctcccacctcgtcttcttcgggtgccgcccctaccgccaacatccagatcattggaaacggtgccgccgccatggccgttggtctgcttgcctatgctctgtga

SEQ ID NO: 10394 - protein, 190 aa, Muscodor strobelii
  misc_feature: SGI Peptide ID NO. 563298
  misc_feature (2)..(176): NCBI GI: 85114244 Blast Desc: NCU02041 [Neurospora crassa OR74A] gi|28926453|gb|EAA35427.1| [Neurospora crassa OR74A] gi|38566912|emb|CAE76216.1| [Neurospora crassa]
  misc_feature (2)..(168): NCBI GI: 171687427 Blast Desc: protein product [Podospora anserina] gi|170943675|emb|CAP69327.1| protein product [Podospora anserina]
  misc_feature (37)..(190): NCBI GI: 209570382 Blast Desc: [Glomerella graminicola]
  misc_feature (7)..(190): NCBI GI: 240278446 Blast Desc: conserved [Ajellomyces capsulatus H143]
  misc_feature (9)..(190): NCBI GI: 225556060 Blast Desc: conserved [Ajellomyces capsulatus G186AR]
  misc_feature (7)..(136): NCBI GI: 156062220 Blast Desc: SS1G_01226 [Sclerotinia sclerotiorum 1980] gi|154696562|gb|EDN96300.1| SS1G_01226 [Sclerotinia sclerotiorum 1980]
  misc_feature (7)..(124): NCBI GI: 154314554 Blast Desc: BC1G_03986 [Botryotinia fuckeliana B05.10] gi|150848608|gb|EDN23801.1| BC1G_03986 [Botryotinia fuckeliana B05.10]
  misc_feature (1)..(116): NCBI GI: 238844863 Blast Desc: conserved [Microsporum canis CBS 113480]
  misc_feature (1)..(116): NCBI GI: 258564532 Blast Desc: [Uncinocarpus reesii 1704] gi|237908518|gb|EEP82919.1| [Uncinocarpus reesii 1704]
  misc_feature (6)..(159): NCBI GI: 154298406 Blast Desc: [Botryotinia fuckeliana B05.10] gi|150858111|gb|EDN33303.1| [Botryotinia fuckeliana B05.10]
  misc_feature: Useful for introducing or modulating the production of volatile compounds
MLTDSVALLALSALTLVSAQANSNSSFKIDPTLVDDNLKNTWCNTEYNSCVTLCGSVSVDNCNSTTLDFECECSSGTFPDMNKYRDTIPWFVCDQLQSNCIIQNENNAAGQLNCSNTYGFKCANATIADNAGTGASDGTTTSSASSSPTGASQTTSAPTSSSSGAAPTANIQIIGNGAAAMAVGLLAYAL

SEQ ID NO: 10395 - DNA, 1718 bp, Muscodor strobelii
  misc_feature: SGI EST ID NO. CUFF.24594.0
  misc_feature: Variant of the nucleotide sequence at SEQ ID NO 10393
cgcttgcttggatgcttgcttggatggcaggtaaaggaagaccttatcttgactccaatttcccgtcgccggcatctaagaaggttcaattacgagcacatagcttctaagatggcactaatacaagtcaagcactgcaacgaaagctctggcttgggtacacctaccttaacctggcctaggtaggtgcagggtgcaggtgtaggtgaggtgtgtgtcgtgctgggcgggtgcacccccctggttgtttggtgaacgggcgagacgggcgagacgagacgggagcgcctgcttccttcacgatgtctgtctcggtctcgtcctcctcgcctctggatgccggcctgttttcctccatcctcgctccctctctctcccccgagtcgtaaccacagtcatagtcacagacacatacacaatttaccataacactattcatcgtctgtaagaagcataagcaattacactcatacacatccacgcttgattagtagaggtccatccgtgcacacgcactccgccctctccggcaccacagtccaccacggtccaccacaacactccatttccaccacagcaatcgcagtcacactcgcaaccacaaccgccatgctcaccgacagtgttgcgctactggcgctgtccgccctcacgctggtttcggcccaggccaattccaactcgagcttcaagatcgaccccacgctggtcgacgacaacctaaaaaacacctggtgcaacaccgaatacaacagctgcgtcactctctgcggctctgtctccgtcgacaactgcaactcgaccacgcttgacttcgaatgcgagtgttctagcggcacattccccgacatgaacaagtaccgagacaccatcccctggttcgtctgcgaccagctccagtccaactgcattatccagaacgagaacaacgccgccggccagttgaactgctccaacacctacggcttcaagtgcgccaacgcgaccatcgcggacaatgccggcactggcgcttctgacggcaccaccacctccagcgcctcgtccagccccaccggcgcctcccagaccacctcggctcccacctcgtcttcttcgggtgccgcccctaccgccaacatccagatcattggaaacggtgccgccgccatggccgttggtctgcttgcctatgctctgtgagcgcgacgcgacctctttcgagtgatgtttcccactggcgttcttcggagttctggcatgctgcgttctgccgatgtgcacgacgacccttttaatacgcgacgacacaagatttgacgagaaaatggtgagttggcatagcttggagaagtgaagaggttgaagacgtgcagtttggaattgtctgaactgtcagattcggcaactgggcaaagcttcggggccgttcagcaggctgtagccagattcgagatatggtggagtgatgtgcccgttgtgtaagacagaccacagttttgctttcagtccaataaactaccccgtctttacatacaactggtagtttagtggctatgatgacgagtgtggcgtgcggttattcctactcaacactcaattaaggttatgcaagtacaatacactgtagtcctgcaacgctaccccagacgcagcgttcccttttcactgacacagcttcgccatgccatggcgaagccccatgagtgcctatcgtattttagaattcctgagctccc

SEQ ID NO: 10396 - DNA, 780 bp, Muscodor strobelii
  misc_feature: SGI cDNA ID NO. 563299
  misc_feature: Reduced expression when VOC is produced
  misc_feature: Encodes the peptide sequence at SEQ ID NO 10397
atgtcgatcttcacaacttaccccgtctactccccttttaataaccgcctgagttttggcaacattgtcaacctcctggatgacctgaaccagcctagtgctcctcgtagacactgccaacctcagcatgtgtctcgccgcataaatcacttttctcctcgcttcgatattcaggaaaatgaatcgagctacgaactctacggcgaattaccaggcgtagagaaggacaatatccacatcgacttccgtgatccgcaaaccattgttatcagtggcaaggttgagcgcactcatacctccaattcaccatctccggctcttgttgaaatcaccgttgccgaaaagcaagatgttgagacgagccacgctgctactacatcagaggcagaggaggatgcagtccttgtagacgccgacgcccacgagacaagctcagacaagtcttaccaggccacagtcgaagacgacactgaagccgatgacggccacgcgacatcatcatcaccatctgtcaccgagcagactccggccaccactgtcgctgagcctgccaaggtcgagactcctgccacgaaccctgcccctagcagcgagactgcacctgtcaacaatgcgaggtactgggttcgcgagcgtagcatcggtagcttctcccgctccttcgtcttctccgagcgcgtcgagcacgagaatgttaccgcttcgctcaacaacggaatcttgagcgtcgttgtgcccaaggctaagaagcacgaaagccgtcgcatcgccatcttctag

SEQ ID NO: 10397 - protein, 259 aa, Muscodor strobelii
  misc_feature: SGI Peptide ID NO. 563299
  misc_feature (207)..(259): Pfam Id: PF00011 Pfam Desc: Hsp20/alpha crystallin family
  misc_feature (10)..(258): NCBI GI: 85111102 Blast Desc: 30 kDa heat shock protein [Neurospora crassa OR74A] gi|123573|sp|P19752.1|HSP30_NEUCR RecName: Full=30 kDa heat shock protein gi|168820|gb|AAA33589.1| heat shock protein 30 crassa] 30
  misc_feature (13)..(258): NCBI GI: 256734389 Blast Desc: NECHADRAFT_102357 [Nectria haematococca mpVI 77-13-4]
  misc_feature (18)..(259): NCBI GI: 130693699 Blast Desc: small heat shock protein [Hypocrea virens]
  misc_feature (13)..(258): NCBI GI: 46108552 Blast Desc: FG01158.1 [Gibberella zeae PH-1]
  misc_feature (13)..(258): NCBI GI: 88766399 Blast Desc: heat shock protein 30 [Metarhizium anisopliae]
  misc_feature (18)..(259): NCBI GI: 61743838 Blast Desc: small heat shock protein [Hypocrea lixii]
  misc_feature (13)..(258): NCBI GI: 227018528 Blast Desc: heat shock protein 30 [Fusarium lichenicola]
  misc_feature (18)..(258): NCBI GI: 261355882 Blast Desc: 30 kDa heat shock protein [Verticillium albo-atrum VaMs.102]
  misc_feature (1)..(258): NCBI GI: 154308532 Blast Desc: BC1G_08326 [Botryotinia fuckeliana B05.10] gi|150852867|gb|EDN28059.1| BC1G_08326 [Botryotinia fuckeliana B05.10]
  misc_feature (11)..(258): NCBI GI: 256719867 Blast Desc: NECHADRAFT_56730 [Nectria haematococca mpVI 77-13-4]
  misc_feature: Useful for introducing or modulating the production of volatile compounds
MSIFTTYPVYSPFNNRLSFGNIVNLLDDLNQPSAPRRHCQPQHVSRRINHFSPRFDIQENESSYELYGELPGVEKDNIHIDFRDPQTIVISGKVERTHTSNSPSPALVEITVAEKQDVETSHAATTSEAEEDAVLVDADAHETSSDKSYQATVEDDTEADDGHATSSSPSVTEQTPATTVAEPAKVETPATNPAPSSETAPVNNARYWVRERSIGSFSRSFVFSERVEHENVTASLNNGILSVVVPKAKKHESRRIAIF

SEQ ID NO: 10398 - DNA, 1322 bp, Muscodor strobelii
  misc_feature: SGI EST ID NO. CUFF.24767.0
  misc_feature: Variant of the nucleotide sequence at SEQ ID NO 10396
agaatagtcatcgtattgattattcatggttttcttgaacgtggtagaatatgcctgatttagtgtcttgcaagtataaagacgttgccaaagaccatgtctccggttttcgttctgtctcagtctacacacagaacacaaaccactaaagcactctatcctcactctgctctacgctcttgcttccaatattagaaaacgggcttcttgtttcacataaacaatctaagatgtcgatcttcacaacttaccccgtctactccccttttaataaccgcctgagttttggcaacattgtcaacctcctggatgacctgaaccagcctagtgctcctcgtagacactgccaacctcagcatgtgtctcgccgcataaatcacttttctcctcgcttcgatattcaggaaaatgaatcgagctacgaactctacggcgaattaccaggcgtagagaaggacaatatccacatcgacttccgtgatccgcaaaccattgttatcagtggcaaggttgagcgcactcatacctccaattcaccatctccggctcttgttgaaatcaccgttgccgaaaagcaagatgttgagacgagccacgctgctactacatcagaggcagaggaggatgcagtccttgtagacgccgacgcccacgagacaagctcagacaagtcttaccaggccacagtcgaagacgacactgaagccgatgacggccacgcgacatcatcatcaccatctgtcaccgagcagactccggccaccactgtcgctgagcctgccaaggtcgagactcctgccacgaaccctgcccctagcagcgagactgcacctgtcaacaatgcgaggtactgggttcgcgagcgtagcatcggtagcttctcccgctccttcgtcttctccgagcgcgtcgagcacgagaatgttaccgcttcgctcaacaacggaatcttgagcgtcgttgtgcccaaggctaagaagcacgaaagccgtcgcatcgccatcttctagatgccgacctgatctcttgcgttgtcttctctcgccatgtatcatacacgaggaatcacatatggactgctcggagttcaacggatggagcatttacatcggcgcgatctctagatggattggtacttacattggtttctggatgcattgatttacagtgattttcttgtaattattctttggctgagcttgtaggaatggaggattgttcgacgatatagaatcaagtagttgtacggaatgagatctttaattctaagatgctgtcttacccatttacctcgtgactgtagaatataacatacataacag

SEQ ID NO: 10399 - DNA, 1914 bp, Muscodor strobelii
  misc_feature: SGI cDNA ID NO. 563300
  misc_feature: Reduced expression when VOC is produced
  misc_feature: Encodes the peptide sequence at SEQ ID NO 10400
atggagaatgctccctcgaactcggtcgccgacaacggtcttgcgaaccacgaaaatgcacaaaacacaacggaagggatagcagtggacaatggagtctcagcgtactcgcagagtccaagtccatcgaatcatgctgcgttccaggcccaataccaacagctctatccaacgccctcaaacatgttctccaaccagtttgatatagcacaatcacaaggcgccgatcgacaaggaccatacaacatgaatgctatggctaatgccttgccacaatctgcgtacagatctggttactcgggtgtacaacagcatcggtacccgccgtctggtcctagtatggtgccgcagatgatgccgtttcatggacagcaacagcatatgccacaacttgccaatcaacaatacttcatgccccaacaagcacaaataccgcaatattacaatactcagatgtcgccaaccgctcagcatcaggcacatcaatctggcttgcctcccagagcgaacatgaacatgggttattatccgaatacgggcatgatgaatcagtcgcaacctctggttcctgggtactactatcctccgtcaaaccagtatcctgcgcaaaatgcatcaatgcaaagtcatatgcagcgatcccagtatattacgccggaaggtccttcgggagattttacaggcaatgcgttagcgcagaggaacaatcgtgttggaggatttagtggtgaattcgctcagaacgaggatgtacctggaaaccgttctaatattgttcgagggcctccgcgcaagccgcgtcaaagtggtcacgcaatttgggtcggaaacctacccccacagactgatcttatgagcctagttcatcacgtttgcaaagaagccactggcttagagtcacttttcctgatctccaagagcaattgtgcctttgcaaacttcaaggatgagtcaagctgcattacagcacaacaaaagcttcacgattcgaaattccagtccgtccgtctggtaagccgacttcgaaagagcacagtcgaaggtacgcagggtcagacagcaccaaccggcccttcagctacctcaccaccaccacctgtctcttcagaaccgatatcatcgagtccgaggcctacgagccccactgcacctccaacgggagaaacagaagtgaaatccgcaccggtagacacatccacacagaaggataagtttttcatactgaagagtcttaccgtggaagatctagaactaagcgtcagaaatggtgtatgggcaacccagtcacacaacgaagacgctcttaataaagctttcggggccgttgataatgtctatctcatcttttctgcaaacaaatcgggtgaatattttggatacgccagaatgacgtcttcgataaatgacgacccagccgcagccatcgaattcgcaccgaaagcacagcccgcgaacgacattgatgtgcctcgagcgattccaaccgaagcaaccgaaacgtgtccccgcggccgtatcatagacgactcagctcgtgggacaattttttgggaggttgaaagggatgagacagaagcaacatcagacactccatctgaagactcggagagcagcaaaagtgtgcaagatggtgaaggtggatcgaaagcatggggaaagccattcaaactagagtggctttcgacaacaagactcccattctaccgagctcgtgggctacggaatccctggaactcgaatcgtgaagtcaagattgctcgcgatggcactgaactagaacctacggtgggcagaaaactcattgggctgttcaaccgtgtccaaagcccaccccttattccggccattaatatgagaacgaacatggccatcgctgctggattcccaccgcaaatgcctcagggatttaggtga

SEQ ID NO: 10400 - protein, 637 aa, Muscodor strobelii
  misc_feature: SGI Peptide ID NO. 563300
  misc_feature (530)..(607): Pfam Id: PF04146 Pfam Desc: YT521-B-like family
  misc_feature (542)..(607): Pfam Id: PF04146 Pfam Desc: YT521-B-like family
  misc_feature (63)..(635): NCBI GI: 256734388 Blast Desc: NECHADRAFT_89989 [Nectria haematococca mpVI 77-13-4]
  misc_feature (53)..(635): NCBI GI: 46108554 Blast Desc: FG01159.1 [Gibberella zeae PH-1]
  misc_feature (61)..(616): NCBI GI: 171680319 Blast Desc: protein product [Podospora anserina] gi|170939786|emb|CAP65012.1| protein product [Podospora anserina]
  misc_feature (63)..(604): NCBI GI: 39945278 Blast Desc: MGG_04621 [Magnaporthe grisea 70-15] gi|145011321|gb|EDJ95977.1| MGG_04621 [Magnaporthe grisea 70-15]
  misc_feature (214)..(636): NCBI GI: 156036412 Blast Desc: SS1G_12895 [Sclerotinia sclerotiorum 1980] gi|154698300|gb|EDN98038.1| SS1G_12895 [Sclerotinia sclerotiorum 1980]
  misc_feature (233)..(616): NCBI GI: 154308552 Blast Desc: BC1G_08336 [Botryotinia fuckeliana B05.10] gi|150852877|gb|EDN28069.1| BC1G_08336 [Botryotinia fuckeliana B05.10]
  misc_feature (247)..(630): NCBI GI: 116206866 Blast Desc: CHGG_02726 [Chaetomium globosum CBS 148.51] gi|88183323|gb|EAQ90791.1| CHGG_02726 [Chaetomium globosum CBS 148.51]
  misc_feature (307)..(610): NCBI GI: 164422785 Blast Desc: NCU09365 [Neurospora crassa OR74A] gi|157069820|gb|EAA34539.2| conserved [Neurospora crassa OR74A]
  misc_feature (224)..(606): NCBI GI: 189193801 Blast Desc: conserved [Pyrenophora tritici-repentis Pt-1C-BFP] gi|187978803|gb|EDU45429.1| conserved [Pyrenophora tritici-repentis Pt-1C-BFP]
  misc_feature (268)..(605): NCBI GI: 242775690 Blast Desc: YT521-B-like splicing factor, [Talaromyces stipitatus ATCC 10500] gi|218722310|gb|EED21728.1| YT521-B-like splicing factor, [Talaromyces stipitatus ATCC 10500]
  misc_feature: Useful for introducing or modulating the production of volatile compounds
MENAPSNSVADNGLANHENAQNTTEGIAVDNGVSAYSQSPSPSNHAAFQAQYQQLYPTPSNMFSNQFDIAQSQGADRQGPYNMNAMANALPQSAYRSGYSGVQQHRYPPSGPSMVPQMMPFHGQQQHMPQLANQQYFMPQQAQIPQYYNTQMSPTAQHQAHQSGLPPRANMNMGYYPNTGMMNQSQPLVPGYYYPPSNQYPAQNASMQSHMQRSQYITPEGPSGDFTGNALAQRNNRVGGFSGEFAQNEDVPGNRSNIVRGPPRKPRQSGHAIWVGNLPPQTDLMSLVHHVCKEATGLESLFLISKSNCAFANFKDESSCITAQQKLHDSKFQSVRLVSRLRKSTVEGTQGQTAPTGPSATSPPPPVSSEPISSSPRPTSPTAPPTGETEVKSAPVDTSTQKDKFFILKSLTVEDLELSVRNGVWATQSHNEDALNKAFGAVDNVYLIFSANKSGEYFGYARMTSSINDDPAAAIEFAPKAQPANDIDVPRAIPTEATETCPRGRIIDDSARGTIFWEVERDETEATSDTPSEDSESSKSVQDGEGGSKAWGKPFKLEWLSTTRLPFYRARGLRNPWNSNREVKIARDGTELEPTVGRKLIGLFNRVQSPPLIPAINMRTNMAIAAGFPPQMPQGFR

SEQ ID NO: 10401 - DNA, 3355 bp, Muscodor strobelii
  misc_feature: SGI EST ID NO. CUFF.24938.0
  misc_feature: Variant of the nucleotide sequence at SEQ ID NO 10399
tattcactcgttctgtgtcttgtgtcccaaggactaacactattatttgctcttgcttgagaccttcgcggcctcaagcaattgtatttctttccttttagcacttatctctttccatctgcattgtggcccacgattatcagcacatacacagtgccaaggttccaaaagtcatcaaccctctttcaaactttatgacgttctactcgcgacccctgttggtcagttttagtcttacacacttggaccccatctcgacaacttgttgaaacctggctccattcacttgtgcgcatttccaactgtccgaggcggcactgagagttggttagatcagtggcgtcacgacccaacgctgtagaaagaattactcatctcttctcgccctcgttaagtgaaagcattccttggacaccacagcttttggatccgagttacaggtataccgttgtttggcgccgatatcagttgcttctcgccagcaggaacgatttttaatatgaatatattgcgaaagccttgagaaaacgacttcaacataagttcaatttgacccgaataggttctgcgtcacacatcatcacttatataccacgttcgctcttacaataactcaacctcctccatcaagatcagcctctgcgaacgtatcgacggacagcacccaccaattttgcgccccaatggagaatgctccctcgaactcggtcgccgacaacggtcttgcgaaccacgaaaatgcacaaaacacaacggaagggatagcagtggacaatggagtctcagcgtactcgcagagtccaagtccatcgaatcatgctgcgttccaggcccaataccaacagctctatccaacgccctcaaacatgttctccaaccagtttgatatagcacaatcacaaggcgccgatcgacaaggaccatacaacatgaatgctatggctaatgccttgccacaatctgcgtacagatctggttactcgggtgtacaacagcatcggtacccgccgtctggtcctagtatggtgccgcagatgatgccgtttcatggacagcaacagcatatgccacaacttgccaatcaacaatacttcatgccccaacaagcacaaataccgcaatattacaatactcagatgtcgccaaccgctcagcatcaggcacatcaatctggcttgcctcccagagcgaacatgaacatgggttattatccgaatacgggcatgatgaatcagtcgcaacctctggttcctgggtactactatcctccgtcaaaccagtatcctgcgcaaaatgcatcaatgcaaagtcatatgcagcgatcccagtatattacgccggaaggtccttcgggagattttacaggcaatgcgttagcgcagaggaacaatcgtgttggaggatttagtggtgaattcgctcagaacgaggatgtacctggaaaccgttctaatattgttcgagggcctccgcgcaagccgcgtcaaagtggtcacgcaatttgggtcggaaacctacccccacagactgatcttatgagcctagttcatcacgtttgcaaagaagccactggcttagagtcacttttcctgatctccaagagcaattgtgcctttgcaaacttcaaggatgagtcaagctgcattacagcacaacaaaagcttcacgattcgaaattccagtccgtccgtctggtaagccgacttcgaaagagcacagtcgaaggtacgcagggtcagacagcaccaaccggcccttcagctacctcaccaccaccacctgtctcttcagaaccgatatcatcgagtccgaggcctacgagccccactgcacctccaacgggagaaacagaagtgaaatccgcaccggtagacacatccacacagaaggataagtttttcatactgaagagtcttaccgtggaagatctagaactaagcgtcagaaatggtgtatgggcaacccagtcacacaacgaagacgctcttaataaagctttcggggtaagtatgggactcttcgctcaaaatgtcgacttccctattaaatcttatattgtacaggccgttgataatgtctatctcatcttttctgcaaacaaatcgggtgaatattttggatacgccagaatgacgtcttcgataaatgacgacccagccgcagccatcgaattcgcaccgaaagcacagcccgcgaacgacattgatgtgcctcgagcgattccaaccgaagcaaccgaaacgtgtccccgcggccgtatcatagacgactcagctcgtgggacaattttttgggaggttgaaagggatgagacagaagcaacatcagacactccatctgaagactcggagagcagcaaaagtgtgcaagatggtgaaggtggatcgaaagcatggggaaagccattcaaactagagtggctttcgacaacaagactcccattctaccgagctcgtgggctacggaatccctggaactcgaatcgtgaagtcaagattgctcgcgatggcactgaactagaacctacggtgggcagaaaactcattgggctgttcaaccgtgtccaaagcccaccccttattccggccattaatatgagaacgaacatggccatcgctgctggattcccaccgcaaatgcctcagggatttaggtgatgactggcatttacacaaatacacgataatcgatattacaaaaaaatttggctaccagaaggtcaggttaccttattgaatcacgaagctagaagtgtacgtctcgtatatgctgagcatctacacgatcttgttccatggccatatcctcttccccctatgtaacataattctatttgacgtcttgaagacattccctttgtacgatacgatctacgacgatgataagaacagggtctttttgaggcttctttacttgggagtctccaatcttactacaccgggatatgtcgtatagatgacggggtcagtctaatcagaagacaaatttcgaaactgttcgcgccattatcggaacgtcactttccctgttgaggcgatatgcataatccacctggaaagagacgcgaaccatggatgcaacagataccaacgtcatgctgctggtcagtagggaggaagctatcgtaccattttgaatcacgagaacaacgatatcagtcgttccatcatgcatagtgcactcttcaaacccacgagcgatcgcgatcgcgatgaaacaactgcattgcagcctagcagaaccgtagatacatcaaattggaggttgccaagcttgagattacgtcgatgaggtgtttcgcatgtagccgcgatatattgcgtggagacgacgctagccagatgaccaggatgac

SEQ ID NO: 10402 - DNA, 792 bp, Muscodor strobelii
  misc_feature: SGI cDNA ID NO. 563301
  misc_feature: Reduced expression when VOC is produced
  misc_feature: Encodes the peptide sequence at SEQ ID NO 10403
atggctatgttcagccagaaccccgtcctcaacgggcccaactactcgtttgccgaagtccccaagaccgcccccgatggcctgcgggagcaccgcttcaacccatacacagacaatggcggctcgaccctcgccatcgccggcgccgacttcgccatcatggccggcgacacccgtctgaccgccggctacagcatcaacacccgctacgcccccaaagtcttcaagatcggcggctccacatcctcccaagacgacgccaacatccttctgtccgtcgtcggcttcgcggccgacggcgaggccctcaaggagcgcctcgatgccgtctgcaagatgtaccgctaccgccacggcaagcccatgaccgtctccgcctgcgccaagcgcctgtccaccatcctctaccagaagcgcttcttcccttactacgtccacgccatcctcggcggcatcgacgacgacggcaccggcgccgtttactcctacgaccccgtcggcagctacgagcgcgagcaatgccgggccggtggtgctgccgcctccctcatcatgcctttcctcgacaaccaagtcaatttcaagaaccagtacgtccccggcagcggcgtcggccacgctctccaggaacgaccccgcgtgcccctgccccgcagcgaggttgaggtcctcgtcaaagatgcctttgactcggccgtcgagcgacatatcgaggttggtgatggtctgcaggtcatggtcattacgaaagacggcatagaagagagagtcctgccgctgaagaaggactaa

SEQ ID NO: 10403 - protein, 263 aa, Muscodor strobelii
  misc_feature: SGI Peptide ID NO. 563301
  misc_feature (37)..(248): Pfam Id: PF00227 Pfam Desc: Proteasome A-type and B-type
  misc_feature (37)..(191): Pfam Id: PF00227 Pfam Desc: Proteasome A-type and B-type
  misc_feature (2)..(263): NCBI GI: 164422783 Blast Desc: proteasome component C5 [Neurospora crassa OR74A] gi|157069819|gb|EAA34540.2| proteasome component C5 [Neurospora crassa OR74A]
  misc_feature (1)..(263): NCBI GI: 171680321 Blast Desc: protein product [Podospora anserina] gi|170939787|emb|CAP65013.1| protein product [Podospora anserina]
  misc_feature (2)..(263): NCBI GI: 39945280 Blast Desc: conserved [Magnaporthe grisea 70-15] gi|145011320|gb|EDJ95976.1| conserved [Magnaporthe grisea 70-15]
  misc_feature (2)..(263): NCBI GI: 116206868 Blast Desc: conserved [Chaetomium globosum CBS 148.51] gi|88183324|gb|EAQ90792.1| conserved [Chaetomium globosum CBS 148.51]
  misc_feature (2)..(263): NCBI GI: 261356607 Blast Desc: proteasome component C5 [Verticillium albo-atrum VaMs.102]
  misc_feature (2)..(263): NCBI GI: 46108556 Blast Desc: FG01160.1 [Gibberella zeae PH-1]
  misc_feature (2)..(263): NCBI GI: 256734387 Blast Desc: [Nectria haematococca mpVI 77-13-4]
  misc_feature (1)..(263): NCBI GI: 156036420 Blast Desc: conserved [Sclerotinia sclerotiorum 1980] gi|154698304|gb|EDN98042.1| conserved [Sclerotinia sclerotiorum 1980]
  misc_feature (1)..(263): NCBI GI: 154308528 Blast Desc: conserved [Botryotinia fuckeliana B05.10] gi|150852865|gb|EDN28057.1| conserved [Botryotinia fuckeliana B05.10]
  misc_feature (2)..(263): NCBI GI: 189193569 Blast Desc: proteasome subunit beta type-1 precursor [Pyrenophora tritici-repentis Pt-1C-BFP] gi|187978687|gb|EDU45313.1| proteasome subunit beta type-1 precursor [Pyrenophora Pt-1C-BFP]
  misc_feature (18)..(263): SWISSPROT Homolog: EC 3.4.25.1 Proteasome endopeptidase complex
  misc_feature: Useful for introducing or modulating the production of volatile compounds
MAMFSQNPVLNGPNYSFAEVPKTAPDGLREHRFNPYTDNGGSTLAIAGADFAIMAGDTRLTAGYSINTRYAPKVFKIGGSTSSQDDANILLSVVGFAADGEALKERLDAVCKMYRYRHGKPMTVSACAKRLSTILYQKRFFPYYVHAILGGIDDDGTGAVYSYDPVGSYEREQCRAGGAAASLIMPFLDNQVNFKNQYVPGSGVGHALQERPRVPLPRSEVEVLVKDAFDSAVERHIEVGDGLQVMVITKDGIEERVLPLKKD

SEQ ID NO: 10404 - DNA, 1395 bp, Muscodor strobelii
  misc_feature: SGI EST ID NO. CUFF.24634.0
  misc_feature: Variant of the nucleotide sequence at SEQ ID NO 10402
ctaggtacctatatgtagagctggcaaggctgcaagctacacgcgtgcatgccccgacatcatcatcgtctccaagacggcaaccacagcgactcacccattcactccgccctcgatccatccgacctcactcaaccgcacccactccacatatttacgatcgactatcgaactgcgatttgcttctacactctgccagcgacaaacaccctcgccatccctctccaaaatggctatgttcagccagaaccccgtcctcaacgggcccaactactcgtttgccgaagtccccaagaccgcccccgatggcctgcgggagcaccgcttcaacccatacacagacaatggcggctcgaccctcgccatcgccggcgccgacttcgccatcatggccggcgacacccgtctgaccgccggctacagcatcaacacccgctacgcccccaaagtcttcaagatcggcggctccacatcctcccaagacgacgccaacatccttctgtccgtcgtcggcttcgcggccgacggcgaggccctcaaggagcgcctcgatgccgtctgcaagatgtaccgctaccgccacggcaagcccatgaccgtctccgcctgcgccaagcgcctgtccaccatcctctaccagaagcgcttcttcccttactacgtccacgccatcctcggcggcatcgacgacgacggcaccggcgccgtttactcctacgaccccgtcggcagctacgagcgcgagcaatgccgggccggtggtgctgccgcctccctcatcatgcctttcctcgacaaccaagtcaatttcaagaaccagtacgtccccggcagcggcgtcggccacgctctccaggaacgaccccgcgtgcccctgccccgcagcgaggttgaggtcctcgtcaaagatgcctttgactcggccgtcgagcgacatatcgaggttggtgatggtctgcaggtcatggtcattacgaaagacggcatagaagagagagtcctgccgctgaagaaggactaaaagccgcgatgggtggatttatgagatgacgaagacatggattgaggcctttgtactatagcccacgcatgctagaccacgaaagctatcaggatggttatagacccaaccattcacaacatcagaatcgctccttcatctagttggccttgggatttggcaaagtggcatgatatctacgggtgatatctaatggcatatgacctgacatgtaaacaccagcctacgaatgtcgtatagtcgtatttgacgatatgagctaatgtaggaaccgaattcgaacttacatcgatgctgcaagagtcccatgttttgctcgcctcgctcatcgtgctcgcccccatctccgcaatagatgccgtatcttatctcac

SEQ ID NO: 10405 - DNA, 5730 bp, Muscodor strobelii
  misc_feature: SGI cDNA ID NO. 563302
  misc_feature: Reduced expression when VOC is produced
  misc_feature: Encodes the peptide sequence at SEQ ID NO 10406
atggcgcgcaacgtccgccagcaggctctcgagaagattgccgcgctgtcggcatcgacctccgccgtctccttcgaccgatccgacctcgaccgcctctgcagagctgcatctgcccgctccagacccagcgatggcgccaatggctcgtccaagtcccgcgccggcgccatggcacaggtccccatgaacatccgcgagttcgaggtcctcgtcgccctgtgcaagacggccccgatgaccttcgccgcctcgcctgcctttgcccgcatcgagccctcggccaacgaggctttgacctcgagtctgaccgctgccctgttggctctcggcaacaagcatgccgacttgcacgagaccgtgtccgataatgtctggtcttttctggagggcctgcgcgctgccacccggaccatcttaccccccaagtcggaacgtgatgtcgatcagaatctggaggatgccgtgcggactgccaccattgccatctcgctgcttggcttcatagaggctgccgccgctcaagctgacttttggaggactggcggcagacttgccctcatccagagagttcgcaatcttctctccgacacattcctgactgctgtcgatggtgctttctcaacgatcagaaatgcccattcttcggatcgcaacgtcaaggactggaagagatgtttgcgccattacgccagtcgtggccggcctttgggacagttgctcctaaagagaagtttcatgtggctgctagtggctgccacttcactgttgatcgtagatgtgaaagacttgagaaatgcacacgtgctagatgtgcttatgtcccgggagcgattgctggcgccagggtcctcaaacgggccagacgccgactttcagtctatcgagttatatgccggcatcgcccgtgaagaaatggaacgtcttgaagctgacgccgattttcttcagctgggccatgcttcccagcaaagacttgcctgtgccgtgaaagcttctgccattatcagtttccttaactgctccgttcttaacgaggacgcggcagaccccgataatctcatgggctggctgactgagtcgctggattcgccccagatatttgacgagaacttcgcctcagtcgtcctgcgagctatggcgatagtctctaggctctcgcctaactatgcaccaaccgtcatccggcttcttccccgcttcattgtgcagaccacaccgccgacaggcattgtagacgttgcgtcacactgccttgccttcacattgaagaaactgtcaaacgacgccattatctcgaccctgtacactctcggcaatgtcttgagcccgagctcggagaacggcgtcactggcgtgtcgaacggcgatgcaggaaacgatgcccaagggttgtccaatgtctatcgtggaagacagtccacgggaagctccatctctttccagattccagatgaagaagagagcaccaccgtgtattcaaatattgtgcagaccatttgtggcattgccaaactatgcggagaagaaaagatcactgcccttgctcaagccatgctcctacagaagctgacaaaggtcaatcaatctgtcgatgcatatatccttacgggggcgagtgtcctatccttgaactccggacaggttgagttccgctcgcttttgagactatattcgagaatgtgtcataacgccgtagcggaaagtcaaacaccgatactggatgcggttatgaaagcccgtaacacgatatcagcaaatatcaagcgtgactctcctctattcgacatctatctcgaatacatgcttgaagacctggtctcgaagggagacgtgcaccagtctagccacatgaaagaatctgacattgaattcgcagcgcaagagatcgaacagcttcttcagccgcttgcgattttgatgtcgacgcatgacttcgcttctgagctgtcgagccaagacgacgatgagagccgtgctttgttacgtgatgcctggttcaacatcgtggttcatggcttcattcctgctaccgacagaggcaaaaagtatatgaatgagctcaggatcatggccatacactcgccgccactggtagcagagcaacgtggagaacaggtggagagtgacattgagctcaacactgtccttcggcgtgcgaatacctccgatcgagagtctaagcagaagaagaaccttgcagcgctgataccatcaaaggcatctgatatcaagggtcttagctacaggaaagccatcttccttcaagctgcctacctagttgaaactcttcgagctgatgcgggtgattgcactcagatattctcgtactttttagagcctagtatgcgaaaagatgatgtgcgcagcgtgatggagggtgtcacatcagctgtgattgagacatatttgggcaagacccttcacgctaagtcgtctacattttctgctcattacgcagcatctcagcttgccaaaatcctttgtgggtgttgtcatcgcatccagagagttcaacaggcagcattcgcctgcgcggatagattcatccgcgaagttccctcttctctttgccaaaggtcctcgctgtttgccgtattggaactattatctctcatgtggctaagctgtttcgaggccgaaaccgagatgtatgacccaaggtctgtcttcacgtcgaagctcggtcacgtcactttggaactgtcggatgactatctgttccggaagatgacgctgaacaacttgtacaagaaagccaaggtatgggtatctgtggctatcaaccttgcaccatcggacgtaaagggactactccaaacctacctgtccgaatttgatgatgagggcgcttatgggcacatgtctctcggccgttcctttgctatggaaatgggttctgccattccagcgactgatcagcgactaacatctctagaccgtattggtgacacttccatcaatactgcatcggatttcattgctcagtataccactcgccaagagtacagatatggtgaaactttgcccagtcatggaagtgacttggtcaatattatgccggtggttcgacgtaactcattcgtcaaatctgcaccgtctaaccaagccgatgctgttgccgccctcgctcatgtagagtcgcggctgaccggaaagaaaattactccattgcacgatgtcagagacatcctacggcgtgccgctgcattgttatgccgtagccagaaagatgagagtgccattactcactaccttgtctcaattccgttccgcatttttactaaagagtccatcaagttcggtgtctcactctggctgggtgttatgaatgagaatccgcgcatggaatcgcgcttactgagcgaaattgctcagcagagcgaaatcacgatacagaagaaacaaggactatttaacccgaccttcatgcaccctgatcctttctttctcaaagaggaatttgctccgagtgatcaagcaggtctggccaagaggaggcagcaagtccacaatcttctgtcgcctcacacgcagctcatgcaattctttggtagccattttaatgccactcggctaggtagtccagatacacagagaatcttccttcgcttgctcgacctgacgttagatgcccttaagcgctcgatatcccacccgatggctcgaggtattcgtctaagaattattctgttcagtcttcgagtcttgaaagccagcgggaatgccggtgcagcagctcaatggcgcctcaaagataagatcctatctgcggggttaagttggttcaagtatgcaccgaaatggtctttcggtagcaatattttgcagctgaagacagaagtccaactcatccgcgatgttaaaatcgggttgaaatcggtctcacaaattggcgcgcaggctgttgctgttgggaaatttatggcccagaaggaatcgcttcttgaaattctgctcgagagcgaggaggcgagactgaatgtttggattcatccattgaacgaaggtcatctgccccgggcggatatcatgacaagtcacggcaagactcatctcgagactgtcttgaaaccactcatacgcattgcttggactgagagtccctctctggctattgaactagtcagcagattcccaatgccgagcatacatcacgaagtccgttttttgttgctgaactttccagcaaaagctctttgcgaccctgaagcgttaccgatactatttggtggcgagcttccccaagactatcttttgttctgggcgccggtcaaccctgtaactgcggtcacttatttcttaccggcatataagaacgacccgttcctcatacagtacgctatgagagctttggaggatcactccgtggatgtgaccttcttctatgtgcctcagattgtccagagtctacgtttcgacgctttgggctatgttgaacggtacatcatcgagacagcgcagttctcgcagttatttgctcaccagatcatttggaacatgaaagcaaactcgtacaaggacgacgatgccacaatacccgacgccatcaaacctgctctcgacaaagtgatgaagaagatggtagacagtttctcaggcgaggataagagcttcttcgagagagaatttgcattctttgacgaagtcaccagcatctctggtaaactgaagccactgatcaaacgagacaaaccggaaaagaagcagaaaatcgaagaagaactacgtaaaattaaggtagatgtcggcgtttacctacccagcaatccggacggtgtcgtcattggtatcgatcggaaatcgggcaaacctctacaatcccatgctaaggcgccctatatggctacctttcgtattcaaaagacaaaggccggcgtcgaagagactgaagagattgctcaggatatcagcaaaaacggcgaaacaccacaaagaaccatagaggtttggcagagtgctattttcaaagttggtgatgactgccgtcaagacgtcctcgctctacaaatggtcgccgccttccgtggcatattccatagcgtggggttggacgtctatgttttcccctatcgtgtgacggcgacggccccaggatgcggtgtcatcgacgtcttgcccaattccatctcccgagatatgcttggacgcgaggcagtgaatggcctctatgactactttatcagcaagtatggaaacgaagactccctccggttccagcatgcgcgaaacaacttcgtcaagagtatggctgcctatagtattatctctttcctcttacagttcaaggaccgacataacggcaacatcatgatcgatgatgcagggcatattctacacatcgactttggtttctgcttcgatattgcgcccggtggcgtgaagttcgaacgtgccccgtttaagctcacgaacgagatgatgttggtcatgggtggtagcacggaacaccaggcattcaaatggtttgaggaactctgcgtcaagagtttcttggcgtgtcgtccgtatgcggagaagttgagtcagatcgtgctgttgatgatggagagtggattgccgtgtttcaagccggagagtgtgaagcatttcaaggagcggtttgtgctggagaagaatgagagggaggctgcggagtttgtgagggatctggtgaagaagagtgctgggagttacagtacgatggtttatgatcagttccagctgatgactaatggtattccttactaa

SEQ ID NO: 10406 - protein, 1909 aa, Muscodor strobelii
  misc_feature: SGI Peptide ID NO. 563302
  misc_feature (1651)..(1858): Pfam Id: PF00454 Pfam Desc: Phosphatidylinositol 3- and 4-kinase
  misc_feature (1376)..(1541): Pfam Id: PF00613 Pfam Desc: Phosphoinositide 3-kinase family, accessory domain (PIK domain)
  misc_feature (1422)..(1541): Pfam Id: PF00613 Pfam Desc: Phosphoinositide 3-kinase family, accessory domain (PIK domain)
  misc_feature (1)..(1909): NCBI GI: 46108558 Blast Desc: FG01161.1 [Gibberella zeae PH-1]
  misc_feature (1)..(1909): NCBI GI: 171680323 Blast Desc: protein product [Podospora anserina] gi|170939788|emb|CAP65014.1| protein product [Podospora anserina]
  misc_feature (1)..(1909): NCBI GI: 116206870 Blast Desc: CHGG_02728 [Chaetomium globosum CBS 148.51] gi|88183325|gb|EAQ90793.1| CHGG_02728 [Chaetomium globosum CBS 148.51]
  misc_feature (1)..(1909): NCBI GI: 145602979 Blast Desc: MGG_13790 [Magnaporthe grisea 70-15] gi|145011319|gb|EDJ95975.1| MGG_13790 [Magnaporthe grisea 70-15]
  misc_feature (1)..(1909): NCBI GI: 85111108 Blast Desc: NCU09367 [Neurospora crassa OR74A] gi|28925508|gb|EAA34541.1| conserved [Neurospora crassa OR74A]
  misc_feature (66)..(1884): NCBI GI: 154308526 Blast Desc: BC1G_08323 [Botryotinia fuckeliana B05.10] gi|150852864|gb|EDN28056.1| BC1G_08323 [Botryotinia fuckeliana B05.10]
  misc_feature (1)..(1909): NCBI GI: 156036422 Blast Desc: SS1G_12900 [Sclerotinia sclerotiorum 1980] gi|154698305|gb|EDN98043.1| SS1G_12900 [Sclerotinia sclerotiorum 1980]
  misc_feature (5)..(1909): NCBI GI: 225554337 Blast Desc: phosphatidylinositol 4-kinase [Ajellomyces capsulatus G186AR]
  misc_feature (3)..(1909): NCBI GI: 189193895 Blast Desc: phosphatidylinositol 3-kinase 3 [Pyrenophora tritici-repentis Pt-1C-BFP] gi|187978850|gb|EDU45476.1| phosphatidylinositol 3-kinase 3 [Pyrenophora tritici-repentis
  misc_feature (5)..(1909): NCBI GI: 239611771 Blast Desc: phosphatidylinositol 4-kinase [Ajellomyces dermatitidis ER-3]
  misc_feature (414)..(1909): SWISSPROT Homolog: EC 2.7.1.67 1-phosphatidylinositol 4-kinase
  misc_feature: Useful for introducing or modulating the production of volatile compounds
MARNVRQQALEKIAALSASTSAVSFDRSDLDRLCRAASARSRPSDGANGSSKSRAGAMAQVPMNIREFEVLVALCKTAPMTFAASPAFARIEPSANEALTSSLTAALLALGNKHADLHETVSDNVWSFLEGLRAATRTILPPKSERDVDQNLEDAVRTATIAISLLGFIEAAAAQADFWRTGGRLALIQRVRNLLSDTFLTAVDGAFSTIRNAHSSDRNVKDWKRCLRHYASRGRPLGQLLLKRSFMWLLVAATSLLIVDVKDLRNAHVLDVLMSRERLLAPGSSNGPDADFQSIELYAGIAREEMERLEADADFLQLGHASQQRLACAVKASAIISFLNCSVLNEDAADPDNLMGWLTESLDSPQIFDENFASVVLRAMAIVSRLSPNYAPTVIRLLPRFIVQTTPPTGIVDVASHCLAFTLKKLSNDAIISTLYTLGNVLSPSSENGVTGVSNGDAGNDAQGLSNVYRGRQSTGSSISFQIPDEEESTTVYSNIVQTICGIAKLCGEEKITALAQAMLLQKLTKVNQSVDAYILTGASVLSLNSGQVEFRSLLRLYSRMCHNAVAESQTPILDAVMKARNTISANIKRDSPLFDIYLEYMLEDLVSKGDVHQSSHMKESDIEFAAQEIEQLLQPLAILMSTHDFASELSSQDDDESRALLRDAWFNIVVHGFIPATDRGKKYMNELRIMAIHSPPLVAEQRGEQVESDIELNTVLRRANTSDRESKQKKNLAALIPSKASDIKGLSYRKAIFLQAAYLVETLRADAGDCTQIFSYFLEPSMRKDDVRSVMEGVTSAVIETYLGKTLHAKSSTFSAHYAASQLAKILCGCCHRIQRVQQAAFACADRFIREVPSSLCQRSSLFAVLELLSLMWLSCFEAETEMYDPRSVFTSKLGHVTLELSDDYLFRKMTLNNLYKKAKVWVSVAINLAPSDVKGLLQTYLSEFDDEGAYGHMSLGRSFAMEMGSAIPATDQRLTSLDRIGDTSINTASDFIAQYTTRQEYRYGETLPSHGSDLVNIMPVVRRNSFVKSAPSNQADAVAALAHVESRLTGKKITPLHDVRDILRRAAALLCRSQKDESAITHYLVSIPFRIFTKESIKFGVSLWLGVMNENPRMESRLLSEIAQQSEITIQKKQGLFNPTFMHPDPFFLKEEFAPSDQAGLAKRRQQVHNLLSPHTQLMQFFGSHFNATRLGSPDTQRIFLRLLDLTLDALKRSISHPMARGIRLRIILFSLRVLKASGNAGAAAQWRLKDKILSAGLSWFKYAPKWSFGSNILQLKTEVQLIRDVKIGLKSVSQIGAQAVAVGKFMAQKESLLEILLESEEARLNVWIHPLNEGHLPRADIMTSHGKTHLETVLKPLIRIAWTESPSLAIELVSRFPMPSIHHEVRFLLLNFPAKALCDPEALPILFGGELPQDYLLFWAPVNPVTAVTYFLPAYKNDPFLIQYAMRALEDHSVDVTFFYVPQIVQSLRFDALGYVERYIIETAQFSQLFAHQIIWNMKANSYKDDDATIPDAIKPALDKVMKKMVDSFSGEDKSFFEREFAFFDEVTSISGKLKPLIKRDKPEKKQKIEEELRKIKVDVGVYLPSNPDGVVIGIDRKSGKPLQSHAKAPYMATFRIQKTKAGVEETEEIAQDISKNGETPQRTIEVWQSAIFKVGDDCRQDVLALQMVAAFRGIFHSVGLDVYVFPYRVTATAPGCGVIDVLPNSISRDMLGREAVNGLYDYFISKYGNEDSLRFQHARNNFVKSMAAYSIISFLLQFKDRHNGNIMIDDAGHILHIDFGFCFDIAPGGVKFERAPFKLTNEMMLVMGGSTEHQAFKWFEELCVKSFLACRPYAEKLSQIVLLMMESGLPCFKPESVKHFKERFVLEKNEREAAEFVRDLVKKSAGSYSTMVYDQFQLMTNGIPY

SEQ ID NO: 10407 - DNA, 6948 bp, Muscodor strobelii
  misc_feature: SGI EST ID NO. CUFF.24717.1
  misc_feature: Variant of the nucleotide sequence at SEQ ID NO 10405
gtctgtcccagcccgtcactaaacttcgaatacccattgacagaggtgttggcaataccaagtagagccactggacgctgccgtgtctacgcgctctgccgtttcgtcacaggttgaagctgaactcacagctcggcatctcggatgattactatataagtgttataggccgtcacctctgggttgtatatagaccggccgtttcgctgcagcatttcgtcatcatggcgcgcaacgtccgccagcaggctctcgagaagattgccgcgctgtcggcatcgacctccgccgtctccttcgaccgatccgacctcgaccgcctctgcagagctgcatctgcccgctccagacccagcgatggcgccaatggctcgtccaagtcccgcgccggcgccatggcacaggtccccatgaacatccgcgagttcgaggtcctcgtcgccctgtgcaagacggccccgatggtcagcagcagcccgagtgcgcagaagctggcccgccaactcgtccccctatctcctcgagtcccacgtccagaccttcgccgcctcgcctgcctttgcccgcatcgagccctcggccaacgaggctttgacctcgagtctgaccgctgccctgttggctctcggcaacaagcatgccgacttgcacgagaccgtgtccgataatgtctggtcttttctggagggcctgcgcgctgccacccggaccatcttaccccccaagtcggaacgtgatgtcgatcagaatctggaggatgccgtgcggactgccaccattgccatctcgctgcttggcttcatagaggctgccgccgctcaagctgacttttggaggactggcggcagacttgccctcatccagagagttcgcaatcttctctccgacacattcctgactgctgtcgatggtgctttctcaacgatcagaaatgcccattcttcggatcgcaacgtcaaggactggaagagatgtttgcgccattacgccagtcgtggccggcctttgggacagttgctcctaaagagaagtttcatgtggctgctagtggctgccacttcactgttgatcgtagatgtgaaagacttgagaaatgcacacgtgctagatgtgcttatgtcccgggagcgattgctggcgccagggtcctcaaacgggccagacgccgactttcagtctatcgagttatatgccggcatcgcccgtgaagaaatggaacgtcttgaagctgacgccgattttcttcagctgggccatgcttcccagcaaagacttgcctgtgccgtgaaagcttctgccattatcagtttccttaactgctccgttcttaacgaggacgcggcagaccccgataatctcatgggctggctgactgagtcgctggattcgccccagatatttgacgagaacttcgcctcagtcgtcctgcgagctatggcgatagtctctaggctctcgcctaactatgcaccaaccgtcatccggcttcttccccgcttcattgtgcagaccacaccgccgacaggcattgtagacgttgcgtcacactgccttgccttcacattgaagaaactgtcaaacgacgccattatctcgaccctgtacactctcggcaatgtcttgagcccgagctcggagaacggcgtcactggcgtgtcgaacggcgatgcaggaaacgatgcccaagggttgtccaatgtctatcgtggaagacagtccacgggaagctccatctctttccagattccagatgaagaagagagcaccaccgtgtattcaaatattgtgcagaccatttgtggcattgccaaactatgcggagaagaaaagatcactgcccttgctcaagccatgctcctacagaagctgacaaaggtcaatcaatctgtcgatgcatatatccttacgggggcgagtgtcctatccttgaactccggacaggttgagttccgctcgcttttgagactatattcgagaatgtgtcataacgccgtagcggaaagtcaaacaccgatactggatgcggtacgttgacaatggtaatagtattgaagagaagctctaatacctcgcaggttatgaaagcccgtaacacgatatcagcaaatatcaagcgtgactctcctctattcgacatctatctcgaatacatgcttgaagacctggtctcgaagggagacgtgcaccagtctagccacatgaaagaatctgacattgaattcgcagcgcaagagatcgaacagcttcttcagccgcttgcgattttgatgtcgacgcatgacttcgcttctgagctgtcgagccaagacgacgatgagagccgtgctttgttacgtgatgcctggttcaacatcgtggttcatggcttcattcctgctaccgacagaggcaaaaagtatatgaatgagctcaggatcatggccatacactcgccgccactggtagcagagcaacgtggagaacaggtggagagtgacattgagctcaacactgtccttcggcgtgcgaatacctccgatcgagagtctaagcagaagaagaaccttgcagcgctgataccatcaaaggcatctgatatcaagggtcttagctacaggaaagccatcttccttcaagctgcctacctagttgaaactcttcgagctgatgcgggtgattgcactcagatattctcgtactttttagagcctagtatgcgaaaagatgatgtgcgcagcgtgatggagggtgtcacatcagctgtgattgagacatatttgggcaagacccttcacgctaagtcgtctacattttctgctcattacgcagcatctcagcttgccaaaatcctttgtgggtgttgtcatcgcatccagagagttcaacaggcagcattcgcctgcgcggatagattcatccgcgaagttccctcttctctttgccaaaggtcctcgctgtttgccgtattggaactattatctctcatgtggctaagctgtttcgaggccgaaaccgagatgtatgacccaaggtctgtcttcacgtcgaagctcggtcacgtcactttggaactgtcggatgactatctgttccggaagatgacgctgaacaacttgtacaagaaagccaaggtatgggtatctgtggctatcaaccttgcaccatcggacgtaaagggactactccaaacctacctgtccgaatttgatgatgagggcgcttatgggcacatgtctctcggccgttcctttgctatggaaatgggttctgccattccagcgactgatcagcgactaacatctctagaccgtattggtgacacttccatcaatactgcatcggatttcattgctcagtataccactcgccaagagtacagatatggtgaaactttgcccagtcatggaagtgacttggtcaatattatgccggtggttcgacgtaactcattcgtcaaatctgcaccgtctaaccaagccgatgctgttgccgccctcgctcatgtagagtcgcggctgaccggaaagaaaattactccattgcacgatgtcagagacatcctacggcgtgccgctgcattgttatgccgtagccagaaagatgagagtgccattactcactaccttgtctcaattccgttccgcatttttactaaagagtccatcaagttcggtgtctcactctggctgggtgttatgaatgagaatccgcgcatggaatcgcgcttactgagcgaaattgctcagcagagcgaaatcacgatacagaagaaacaaggactatttaacccgaccttcatgcaccctgatcctttctttctcaaagaggaatttgctccgagtgatcaagcaggtctggccaagaggaggcagcaagtccacaatcttctgtcgcctcacacgcagctcatgcaattctttggtagccattttaatgccactcggctaggtagtccagatacacagagaatcttccttcgcttgctcgacctgacgttagatgcccttaagcgctcgatatcccacccgatggctcgaggtattcgtctaagaattattctgttcagtcttcgagtcttgaaagccagcgggaatgccggtgcagcagctcaatggcgcctcaaagataagatcctatctgcggggttaagttggttcaagtatgcaccgaaatggtctttcggtagcaatattttgcagctgaagacagaagtccaactcatccgcgatgttaaaatcgggttgaaatcggtctcacaaattggcgcgcaggctgttgctgttgggaaatttatggcccagaaggaatcgcttcttgaaattctgctcgagagcgaggaggcgagactgaatgtttggattcatccattgaacgaaggtcatctgccccgggcggatatcatgacaagtcacggcaagactcatctcgagactgtcttgaaaccactcatacgcattgcttggactgagagtccctctctggctattgaactagtcagcagattcccaatgccgagcatacatcacgaagtccgttttttgttgctgaactttccagcaaaagctctttgcgaccctgaagcgttaccgatactatttggtggcgagcttccccaagacgtgcgattccagctcaagtatcttttgttctgggcgccggtcaaccctgtaactgcggtcacttatttcttaccggcatataagaacgacccgttcctcatacagtacgctatgagagctttggaggatcactccgtggatgtgaccttcttctatgtgcctcagattgtccagagtctacgtttcgacgctttgggctatgttgaacggtacatcatcgagacagcgcagttctcgcagttatttgctcaccagatcatttggaacatgaaagcaaactcgtacaaggacgacgatgccacaatacccgacgccatcaaacctgctctcgacaaagtgatgaagaagatggtagacagtttctcaggcgaggataagagcttcttcgagagagaatttgcattctttgacgaagtcaccagcatctctggtaaactgaagccactgatcaaacgagacaaaccggaaaagaagcagaaaatcgaagaagaactacgtaaaattaaggtagatgtcggcgtttacctacccagcaatccggacggtgtcgtcattggtatcgatcggaaatcgggcaaacctctacaatcccatgctaaggcgccctatatggctacctttcgtattcaaaagacaaaggccggcgtcgaagagactgaagagattgctcaggatatcagcaaaaacggcgaaacaccacaaagaaccatagaggtttggcagagtgctattttcaaagttggtgatgactgccgtcaagacgtcctcgctctacaaatggtcgccgccttccgtggcatattccatagcgtggggttggacgtctatgttttcccctatcgtgtgacggcgacggccccaggatgcggtgtcatcgacgtcttgcccaattccatctcccgagatatgcttggacgcgaggcagtgaatggcctctatgactactttatcagcaagtatggaaacgaagactccctccggttccagcatgcgcgaaacaacttcgtcaagagtatggctgcctatagtattatctctttcctcttacagttcaaggaccgacataacggcaacatcatgatcgatgatgcagggcatattctacacatcgactttggtttctgcttcgatattgcgcccggtggcgtgaagttcgaacgtgccccgtttaagctcacgaacgagatgatgttggtcatgggtggtagcacggaacaccaggcattcaaatggtttgaggaactctgcgtcaagagtttcttggcgtgtcgtccgtatgcggagaagttgagtcagatcgtgctgttgatgatggagagtggattgccgtgtttcaagccggagagtgtgaagcatttcaaggagcggtttgtgctggagaagaatgagagggaggctgcggagtttgtgagggatctggtgaagaagagtgctgggagttacagtacgatggtttatgatcagttccagctgatgactaatggtattccttactaagggagaagagacgagagcaggcgagtaggaagagggagggatgtgtatatatacgctggaagaaaaggcttggtagtagttatatcaatttgataagattatcaactgcaacttagcaaggtggtgtgattagagttctttgtttgaacgaatatttacattgcttttctatcaatgcgaattggtctgcatctatgatttgcttccggccaagtgttgtatagtcagtaacatgctcaattcgactcatctctatttttttttctagcacacgttagaaaatctactttttggacttatctgtctgcgtcttttccttgtccttgggtttcttgggaagggtcctgtgtcgacattgatggagtgacggacatggacaggtacctgtttcttgagtcgcagacgctggatagtcctgatcgttagctttcttgggtgggatgttgtagccgctccgctgaggcattttttggggggagcttgagttattggtgtgtctttttttttttttttcgcggtgacaagagtcttgagtgcttgatgtagctgttggtggtaaaagttgtagagcaggaagaactggttgaagtggtagaagtttgagtagcagaaagtgaaaagtccggaaaggggagaaggctgaataatatatacttgtgaagatcggatactcgatgatggtgtagcaagggaacaaggaggttgattaggagagaaaagcaaagcattgtcattaaatgtctattgtgttatgaacagaaaactttcagtttgacagtgtgcttgggatatcccggtagaggtggtgaaagaatcgctcataatggctctactatatggctccatggaccgg

SEQ ID NO: 10408 - DNA, 5784 bp, Muscodor strobelii
  misc_feature: SGI cDNA ID NO. 563303
  misc_feature: Elevated expression when VOC is produced
  misc_feature: Encodes the peptide sequence at SEQ ID NO 10409
atggcgcgcaacgtccgccagcaggctctcgagaagattgccgcgctgtcggcatcgacctccgccgtctccttcgaccgatccgacctcgaccgcctctgcagagctgcatctgcccgctccagacccagcgatggcgccaatggctcgtccaagtcccgcgccggcgccatggcacaggtccccatgaacatccgcgagttcgaggtcctcgtcgccctgtgcaagacggccccgatgaccttcgccgcctcgcctgcctttgcccgcatcgagccctcggccaacgaggctttgacctcgagtctgaccgctgccctgttggctctcggcaacaagcatgccgacttgcacgagaccgtgtccgataatgtctggtcttttctggagggcctgcgcgctgccacccggaccatcttaccccccaagtcggaacgtgatgtcgatcagaatctggaggatgccgtgcggactgccaccattgccatctcgctgcttggcttcatagaggctgccgccgctcaagctgacttttggaggactggcggcagacttgccctcatccagagagttcgcaatcttctctccgacacattcctgactgctgtcgatggtgctttctcaacgatcagaaatgcccattcttcggatcgcaacgtcaaggactggaagagatgtttgcgccattacgccagtcgtggccggcctttgggacagttgctcctaaagagaagtttcatgtggctgctagtggctgccacttcactgttgatcgtagatgtgaaagacttgagaaatgcacacgtgctagatgtgcttatgtcccgggagcgattgctggcgccagggtcctcaaacgggccagacgccgactttcagtctatcgagttatatgccggcatcgcccgtgaagaaatggaacgtcttgaagctgacgccgattttcttcagctgggccatgcttcccagcaaagacttgcctgtgccgtgaaagcttctgccattatcagtttccttaactgctccgttcttaacgaggacgcggcagaccccgataatctcatgggctggctgactgagtcgctggattcgccccagatatttgacgagaacttcgcctcagtcgtcctgcgagctatggcgatagtctctaggctctcgcctaactatgcaccaaccgtcatccggcttcttccccgcttcattgtgcagaccacaccgccgacaggcattgtagacgttgcgtcacactgccttgccttcacattgaagaaactgtcaaacgacgccattatctcgaccctgtacactctcggcaatgtcttgagcccgagctcggagaacggcgtcactggcgtgtcgaacggcgatgcaggaaacgatgcccaagggttgtccaatgtctatcgtggaagacagtccacgggaagctccatctctttccagattccagatgaagaagagagcaccaccgtgtattcaaatattgtgcagaccatttgtggcattgccaaactatgcggagaagaaaagatcactgcccttgctcaagccatgctcctacagaagctgacaaaggtcaatcaatctgtcgatgcatatatccttacgggggcgagtgtcctatccttgaactccggacaggttgagttccgctcgcttttgagactatattcgagaatgtgtcataacgccgtagcggaaagtcaaacaccgatactggatgcggttatgaaagcccgtaacacgatatcagcaaatatcaagcgtgactctcctctattcgacatctatctcgaatacatgcttgaagacctggtctcgaagggagacgtgcaccagtctagccacatgaaagaatctgacattgaattcgcagcgcaagagatcgaacagcttcttcagccgcttgcgattttgatgtcgacgcatgacttcgcttctgagctgtcgagccaagacgacgatgagagccgtgctttgttacgtgatgcctggttcaacatcgtggttcatggcttcattcctgctaccgacagaggcaaaaagtatatgaatgagctcaggatcatggccatacactcgccgccactggtagcagagcaacgtggagaacaggtggagagtgacattgagctcaacactgtccttcggcgtgcgaatacctccgatcgagagtctaagcagaagaagaaccttgcagcgctgataccatcaaaggcatctgatatcaagggtcttagctacaggaaagccatcttccttcaagctgcctacctagttgaaactcttcgagctgatgcgggtgattgcactcagatattctcgtactttttagagcctagtatgcgaaaagatgatgtgcgcagcgtgatggagggtgtcacatcagctgtgattgagacatatttgggcaagacccttcacgctaagtcgtctacattttctgctcattacgcagcatctcagcttgccaaaatcctttgtgggtgttgtcatcgcatccagagagttcaacaggcagcattcgcctgcgcggatagattcatccgcgaagttccctcttctctttgccaaaggtcctcgctgtttgccgtattggaactattatctctcatgtggctaagctgtttcgaggccgaaaccgagatgtatgacccaaggtctgtcttcacgtcgaagctcggtcacgtcactttggaactgtcggatgactatctgttccggaagatgacgctgaacaacttgtacaagaaagccaaggtatgggtatctgtggctatcaaccttgcaccatcggacgtaaagggactactccaaacctacctgtccgaatttgatgatgagggcgcttatgggcacatgtctctcggccgttcctttgctatggaaatgggttctgccattccagcgactgatcagcgactaacatctctagaccgtattggtgacacttccatcaatactgcatcggatttcattgctcagtataccactcgccaagagtacagatatggtgaaactttgcccagtcatggaagtgacttggtcaatattatgccggtggttcgacgtaactcattcgtcaaatctgcaccgtctaaccaagccgatgctgttgccgccctcgctcatgtagagtcgcggctgaccggaaagaaaattactccattgcacgatgtcagagacatcctacggcgtgccgctgcattgttatgccgtagccagaaagatgagagtgccattactcactaccttgtctcaattccgttccgcatttttactaaagagtccatcaagttcggtgtctcactctggctgggtgttatgaatgagaatccgcgcatggaatcgcgcttactgagcgaaattgctcagcagagcgaaatcacgatacagaagaaacaaggactatttaacccgaccttcatgtatggatacatatcctgcttaacgttgtataaatatattgactctcaatctaggcaccctgatcctttctttctcaaagaggaatttgctccgagtgatcaagcaggtctggccaagaggaggcagcaagtccacaatcttctgtcgcctcacacgcagctcatgcaattctttggtagccattttaatgccactcggctaggtagtccagatacacagagaatcttccttcgcttgctcgacctgacgttagatgcccttaagcgctcgatatcccacccgatggctcgaggtattcgtctaagaattattctgttcagtcttcgagtcttgaaagccagcgggaatgccggtgcagcagctcaatggcgcctcaaagataagatcctatctgcggggttaagttggttcaagtatgcaccgaaatggtctttcggtagcaatattttgcagctgaagacagaagtccaactcatccgcgatgttaaaatcgggttgaaatcggtctcacaaattggcgcgcaggctgttgctgttgggaaatttatggcccagaaggaatcgcttcttgaaattctgctcgagagcgaggaggcgagactgaatgtttggattcatccattgaacgaaggtcatctgccccgggcggatatcatgacaagtcacggcaagactcatctcgagactgtcttgaaaccactcatacgcattgcttggactgagagtccctctctggctattgaactagtcagcagattcccaatgccgagcatacatcacgaagtccgttttttgttgctgaactttccagcaaaagctctttgcgaccctgaagcgttaccgatactatttggtggcgagcttccccaagactatcttttgttctgggcgccggtcaaccctgtaactgcggtcacttatttcttaccggcatataagaacgacccgttcctcatacagtacgctatgagagctttggaggatcactccgtggatgtgaccttcttctatgtgcctcagattgtccagagtctacgtttcgacgctttgggctatgttgaacggtacatcatcgagacagcgcagttctcgcagttatttgctcaccagatcatttggaacatgaaagcaaactcgtacaaggacgacgatgccacaatacccgacgccatcaaacctgctctcgacaaagtgatgaagaagatggtagacagtttctcaggcgaggataagagcttcttcgagagagaatttgcattctttgacgaagtcaccagcatctctggtaaactgaagccactgatcaaacgagacaaaccggaaaagaagcagaaaatcgaagaagaactacgtaaaattaaggtagatgtcggcgtttacctacccagcaatccggacggtgtcgtcattggtatcgatcggaaatcgggcaaacctctacaatcccatgctaaggcgccctatatggctacctttcgtattcaaaagacaaaggccggcgtcgaagagactgaagagattgctcaggatatcagcaaaaacggcgaaacaccacaaagaaccatagaggtttggcagagtgctattttcaaagttggtgatgactgccgtcaagacgtcctcgctctacaaatggtcgccgccttccgtggcatattccatagcgtggggttggacgtctatgttttcccctatcgtgtgacggcgacggccccaggatgcggtgtcatcgacgtcttgcccaattccatctcccgagatatgcttggacgcgaggcagtgaatggcctctatgactactttatcagcaagtatggaaacgaagactccctccggttccagcatgcgcgaaacaacttcgtcaagagtatggctgcctatagtattatctctttcctcttacagttcaaggaccgacataacggcaacatcatgatcgatgatgcagggcatattctacacatcgactttggtttctgcttcgatattgcgcccggtggcgtgaagttcgaacgtgccccgtttaagctcacgaacgagatgatgttggtcatgggtggtagcacggaacaccaggcattcaaatggtttgaggaactctgcgtcaagagtttcttggcgtgtcgtccgtatgcggagaagttgagtcagatcgtgctgttgatgatggagagtggattgccgtgtttcaagccggagagtgtgaagcatttcaaggagcggtttgtgctggagaagaatgagagggaggctgcggagtttgtgagggatctggtgaagaagagtgctgggagttacagtacgatggtttatgatcagttccagctgatgactaatggtattccttactaa

SEQ ID NO: 10409 - protein, 1927 aa, Muscodor strobelii
  misc_feature: SGI Peptide ID NO. 563303
  misc_feature (1669)..(1876): Pfam Id: PF00454 Pfam Desc: Phosphatidylinositol 3- and 4-kinase
  misc_feature (1394)..(1559): Pfam Id: PF00613 Pfam Desc: Phosphoinositide 3-kinase family, accessory domain (PIK domain)
  misc_feature (1440)..(1559): Pfam Id: PF00613 Pfam Desc: Phosphoinositide 3-kinase family, accessory domain (PIK domain)
  misc_feature (1)..(1927): NCBI GI: 46108558 Blast Desc: FG01161.1 [Gibberella zeae PH-1]
  misc_feature (1)..(1927): NCBI GI: 171680323 Blast Desc: protein product [Podospora anserina] gi|170939788|emb|CAP65014.1| protein product [Podospora anserina]
  misc_feature (1)..(1927): NCBI GI: 116206870 Blast Desc: CHGG_02728 [Chaetomium globosum CBS 148.51] gi|88183325|gb|EAQ90793.1| CHGG_02728 [Chaetomium globosum CBS 148.51]
  misc_feature (1)..(1927): NCBI GI: 145602979 Blast Desc: MGG_13790 [Magnaporthe grisea 70-15] gi|145011319|gb|EDJ95975.1| MGG_13790 [Magnaporthe grisea 70-15]
  misc_feature (1)..(1927): NCBI GI: 85111108 Blast Desc: NCU09367 [Neurospora crassa OR74A] gi|28925508|gb|EAA34541.1| conserved [Neurospora crassa OR74A]
  misc_feature (66)..(1902): NCBI GI: 154308526 Blast Desc: BC1G_08323 [Botryotinia fuckeliana B05.10] gi|150852864|gb|EDN28056.1| BC1G_08323 [Botryotinia fuckeliana B05.10]
  misc_feature (1)..(1927): NCBI GI: 156036422 Blast Desc: SS1G_12900 [Sclerotinia sclerotiorum 1980] gi|154698305|gb|EDN98043.1| SS1G_12900 [Sclerotinia sclerotiorum 1980]
  misc_feature (5)..(1927): NCBI GI: 225554337 Blast Desc: phosphatidylinositol 4-kinase [Ajellomyces capsulatus G186AR]
  misc_feature (3)..(1927): NCBI GI: 189193895 Blast Desc: phosphatidylinositol 3-kinase 3 [Pyrenophora tritici-repentis Pt-1C-BFP] gi|187978850|gb|EDU45476.1| phosphatidylinositol 3-kinase 3 [Pyrenophora tritici-repentis
  misc_feature (5)..(1927): NCBI GI: 239611771 Blast Desc: phosphatidylinositol 4-kinase [Ajellomyces dermatitidis ER-3]
  misc_feature (414)..(1927): SWISSPROT Homolog: EC 2.7.1.67 1-phosphatidylinositol 4-kinase
  misc_feature: Useful for introducing or modulating the production of volatile compounds
MARNVRQQALEKIAALSASTSAVSFDRSDLDRLCRAASARSRPSDGANGSSKSRAGAMAQVPMNIREFEVLVALCKTAPMTFAASPAFARIEPSANEALTSSLTAALLALGNKHADLHETVSDNVWSFLEGLRAATRTILPPKSERDVDQNLEDAVRTATIAISLLGFIEAAAAQADFWRTGGRLALIQRVRNLLSDTFLTAVDGAFSTIRNAHSSDRNVKDWKRCLRHYASRGRPLGQLLLKRSFMWLLVAATSLLIVDVKDLRNAHVLDVLMSRERLLAPGSSNGPDADFQSIELYAGIAREEMERLEADADFLQLGHASQQRLACAVKASAIISFLNCSVLNEDAADPDNLMGWLTESLDSPQIFDENFASVVLRAMAIVSRLSPNYAPTVIRLLPRFIVQTTPPTGIVDVASHCLAFTLKKLSNDAIISTLYTLGNVLSPSSENGVTGVSNGDAGNDAQGLSNVYRGRQSTGSSISFQIPDEEESTTVYSNIVQTICGIAKLCGEEKITALAQAMLLQKLTKVNQSVDAYILTGASVLSLNSGQVEFRSLLRLYSRMCHNAVAESQTPILDAVMKARNTISANIKRDSPLFDIYLEYMLEDLVSKGDVHQSSHMKESDIEFAAQEIEQLLQPLAILMSTHDFASELSSQDDDESRALLRDAWFNIVVHGFIPATDRGKKYMNELRIMAIHSPPLVAEQRGEQVESDIELNTVLRRANTSDRESKQKKNLAALIPSKASDIKGLSYRKAIFLQAAYLVETLRADAGDCTQIFSYFLEPSMRKDDVRSVMEGVTSAVIETYLGKTLHAKSSTFSAHYAASQLAKILCGCCHRIQRVQQAAFACADRFIREVPSSLCQRSSLFAVLELLSLMWLSCFEAETEMYDPRSVFTSKLGHVTLELSDDYLFRKMTLNNLYKKAKVWVSVAINLAPSDVKGLLQTYLSEFDDEGAYGHMSLGRSFAMEMGSAIPATDQRLTSLDRIGDTSINTASDFIAQYTTRQEYRYGETLPSHGSDLVNIMPVVRRNSFVKSAPSNQADAVAALAHVESRLTGKKITPLHDVRDILRRAAALLCRSQKDESAITHYLVSIPFRIFTKESIKFGVSLWLGVMNENPRMESRLLSEIAQQSEITIQKKQGLFNPTFMYGYISCLTLYKYIDSQSRHPDPFFLKEEFAPSDQAGLAKRRQQVHNLLSPHTQLMQFFGSHFNATRLGSPDTQRIFLRLLDLTLDALKRSISHPMARGIRLRIILFSLRVLKASGNAGAAAQWRLKDKILSAGLSWFKYAPKWSFGSNILQLKTEVQLIRDVKIGLKSVSQIGAQAVAVGKFMAQKESLLEILLESEEARLNVWIHPLNEGHLPRADIMTSHGKTHLETVLKPLIRIAWTESPSLAIELVSRFPMPSIHHEVRFLLLNFPAKALCDPEALPILFGGELPQDYLLFWAPVNPVTAVTYFLPAYKNDPFLIQYAMRALEDHSVDVTFFYVPQIVQSLRFDALGYVERYIIETAQFSQLFAHQIIWNMKANSYKDDDATIPDAIKPALDKVMKKMVDSFSGEDKSFFEREFAFFDEVTSISGKLKPLIKRDKPEKKQKIEEELRKIKVDVGVYLPSNPDGVVIGIDRKSGKPLQSHAKAPYMATFRIQKTKAGVEETEEIAQDISKNGETPQRTIEVWQSAIFKVGDDCRQDVLALQMVAAFRGIFHSVGLDVYVFPYRVTATAPGCGVIDVLPNSISRDMLGREAVNGLYDYFISKYGNEDSLRFQHARNNFVKSMAAYSIISFLLQFKDRHNGNIMIDDAGHILHIDFGFCFDIAPGGVKFERAPFKLTNEMMLVMGGSTEHQAFKWFEELCVKSFLACRPYAEKLSQIVLLMMESGLPCFKPESVKHFKERFVLEKNEREAAEFVRDLVKKSAGSYSTMVYDQFQLMTNGIPY

SEQ ID NO: 10410 - DNA, 6948 bp, Muscodor strobelii; identical to SEQ ID NO: 10407
  misc_feature: SGI EST ID NO. CUFF.24717.1
  misc_feature: Variant of the nucleotide sequence at SEQ ID NO 10408

SEQ ID NO: 10411 - DNA, 1785 bp, Muscodor strobelii
  misc_feature: SGI cDNA ID NO. 563304
  misc_feature: Encodes the peptide sequence at SEQ ID NO 10412
atgtcctcccacgaagacaactccgccgcgcggttagcgacctcgccttcacgcagtcgccaccatggctcaagccgcaggaggtctctggtcttgaaacaagacgacgcctctcaggggttaacatcccgtggtcagggagtcctcacgcagctcttcaggaatcgctctcagacctcactgcacaactacggcacatcctggcgcggaggcgctggcatgaccgacgatgaagagtcagctctcatgcactctgacgcggatgatgaatatcataggcgctctcaggctgatgagcggcgaatgagccagattttaaacagcgttcctatgcgctctatgcgcctgattgggaataacaacccccggtataggtgggagagatattggaaaacggaagaacagctaaaggcgttcaataaaccgctgcgcaagtattatgagcgtacaaattatcttattcagcaatatctttatatcgatcgtctgttggacagtagtgttccccacgatcttctcaacgaatacaacgatctcccatcaagctcattcagaggagtcgaagttccagaaacaatttcggaggaagccgcgagtcttcccaagcctggtgccgtcttcaacggcaatggacagtctgctgaagacttggtctcattgtcagcaagcccccgtctgatcgcccaaggcggcgacgaaacaggctcggtgggaagtccgcaaaacttaaacgtctctaagaaggtgaagcgaacaccaaaggatatctatcgtgctacagagacaacgcccctattcagtaatgaagaggaggacgacgacgatcactgggaagctgactcgcctaagcctgagatcccttggttggaggacgacgatgacgttgatagcaacagtagagtcgtcacggtagctatatatgtcaacttcatcgccaatttcattcttctcgcaggtaaaatcgcagtcgtcatctctgtctcctcgatgtccgtcctggctagcttggttgatgcggctctcgatttcttatcgacagtcatcgtatggactactacggtattaatctcgcgtcaagaccaatatcaatatcccgtcggcagaagacgacttgagcctcttggcgtgttggtcttcagcgtcatcatgattacatcattcgttcaggtcgccttggagtcgatccaacgactcgcaggaccagaccatgaggtcatcgagctcggtattccggccttgtgtatcatgattggcaccgtcgtgattaaaggcctctgttggttctggtgcagactagtcaagaattcaagcgtgcaagcgcttgcagatgatgccatgacggacatcatcttcaacacggggtcgatcttgttcccgatcgtaggcttctactgcaaaatttggtggctcgatgcactcggcggactcttactctcgctcgttgtcgtggtaaactggtccaagacaagtctgcgtcacataaagaacctttccggattctcagcaacggccgaccaacgcaacgttctcctctaccttactatgcgtttcgcaaaaactattcgccagatccagggtctccaggcatatcacgctggcgacaagttgaatgtcgaggttgacatcattcttgatgcatcgactactcttcgcgactcccatgatctaagtgaaagtctcggatatgtgcttgagtctgtaccaattgttgatcgagcatttgtacatgctgactacgcaagctataatcttccaacgcatatggaacaacaaagcggacgatga

SEQ ID NO: 10412 - protein, 594 aa, Muscodor strobelii
  misc_feature: SGI Peptide ID NO. 563304
  misc_feature (306)..(584): Pfam Id: PF01545 Pfam Desc: Cation efflux family
  misc_feature (27)..(591): NCBI GI: 171680325 Blast Desc: protein product [Podospora anserina] gi|170939789|emb|CAP65015.1| protein product [Podospora anserina]
  misc_feature (14)..(592): NCBI GI: 39945282 Blast Desc: MGG_04623 [Magnaporthe grisea 70-15] gi|145011318|gb|EDJ95974.1| MGG_04623 [Magnaporthe grisea 70-15]
  misc_feature (15)..(591): NCBI GI: 85111110 Blast Desc: NCU09368 [Neurospora crassa OR74A] gi|28925509|gb|EAA34542.1| NCU09368 [Neurospora crassa OR74A]
  misc_feature (24)..(593): NCBI GI: 256734386 Blast Desc: [Nectria haematococca mpVI 77-13-4]
  misc_feature (5)..(591): NCBI GI: 156057891 Blast Desc: SS1G_04677 [Sclerotinia sclerotiorum 1980] gi|154702462|gb|EDO02201.1| SS1G_04677 [Sclerotinia sclerotiorum 1980]
  misc_feature (15)..(593): NCBI GI: 46108560 Blast Desc: FG01162.1 [Gibberella zeae PH-1]
  misc_feature (13)..(591): NCBI GI: 189190192 Blast Desc: cation diffusion facilitator 10 [Pyrenophora tritici-repentis Pt-1C-BFP] gi|187973041|gb|EDU40540.1| cation diffusion facilitator 10 [Pyrenophora tritici-repentis Pt-1C-BFP]
  misc_feature (23)..(590): NCBI GI: 261356605 Blast Desc: cation efflux family protein [Verticillium albo-atrum VaMs.102]
  misc_feature (146)..(593): NCBI GI: 154323386 Blast Desc: BC1G_00092 [Botryotinia fuckeliana B05.10] gi|150842321|gb|EDN17514.1| BC1G_00092 [Botryotinia fuckeliana B05.10]
  misc_feature (7)..(590): NCBI GI: 119467027 Blast Desc: cation diffusion facilitator, [Neosartorya fischeri NRRL 181] gi|119405472|gb|EAW15423.1| cation diffusion facilitator, [Neosartorya fischeri NRRL 181]
MSSHEDNSAARLATSPSRSRHHGSSRRRSLVLKQDDASQGLTSRGQGVLTQLFRNRSQTSLHNYGTSWRGGAGMTDDEESALMHSDADDEYHRRSQADERRMSQILNSVPMRSMRLIGNNNPRYRWERYWKTEEQLKAFNKPLRKYYERTNYLIQQYLYIDRLLDSSVPHDLLNEYNDLPSSSFRGVEVPETISEEAASLPKPGAVFNGNGQSAEDLVSLSASPRLIAQGGDETGSVGSPQNLNVSKKVKRTPKDIYRATETTPLFSNEEEDDDDHWEADSPKPEIPWLEDDDDVDSNSRVVTVAIYVNFIANFILLAGKIAVVISVSSMSVLASLVDAALDFLSTVIVWTTTVLISRQDQYQYPVGRRRLEPLGVLVFSVIMITSFVQVALESIQRLAGPDHEVIELGIPALCIMIGTVVIKGLCWFWCRLVKNSSVQALADDAMTDIIFNTGSILFPIVGFYCKIWWLDALGGLLLSLVVVVNWSKTSLRHIKNLSGFSATADQRNVLLYLTMRFAKTIRQIQGLQAYHAGDKLNVEVDIILDASTTLRDSHDLSESLGYVLESVPIVDRAFVHADYASYNLPTHMEQQSGR

SEQ ID NO: 10413 - DNA, 2926 bp, Muscodor strobelii
  misc_feature: SGI EST ID NO. CUFF.24637.0
  misc_feature: Variant of the nucleotide sequence at SEQ ID NO 10411
gacggcgcctatgaaaccacgcctcacagcaattgggtcgtgcggccgtggttgcgtttccacaaaagtgccaagaccacatagctcccatccaagattccaagcctcatagctttgatagcttggtgggtcacggctgaaacgaaatctcccaacatctaacgctgatactcgcaactcaagtgtcgaagagatgttcattttcctagatgaattaaagctatcaacgaggccctagatactctttggcttattgcccaattatagtttcaccgagctgtatttacccagcaggaattttcattttctagtttctagtgacattctcatcccatcccgactcgacaatgtcctcccacgaagacaactccgccgcgcggttagcgacctcgccttcacgcagtcgccaccatggctcaagccgcaggaggtctctggtcttgaaacaagacgacgcctctcaggggttaacatcccgtggtcagggagtcctcacgcagctcttcaggaatcgctctcagacctcactgcacaactacggcacatcctggcgcggaggcgctggcatgaccgacgatgaagagtcagctctcatgcactctgacgcggatgatgaatatcataggcgctctcaggctgatgagcggcgaatgagccagattttaaacagcgttcctatgcgctctatgcgcctgattgggaataacaacccccggtataggtgggagagatattggaaaacggaagaacagctaaaggcgttcaataaaccgctgcgcaagtattatgagcgtacaaattatcttattcagcaatatctttatatcgatcgtctgttggacagtagtgttccccacgatcttctcaacgaatacaacgatctcccatcaagctcattcagaggagtcgaagttccagaaacaatttcggaggaagccgcgagtcttcccaagcctggtgccgtcttcaacggcaatggacagtctgctgaagacttggtctcattgtcagcaagcccccgtctgatcgcccaaggcggcgacgaaacaggctcggtgggaagtccgcaaaacttaaacgtctctaagaaggtgaagcgaacaccaaaggatatctatcgtgctacagagacaacgcccctattcagtaatgaagaggaggacgacgacgatcactgggaagctgactcgcctaagcctgagatcccttggttggaggacgacgatgacgttgatagcaacagtagagtcgtcacggtagctatatatgtcaacttcatcgccaatttcattcttctcgcaggtaaaatcgcagtcgtcatctctgtctcctcgatgtccgtcctggctagcttggttgatgcggctctcgatttcttatcgacagtcatcgtatggactactacggtattaatctcgcgtcaagaccaatatcaatatcccgtcggcagaagacgacttgagcctcttggcgtgttggtcttcagcgtcatcatgattacatcattcgttcaggtcgccttggagtcgatccaacgactcgcaggaccagaccatgaggtcatcgagctcggtattccggccttgtgtatcatgattggcaccgtcgtgattaaaggcctctgttggttctggtgcagactagtcaagaattcaagcgtgcaagcgcttgcagatgatgccatgacggacatcatcttcaacacggggtcgatcttgttcccgatcgtaggcttctactgcaaaatttggtggctcgatgcactcggcggactcttactctcgctcgttgtcgtggtaaactggtccaagacaagtctgcgtcacataaagaacctttccggattctcagcaacggccgaccaacgcaacgttctcctctaccttactatgcgtttcgcaaaaactattcgccagatccagggtctccaggcatatcacgctggcgacaagttgaatgtcgaggttgacatcattcttgatgcatcgactactcttcgcgactcccatgatctaagtgaaagtctcggatatgtgcttgagtctgtaccaattgttgatcgagcatttgtacatgctgactacgcaagctataatcttccaacgcatatggaacaacaaagcggacgatgagttccactccactttgtcaagaaatcctagctctccgctgtgaatatacactactggggtcaaggcttgtacctatatatgttattgcttaatgcagctgtaccttccctgggagacttatggggcgttcagccattgccgtcttgtatagatacttttgactgttcttcagtgattagatacgaagtgagcagccacttgtaggtacggtagctattgtaatgaagaagagttaactcggttccttccaacccggaaggggcatcaacgactcttgcaccttcctatcgttataccgcgtcacatgtcaggcgcaagacaaagagcagtgttcatagggatcgataacgcgccaggtttctaacagctgtggaaccaacaatcgtccggatggtcgactggtaaagcagcaagttagtatgaaaccaggtaatgccgttgtttcaggtcgcctgttcgaagcggtaccttgtcatgatcacctccattaagtctctaatatgccggagcgtgcaaacaagcgggagttcgacgcgattctttttgttaatttttattttctattcacttcattgtctatgaagctgtgcgcgttatctacatcttacgcgtgatgcaagatgtggttcaccttgttgcatgttggcgatgtttttgacttggtgttttggctcattttttcgataccgaaggtcgatcttcgacgtttacacgaacccagcacctcgtatattccattaatattgacttgtgtgcgggacgtctacagtcactgttcatagctcttggcagca

SEQ ID NO: 10414 - DNA, 639 bp, Muscodor strobelii
  misc_feature: SGI cDNA ID NO. 563305
  misc_feature: Encodes the peptide sequence at SEQ ID NO 10415
atgattacatcattcgttcaggtcgccttggagtcgatccaacgactcgcaggaccagaccatgaggtcatcgagctcggtattccggccttgtgtatcatgattggcaccgtcgtgattaaaggcctctgttggttctggtgcagactagtcaagaattcaagcgtgcaagcgcttgcagatgatgccatgacggacatcatcttcaacacggggtcgatcttgttcccgatcgtaggcttctactgcaaaatttggtggctcgatgcactcggcggactcttactctcgctcgttgtcgtggtaaactggtccaagacaagtctgcgtcacataaagaacctttccggattctcagcaacggccgaccaacgcaacgttctcctctaccttactatgcgtttcgcaaaaactattcgccagatccagggtctccaggcatatcacgctggcgacaagttgaatgtcgaggttgacatcattcttgatgcatcgactactcttcgcgactcccatgatctaagtgaaagtctcggatatgtgcttgagtctgtaccaattgttgatcgagcatttgtacatgctgactacgcaagctataatcttccaacgcatatggaacaacaaagcggacgatga

SEQ ID NO: 10415 - protein, 212 aa, Muscodor strobelii
  misc_feature: SGI Peptide ID NO. 563305
  misc_feature (1)..(202): Pfam Id: PF01545 Pfam Desc: Cation efflux family
  misc_feature (5)..(202): Pfam Id: PF01545 Pfam Desc: Cation efflux family
  misc_feature (1)..(209): NCBI GI: 171680325 Blast Desc: protein product [Podospora anserina] gi|170939789|emb|CAP65015.1| protein product [Podospora anserina]
  misc_feature (1)..(209): NCBI GI: 85111110 Blast Desc: NCU09368 [Neurospora crassa OR74A] gi|28925509|gb|EAA34542.1| NCU09368 [Neurospora crassa OR74A]
  misc_feature (1)..(209): NCBI GI: 189190192 Blast Desc: cation diffusion facilitator 10 [Pyrenophora tritici-repentis Pt-1C-BFP] gi|187973041|gb|EDU40540.1| cation diffusion facilitator 10 [Pyrenophora tritici-repentis Pt-1C-BFP]
  misc_feature (1)..(211): NCBI GI: 154323386 Blast Desc: BC1G_00092 [Botryotinia fuckeliana B05.10] gi|150842321|gb|EDN17514.1| BC1G_00092 [Botryotinia fuckeliana B05.10]
  misc_feature (1)..(211): NCBI GI: 46108560 Blast Desc: FG01162.1 [Gibberella zeae PH-1]
  misc_feature (1)..(209): NCBI GI: 156057891 Blast Desc: SS1G_04677 [Sclerotinia sclerotiorum 1980] gi|154702462|gb|EDO02201.1| SS1G_04677 [Sclerotinia sclerotiorum 1980]
  misc_feature (1)..(206): NCBI GI: 256734386 Blast Desc: [Nectria haematococca mpVI 77-13-4]
  misc_feature (1)..(210): NCBI GI: 39945282 Blast Desc: MGG_04623 [Magnaporthe grisea 70-15] gi|145011318|gb|EDJ95974.1| MGG_04623 [Magnaporthe grisea 70-15]
  misc_feature (1)..(208): NCBI GI: 261356605 Blast Desc: cation efflux family protein [Verticillium albo-atrum VaMs.102]
  misc_feature (1)..(182): NCBI GI: 169612327 Blast Desc: SNOG_09283 [Phaeosphaeria nodorum SN15] gi|160702484|gb|EAT83475.2| SNOG_09283 [Phaeosphaeria nodorum SN15]
MITSFVQVALESIQRLAGPDHEVIELGIPALCIMIGTVVIKGLCWFWCRLVKNSSVQALADDAMTDIIFNTGSILFPIVGFYCKIWWLDALGGLLLSLVVVVNWSKTSLRHIKNLSGFSATADQRNVLLYLTMRFAKTIRQIQGLQAYHAGDKLNVEVDIILDASTTLRDSHDLSESLGYVLESVPIVDRAFVHADYASYNLPTHMEQQSGR

SEQ ID NO: 10416 - DNA, 2926 bp, Muscodor strobelii; identical to SEQ ID NO: 10413
  misc_feature: SGI EST ID NO. CUFF.24637.0
  misc_feature: Variant of the nucleotide sequence at SEQ ID NO 10414

SEQ ID NO: 10417 - DNA, 684 bp, Muscodor strobelii
  misc_feature: SGI cDNA ID NO. 563306
  misc_feature: Encodes the peptide sequence at SEQ ID NO 10418
atggctggatacaaagccaagattagctgccttgcctcaggcgctggttccaatctggaagctcttataaaagcctgcgagtccgggacaatccaaggagaaatcatcaaagtgacagtcaaccgagctgccgcaggagcaaaagacaaggctgcggctgcaaaccccccgattcctactgagtactttaatctcgtaaagcacggctatcacgctgctggagagaaagacccggaaaagatcaagcaagctcgcctcaaatatgatgaagatctcgcaaccaaaatactggcggacaagcctgatctggtagttttggctggctggatgcacgtcatgagtacaggtttcttgaaaccggttgatgctgctaaagttcctataatcaatttgcatccagcactaccaggcaagtatgatggtgccggagcgatcgaacgagcatacgaggacttcaaggtaggcaggttagagaacaacacgacgggtatcatgatccactatgtgattgaggaagttgaccgtggtgaggcggtggagatccaggagatccaaatacaagaaggagaaacattggaggacctgcagaaaagaattcatgcagaggagcacaagctggttgtaaaagcaacggcaaaaatagcacgaaagatagcggacgcgagaaattcgacgacagattga

SEQ ID NO: 10418 - protein, 227 aa, Muscodor strobelii
  misc_feature: SGI Peptide ID NO. 563306
  misc_feature (6)..(211): Pfam Id: PF00551 Pfam Desc: Formyl transferase
  misc_feature (7)..(222): NCBI GI: 145603081 Blast Desc: MGG_13813 [Magnaporthe grisea 70-15] gi|145011407|gb|EDJ96063.1| MGG_13813 [Magnaporthe grisea 70-15]
  misc_feature (6)..(225): NCBI GI: 116198661 Blast Desc: CHGG_07486 [Chaetomium globosum CBS 148.51] gi|88178765|gb|EAQ86233.1| CHGG_07486 [Chaetomium globosum CBS 148.51]
  misc_feature (5)..(224): NCBI GI: 256734290 Blast Desc: NECHADRAFT_74399 [Nectria haematococca mpVI 77-13-4]
  misc_feature (5)..(218): NCBI GI: 85111494 Blast Desc: NCU00843 [Neurospora crassa OR74A] gi|28925717|gb|EAA34727.1| conserved [Neurospora crassa OR74A]
  misc_feature (6)..(225): NCBI GI: 171693401 Blast Desc: protein product [Podospora anserina] gi|170946649|emb|CAP73452.1| protein product [Podospora anserina]
  misc_feature (1)..(224): NCBI GI: 156057899 Blast Desc: SS1G_04681 [Sclerotinia sclerotiorum 1980] gi|154702466|gb|EDO02205.1| SS1G_04681 [Sclerotinia sclerotiorum 1980]
  misc_feature (6)..(224): NCBI GI: 46128103 Blast Desc: FG08429.1 [Gibberella zeae PH-1]
  misc_feature (53)..(226): NCBI GI: 154323374 Blast Desc: BC1G_00086 [Botryotinia fuckeliana B05.10] gi|150842315|gb|EDN17508.1| BC1G_00086 [Botryotinia fuckeliana B05.10]
  misc_feature (1)..(214): NCBI GI: 169843305 Blast Desc: CC1G_04353 [Coprinopsis cinerea okayama7#130] gi|116510479|gb|EAU93374.1| CC1G_04353 [Coprinopsis cinerea okayama7#130]
  misc_feature (1)..(218): NCBI GI: 189206540 Blast Desc: phosphoribosylglycinamide formyltransferase [Pyrenophora tritici-repentis Pt-1C-BFP] gi|187975697|gb|EDU42323.1| phosphoribosylglycinamide Pt-1C-BFP]
  misc_feature (6)..(214): SWISSPROT Homolog: EC 2.1.2.2 Phosphoribosylglycinamide formyltransferase
MAGYKAKISCLASGAGSNLEALIKACESGTIQGEIIKVTVNRAAAGAKDKAAAANPPIPTEYFNLVKHGYHAAGEKDPEKIKQARLKYDEDLATKILADKPDLVVLAGWMHVMSTGFLKPVDAAKVPIINLHPALPGKYDGAGAIERAYEDFKVGRLENNTTGIMIHYVIEEVDRGEAVEIQEIQIQEGETLEDLQKRIHAEEHKLVVKATAKIARKIADARNSTTD

SEQ ID NO: 10419 - DNA, 1517 bp, Muscodor strobelii
  misc_feature: SGI EST ID NO. CUFF.24654.1
  misc_feature: Variant of the nucleotide sequence at SEQ ID NO 10417
gcggaataagagcatagaaaagttgcttgatgcgatatcccagttattgtccactctgactttagggaaatcacgttgagaggccggataatatttcgactagtctcgctagcgggacaatagtgcagtgatttttcgaagccttcatctgctgtaatgaaactacgacttatatgcaaatctgtactgatagacaatactccctttctatgtagcgaataattactatgcaattgtgaagtttggttctatataccgttttagttcgaatgcctgccgggcagtcttgcagttactttctgtcgccgattgagtcccgttgtgcgggggacttagtaacccaagctgtacataagcttccgcgtcgcgttctatcaaattgccccacggttctcagtaaacatggagtgattctaaaaaaaattccgttgcctccaagcgactccagcgcactactattcaatatagaggtttttttgtactgcatctcgcaagcgctttcgtgatactcgccggtgaggtaacctctgccttccacacacgacgttacggccttgtagccatcggatacacttagtgacccccgttgcgttgatagctggaggggtcgacttcgctgcatctcgatcaatttcggagcgttccacatcgtgtctgtctcccacgagcccgccatggctggatacaaagccaagattagctgccttgcctcaggcgctggttccaatctggaagctcttataaaagcctgcgagtccgggacaatccaaggagaaatcatcaaagtgacagtcaaccgagctgccgcaggagcaaaagacaaggctgcggctgcaaaccccccgattcctactgagtactttaatctcgtaaagcacggctatcacgctgctggagagaaagacccggaaaagatcaagcaagctcgcctcaaatatgatgaagatctcgcaaccaaaatactggcggacaagcctgatctggtagttttggctggctggatgcacgtcatgagtacaggtttcttgaaaccggttgatgctgctaaagttcctataatcaatttgcatccagcactaccaggcaagtatgatggtgccggagcgatcgaacgagcatacgaggacttcaaggtaggcaggttagagaacaacacgacgggtatcatgatccactatgtgattgaggaagttgaccgtggtgaggcggtggagatccaggagatccaaatacaagaaggagaaacattggaggacctgcagaaaagaattcatgcagaggagcacaagctggttgtaaaagcaacggcaaaaatagcacgaaagatagcggacgcgagaaattcgacgacagattgatgaggtttaattagatctccaatgaatgcgggtataaagacaatagcaccaaggctgctcaagcgctttagatttgacaaaggcttacacatattaatctctattcgtacctgagtcaaccagctgcacgtgcgacggtgattggaagttgaaatttcg

SEQ ID NO: 10420 - DNA, 2766 bp, Muscodor strobelii
  misc_feature: SGI cDNA ID NO. 563307
  misc_feature: Reduced expression when VOC is produced
  misc_feature: Encodes the peptide sequence at SEQ ID NO 10421
atgcctaggttcccggtcaacttccggcggaaatcagccgcaaccgaggatctaaatgtcccgcccgacgtgccctcgtttcgagttctcgaacggccaaataccggcaacacgaaaggattcgatggcggtgccagatactcgagaccacttactcacccccatcgccccgccactgggcacgacttggacgtcgaggacaatctcttcgcgggcttgagttccaaccgtggcagtgggagctccaataccaccaagacacactctgacaattcgtcgcgccactccaatgtgtccacggcaccctcctcggctgagaatgtccccccgcaggaagactggcgatctcccatccacaggaagcctgctccgcctccgcagcacgacgatgcgacggcgacgattccgcccgtgcctcctgtccccaaagcctccggcttcctcaacaaggcagggagaaccttttcctttggaagcaccaaaaagggacctctcccctcgatccccgctgacgaacctgttcctcccctgcccgaattctcagggcccggaacgcccagcgttcgctcaagggcaacgaccgagtccacaattagcgccgcaacaccgccgagactcgaagaccgagatttcatgctcgacttaggtggtgatttaagtactgcgctcagcaaatttgacaagcgatccagcgtagcgactttaaagggacgtgagggaacaaatgctcgaccgaaccagccatcccctcttcatctcgaccgctcgactgcggtagagcccccgccccgctcttggaatagccagcactcagatgaaggcttgctaggaaccggccgaatggtagcctcgcccgtcaatactcgcggtcttgctgcaccaccaccaccaccgacaactgctgcatcgaggcccagcagaggctccgccgacagacgtttgaccgaggaggacgacgaggactctgctttactgagtgactcacttgccgcaacgagattcctgtcaagcggcacaacgaaccgaggctaccagaaggatttacccagggcaaaaaccggtctggcagagtcttatgccaatccgaacgaagataacctatttgacaagtcgttcagtcgcccgcccaaaattgttgggtcgcggatgggtggtcgatctctcactgcgccgcagaacaaggttatgacacctgaggaatttgaaaagtaccgccgcgacaaggccaacgacgaaaaactaggcattgctgattctgacggctcggacaaagaggatgaggatgtcaattacgacgacgaggatgaggacgagcttgagaagtcgaagcaggcagaaaaacaacgccgaagacaggaagcccagatgtcggtgtatcgacaaacgatgatgaaggtcacgggtgaatctgcgaatccagctcgaccaggtattgccatgtccatgagcactccgaacttgtctctcggcaatgctcccattgggaaatctccctcgccgttctccgacggctctgaagaagacgaggaggttcctctgggcatactcgccgcccatgggtttcctgggaagaatcggccgcctacgcgtctcaccaacatgccatcccagccagacttgcgggtttcgatgcaggccccatccactggcggacctggctctgttgcaggaggccctccaggagccagttctggtggacgactgcccccattcgccaggaagctaccccaagacccttatcttggtgcagggctcatcaaccaacctcctcgagaatccatggcgtttggaggtggttcatcagcttcgggtcagcctagagtggttcccacaggaggtctagttggcgtgatagccaacgaggagcgagctcgggctttgcgaaggggcagtcctgccaccgacaacgcgagaaacgcgataccacatggacagatgaacccagcatttgaccctatcaatggcataccgccacaaatgatgtaccctacgggcatgcaacaggcacaacccccgatgctcacccccacagaccaggcacaactgcagatgaaccaacaaatgacacagttcatgcaaatgcagatgcagttcatgcagatgatggcctctcagaacaatggatcgtctcaagcggctccccgtcccatggggcacatgccgacacattctaacggatcttatgtagacatgtctggcaactcctttcaggcgggtgctgatctgcagcgtaactcgttcatgagtggcgccctgggcaatggaatgggtcctgggattggtcctgggatgaatcctggaatgggccatgggatgggccactcttcaaatctggagattccacaaatcggatctcaggggaggacgatgagcatgatccagcctagttcggcttcgtggattcagcctccgccgcagcccaattacgcgtctcaactgcacacgccaagcggaggctatgctccatctattgcaccatcagagcgcagcaacattggtctaccagggcgttatcgacctgtgtccagtgtcccacagcccgaacaatcgtccggccggacgtcaacgatgggtacgagcattcctctatcgcattcgaaactgaacatagaatccaagcgggctccagtcagcaaggatgatgatgacgacgacgaagaaggatgggaggcaatgagagcaaagagagaacagaagaagagcctctggaaatcaaagaagaactttggttcggacattttagaatcgatcacgttcaattcctag

SEQ ID NO: 10421 - protein, 921 aa, Muscodor strobelii
  misc_feature: SGI Peptide ID NO. 563307
  misc_feature (1)..(897): NCBI GI: 171680327 Blast Desc: protein product [Podospora anserina] gi|170939790|emb|CAP65016.1| protein product [Podospora anserina]
  misc_feature (1)..(913): NCBI GI: 145602977 Blast Desc: MGG_04625 [Magnaporthe grisea 70-15] gi|145011317|gb|EDJ95973.1| MGG_04625 [Magnaporthe grisea 70-15]
  misc_feature (1)..(913): NCBI GI: 256735108 Blast Desc: NECHADRAFT_103095 [Nectria haematococca mpVI 77-13-4]
  misc_feature (175)..(913): NCBI GI: 116206876 Blast Desc: CHGG_02731 [Chaetomium globosum CBS 148.51] gi|88183328|gb|EAQ90796.1| CHGG_02731 [Chaetomium globosum CBS 148.51]
  misc_feature (1)..(909): NCBI GI: 85110906 Blast Desc: NCU09370 [Neurospora crassa OR74A] gi|28925394|gb|EAA34452.1| [Neurospora crassa OR74A]
  misc_feature (1)..(908): NCBI GI: 156057893 Blast Desc: SS1G_04678 [Sclerotinia sclerotiorum 1980] gi|154702463|gb|EDO02202.1| SS1G_04678 [Sclerotinia sclerotiorum 1980]
  misc_feature (1)..(908): NCBI GI: 154323380 Blast Desc: BC1G_00089 [Botryotinia fuckeliana B05.10] gi|150842318|gb|EDN17511.1| BC1G_00089 [Botryotinia fuckeliana B05.10]
  misc_feature (1)..(610): NCBI GI: 261356602 Blast Desc: conserved [Verticillium albo-atrum VaMs.102]
  misc_feature (1)..(917): NCBI GI: 67528112 Blast Desc: AN4267.2 [Aspergillus nidulans FGSC A4] gi|40739745|gb|EAA58935.1| AN4267.2 [Aspergillus nidulans FGSC A4] gi|259481118|tpe|CBF74356.1| TPA: conserved [Aspergillus FGSC
  misc_feature (3)..(917): NCBI GI: 145247837 Blast Desc: An13g00270 [Aspergillus niger] gi|134080911|emb|CAK46428.1| protein product [Aspergillus niger]
  misc_feature: Useful for introducing or modulating the production of volatile compounds
MPRFPVNFRRKSAATEDLNVPPDVPSFRVLERPNTGNTKGFDGGARYSRPLTHPHRPATGHDLDVEDNLFAGLSSNRGSGSSNTTKTHSDNSSRHSNVSTAPSSAENVPPQEDWRSPIHRKPAPPPQHDDATATIPPVPPVPKASGFLNKAGRTFSFGSTKKGPLPSIPADEPVPPLPEFSGPGTPSVRSRATTESTISAATPPRLEDRDFMLDLGGDLSTALSKFDKRSSVATLKGREGTNARPNQPSPLHLDRSTAVEPPPRSWNSQHSDEGLLGTGRMVASPVNTRGLAAPPPPPTTAASRPSRGSADRRLTEEDDEDSALLSDSLAATRFLSSGTTNRGYQKDLPRAKTGLAESYANPNEDNLFDKSFSRPPKIVGSRMGGRSLTAPQNKVMTPEEFEKYRRDKANDEKLGIADSDGSDKEDEDVNYDDEDEDELEKSKQAEKQRRRQEAQMSVYRQTMMKVTGESANPARPGIAMSMSTPNLSLGNAPIGKSPSPFSDGSEEDEEVPLGILAAHGFPGKNRPPTRLTNMPSQPDLRVSMQAPSTGGPGSVAGGPPGASSGGRLPPFARKLPQDPYLGAGLINQPPRESMAFGGGSSASGQPRVVPTGGLVGVIANEERARALRRGSPATDNARNAIPHGQMNPAFDPINGIPPQMMYPTGMQQAQPPMLTPTDQAQLQMNQQMTQFMQMQMQFMQMMASQNNGSSQAAPRPMGHMPTHSNGSYVDMSGNSFQAGADLQRNSFMSGALGNGMGPGIGPGMNPGMGHGMGHSSNLEIPQIGSQGRTMSMIQPSSASWIQPPPQPNYASQLHTPSGGYAPSIAPSERSNIGLPGRYRPVSSVPQPEQSSGRTSTMGTSIPLSHSKLNIESKRAPVSKDDDDDDEEGWEAMRAKREQKKSLWKSKKNFGSDILESITFNS

SEQ ID NO: 10422 - DNA, 5269 bp, Muscodor strobelii
  misc_feature: SGI EST ID NO. CUFF.25077.1
  misc_feature: Variant of the nucleotide sequence at SEQ ID NO 10420
cttttttcacgtcccatcgacccaacctctcttccatcatcatcttttccctctggcacgcatcctcacgcctccagcctgctcccagcatctgcaggtctctctctcgttccctcgttgtggatgtgctttctggtaatcatattgtgcacatagtcttgtcataatcgttgtcttttttcttttctttcccgagttcgttacgagtcgttgcctgctagagatctcgcttcaccctctggtcatcttaacacctgacagaacctctacccattgtcaacccatctcgccgatcgcctcataactttctgcctgcatagactgatcgatcgctatatacttggtcatatctcgttaccttgcttcttcgctgcagttcctgtgtgttgcattgactttgccggcttaatttttgctttgccccgatcgatcttcgtccagtcttgacagggagagcaaattctcttcctcgtcttacacgccgccggcacttcgaaagttgggccgaactctcgcaggctcttcctctgcccaaccttggccgaggccgtttacccgcgtgttctcgtcgctgttagttcccagccgcattggtcgaaacgacccgactcgactcgactcgactctgcacctgtcgtggtttctcattcttcactccgccgacagcccgtgtggatcgactcccgacgagctccgccctgctgcttcgctgatctatgggctcgtcgtgatcccgacacaggccgatcgacgtcttctacatgcctaggttcccggtcaacttccggcggaaatcagccgcaaccgaggatctaaatgtcccgcccgacgtgccctcgtttcgagttctcgaacggccaaataccggcaacacgaaaggattcgatggcggtgccagatactcgagaccacttactcacccccatcgccccgccactgggcacgacttggacgtcgaggacaatctcttcgcgggcttgagttccaaccgtggcagtgggagctccaataccaccaagacacactctgacaattcgtcgcgccactccaatgtgtccacggcaccctcctcggctgagaatgtccccccgcaggaagactggcgatctcccatccacaggaagcctgctccgcctccgcagcacgacgatgcgacggcgacgattccgcccgtgcctcctgtccccaaagcctccggcttcctcaacaaggcagggagaaccttttcctttggaagcaccaaaaagggacctctcccctcgatccccgctgacgaacctgttcctcccctgcccgaattctcagggcccggaacgcccagcgttcgctcaagggcaacgaccgagtccacaattagcgccgcaacaccgccgagactcgaagaccgagatttcatgctcgacttaggtggtgatttaagtactgcgctcagcaaatttgacaagcgatccagcgtagcgactttaaagggacgtgagggaacaaatgctcgaccgaaccagccatcccctcttcatctcgaccgctcgactgcggtagagcccccgccccgctcttggaatagccagcactcagatgaaggcttgctaggaaccggccgaatggtagcctcgcccgtcaatactcgcggtcttgctgcaccaccaccaccaccgacaactgctgcatcgaggcccagcagaggctccgccgacagacgtttgaccgaggaggacgacgaggactctgctttactgagtgactcacttgccgcaacgagattcctgtcaagcggcacaacgaaccgaggctaccagaaggatttacccagggcaaaaaccggtctggcagagtcttatgccaatccgaacgaagataacctatttgacaagtcgttcagtcgcccgcccaaaattgttgggtcgcggatgggtggtcgatctctcactgcgccgcagaacaaggttatgacacctgaggaatttgaaaagtaccgccgcgacaaggccaacgacgaaaaactaggcattgctgattctgacggctcggacaaagaggatgaggatgtcaattacgacgacgaggatgaggacgagcttgagaagtcgaagcaggcagaaaaacaacgccgaagacaggaagcccagatgtcggtgtatcgacaaacgatgatgaaggtcacgggtgaatctgcgaatccagctcgaccaggtattgccatgtccatgagcactccgaacttgtctctcggcaatgctcccattgggaaatctccctcgccgttctccgacggctctgaagaagacgaggaggttcctctgggcatactcgccgcccatgggtttcctgggaagaatcggccgcctacgcgtctcaccaacatgccatcccagccagacttgcgggtttcgatgcaggccccatccactggcggacctggctctgttgcaggaggccctccaggagccagttctggtggacgactgcccccattcgccaggaagctaccccaagacccttatcttggtgcagggctcatcaaccaacctcctcgagaatccatggcgtttggaggtggttcatcagcttcgggtcagcctagagtggttcccacaggaggtctagttggcgtgatagccaacgaggagcgagctcgggctttgcgaaggggcagtcctgccaccgacaacgcgagaaacgcgataccacatggacagatgaacccagcatttgaccctatcaatggcataccgccacaaatgatgtaccctacgggcatgcaacaggcacaacccccgatgctcacccccacagaccaggcacaactgcagatgaaccaacaaatgacacagttcatgcaaatgcagatgcagttcatgcagatgatggcctctcagaacaatggatcgtctcaagcggctccccgtcccatggggcacatgccgacacattctaacggatcttatgtagacatgtctggcaactcctttcaggcgggtgctgatctgcagcgtaactcgttcatgagtggcgccctgggcaatggaatgggtcctgggattggtcctgggatgaatcctggaatgggccatgggatgggccactcttcaaatctggagattccacaaatcggatctcaggggaggacgatgagcatgatccagcctagttcggcttcgtggattcagcctccgccgcagcccaattacgcgtctcaactgcacacgccaagcggaggctatgctccatctattgcaccatcagagcgcagcaacattggtctaccagggcgttatcgacctgtgtccagtgtcccacagcccgaacaatcgtccggccggacgtcaacgatgggtacgagcattcctctatcgcattcgaaactgaacatagaatccaagcgggctccagtcagcaaggatgatgatgacgacgacgaagaaggatgggaggcaatgagagcaaagagagaacagaagaagagcctctggaaatcaaagaagaactttggttcggacattttagaatcgatcacgttcaattcctagatcactcggagcatccattctcatttagatggaaatcaaaaatattgggcgaaaggtacaccatgcacacaacaggatcatttctctcggtacgagacatagtatcaagagaagggggtttctggaatctgtatatgtctggcagcatggaaaaacacagccctggatcgagggcacggcgtcttgaataatcacgaatggcacaacagtatagatgaaatagcgtctcagcctgtgggctgcaggaggctgagaggagaaggcacgcaagcagaaagagacgactatcgttagatatcggacgtcgaatgacttgatgaacaaaagaggcctacttatttaatctcaccataacatgtaatctaatatgctcatagcggcactatcttgcagactctatacaggccatctgttcactcgccattttatgactcgggttggcagttagggtgtttacagactgacgattatctttcatctttgtttctattaacaatttgtgcccggcccatgctctgcgtccagaattgacagcagtgacttagctcagccggctggctaacattcaggctcatagtgactctctaggcagcggttagcctaattggcccatcatagccaactggtcacaaaattcccatgtctatagcgttgccatccacatcagacgcggcgccacttatcgtacgtttacacgttgagagcagaatgcttcagtccatctttccctgggcccaggcgccacgcttcacgcccaattcgacagcagccaagccccaatcctcaccgtggttatggctcccggccgtcagcccggcgcgggccttggcctgctcgtcgctcagcacggtcaggacgccgaagatgacgggcacgccggtgtcgagaccgacgcgcatgaggccctgggagacggcgtcggcgatgtactcgaagtgcatggtctcgcccttgatcagcacgccgatggcgatgatggcgtcgaagggccgggaggcggtggtggtctcggatagggctgtcaggtccgtcgtggaggagcctaggaggtcgccggcgccgagggcggagcccgaggaggtttgttggacttgagaggctgtgtacatcctgtagaagggatgatggtcgttagctttttctcggcgtgagacatgtgctggtacgtaggtatgtatgttggtatgcttgggtcgattgacctaccgttgcacggcgatggggagttcccaggatcccgggacggactggacgacgatgttggagtccttgacgccgcacttggtcagctgggccttggtgccttcgagcagaggcgcgatgatggtctcgttccagcgcgcgtgtacgatgccgatgcgaagggcggaaccgtcgtgttcctctggtgaggggcctttgagagatgtcgatgccattgtcgcgattatggacttgttcggtctaaaggtggtgatggagatgagaacttgggatggcggggaggaggaatgtcgcaatggagtggttagctgacacggcggaagtgtgcgtattggtctggaatggtttagaagatagatgattgtgattgtcctcgattgtctactgttgccgtcgacaagctgcttgaagctgacggaagagctcaaacagccaggcggacgacgaggcggggcatgacgcagtggtgacaggggtctctcgtagcccgaagagaggtgcctgaaaatatctcggctctccacattggatactgcgag

SEQ ID NO: 10423 - DNA, 609 bp, Muscodor strobelii
  misc_feature: SGI cDNA ID NO. 563308
  misc_feature: Encodes the peptide sequence at SEQ ID NO 10424
atggcatcgacatctctcaaaggcccctcaccagaggaacacgacggttccgcccttcgcatcggcatcgtacacgcgcgctggaacgagaccatcatcgcgcctctgctcgaaggcaccaaggcccagctgaccaagtgcggcgtcaaggactccaacatcgtcgtccagtccgtcccgggatcctgggaactccccatcgccgtgcaacggatgtacacagcctctcaagtccaacaaacctcctcgggctccgccctcggcgccggcgacctcctaggctcctccacgacggacctgacagccctatccgagaccaccaccgcctcccggcccttcgacgccatcatcgccatcggcgtgctgatcaagggcgagaccatgcacttcgagtacatcgccgacgccgtctcccagggcctcatgcgcgtcggtctcgacaccggcgtgcccgtcatcttcggcgtcctgaccgtgctgagcgacgagcaggccaaggcccgcgccgggctgacggccgggagccataaccacggtgaggattggggcttggctgctgtcgaattgggcgtgaagcgtggcgcctgggcccagggaaagatggactga

SEQ ID NO: 10424 - protein, 202 aa, Muscodor strobelii
  misc_feature: SGI Peptide ID NO. 563308
  misc_feature (16)..(196): Pfam Id: PF00885 Pfam Desc: 6,7-dimethyl-8-ribityllumazine synthase
  misc_feature (114)..(196): Pfam Id: PF00885 Pfam Desc: 6,7-dimethyl-8-ribityllumazine synthase
  misc_feature (16)..(72): Pfam Id: PF00885 Pfam Desc: 6,7-dimethyl-8-ribityllumazine synthase
  misc_feature (7)..(202): NCBI GI: 39945288 Blast Desc: MGG_04626 [Magnaporthe grisea 70-15] gi|77416593|sp|Q9UVT8.1|RIB4_MAGGR RecName: Full=6,7-dimethyl-8-ribityllumazine synthase; Short=DMRL AltName:
  misc_feature (5)..(202): NCBI GI: 261356600 Blast Desc: 6,7-dimethyl-8-ribityllumazine synthase [Verticillium albo-atrum VaMs.102]
  misc_feature (7)..(202): NCBI GI: 116206878 Blast Desc: CHGG_02732 [Chaetomium globosum CBS 148.51] gi|88183329|gb|EAQ90797.1| CHGG_02732 [Chaetomium globosum CBS 148.51]
  misc_feature (7)..(202): NCBI GI: 85110908 Blast Desc: 6,7-dimethyl-8-ribityllumazine synthase [Neurospora crassa OR74A] gi|28925395|gb|EAA34453.1| 6,7-dimethyl-8-ribityllumazine synthase [Neurospora crassa OR74A]
  misc_feature (7)..(202): NCBI GI: 171680329 Blast Desc: protein product [Podospora anserina] gi|170939791|emb|CAP65017.1| protein product [Podospora anserina]
  misc_feature (5)..(202): NCBI GI: 46108564 Blast Desc: FG01164.1 [Gibberella zeae PH-1]
  misc_feature (4)..(202): NCBI GI: 256734385 Blast Desc: [Nectria haematococca mpVI 77-13-4]
  misc_feature (4)..(201): NCBI GI: 156057895 Blast Desc: SS1G_04679 [Sclerotinia sclerotiorum 1980] gi|154702464|gb|EDO02203.1| SS1G_04679 [Sclerotinia sclerotiorum 1980]
  misc_feature (5)..(201): NCBI GI: 189205487 Blast Desc: 6,7-dimethyl-8-ribityllumazine synthase [Pyrenophora tritici-repentis Pt-1C-BFP] gi|187975171|gb|EDU41797.1| 6,7-dimethyl-8-ribityllumazine synthase [Pyrenophora Pt-1C-BFP]
  misc_feature (5)..(201): NCBI GI: 169601852 Blast Desc: SNOG_03802 [Phaeosphaeria nodorum SN15] gi|160706028|gb|EAT89007.2| SNOG_03802 [Phaeosphaeria nodorum SN15]
  misc_feature (7)..(202): SWISSPROT Homolog: EC 2.5.1.9 Riboflavin synthase
MASTSLKGPSPEEHDGSALRIGIVHARWNETIIAPLLEGTKAQLTKCGVKDSNIVVQSVPGSWELPIAVQRMYTASQVQQTSSGSALGAGDLLGSSTTDLTALSETTTASRPFDAIIAIGVLIKGETMHFEYIADAVSQGLMRVGLDTGVPVIFGVLTVLSDEQAKARAGLTAGSHNHGEDWGLAAVELGVKRGAWAQGKMD

SEQ ID NO: 10425 - DNA, 5700 bp, Muscodor strobelii
  misc_feature: SGI EST ID NO. CUFF.25078.2
  misc_feature: Variant of the nucleotide sequence at SEQ ID NO 10423
ctcgcagtatccaatgtggagagccgagatattttcaggcacctctcttcgggctacgagagacccctgtcaccactgcgtcatgccccgcctcgtcgtccgcctggctgtttgagctcttccgtcagcttcaagcagcttgtcgacggcaacagtagacaatcgaggacaatcacaatcatctatcttctaaaccattccagaccaatacgcacacttccgccgtgtcagctaaccactccattgcgacattcctcctccccgccatcccaagttctcatctccatcaccacctttagaccgaacaagtccataatcgcgacaatggcatcgacatctctcaaaggcccctcaccagaggaacacgacggttccgcccttcgcatcggcatcgtacacgcgcgctggaacgagaccatcatcgcgcctctgctcgaaggcaccaaggcccagctgaccaagtgcggcgtcaaggactccaacatcgtcgtccagtccgtcccgggatcctgggaactccccatcgccgtgcaacggatgtacacagcctctcaagtccaacaaacctcctcgggctccgccctcggcgccggcgacctcctaggctcctccacgacggacctgacagccctatccgagaccaccaccgcctcccggcccttcgacgccatcatcgccatcggcgtgctgatcaagggcgagaccatgcacttcgagtacatcgccgacgccgtctcccagggcctcatgcgcgtcggtctcgacaccggcgtgcccgtcatcttcggcgtcctgaccgtgctgagcgacgagcaggccaaggcccgcgccgggctgacggccgggagccataaccacggtgaggattggggcttggctgctgtcgaattgggcgtgaagcgtggcgcctgggcccagggaaagatggactgaagcattctgctctcaacgtgtaaacgtacgataagtggcgccgcgtctgatgtggatggcaacgctatagacatgggaattttgtgaccagttggctatgatgggccaattaggctaaccgctgcctagagagtcactatgagcctgaatgttagccagccggctgagctaagtcactgctgtcaattctggacgcagagcatgggccgggcacaaattgttaatagaaacaaagatgaaagataatcgtcagtctgtaaacaccctaactgccaacccgagtcataaaatggcgagtgaacagatggcctgtatagagtctgcaagatagtgccgctatgagcatattagattacatgttatggtgagattaaataagtaggcctcttttgttcatcaagtcattcgacgtccgatatctaacgatagtcgtctctttctgcttgcgtgccttctcctctcagcctcctgcagcccacaggctgagacgctatttcatctatactgttgtgccattcgtgattattcaagacgccgtgccctcgatccagggctgtgtttttccatgctgccagacatatacagattccagaaacccccttctcttgatactatgtctcgtaccgagagaaatgatcctgttgtgtgcatggtgtacctttcgcccaatatttttgatttccatctaaatgagaatggatgctccgagtgatctaggaattgaacgtgatcgattctaaaatgtccgaaccaaagttcttctttgatttccagaggctcttcttctgttctctctttgctctcattgcctcccatccttcttcgtcgtcgtcatcatcatccttgctgactggagcccgcttggattctatgttcagtttcgaatgcgatagaggaatgctcgtacccatcgttgacgtccggccggacgattgttcgggctgtgggacactggacacaggtcgataacgccctggtagaccaatgttgctgcgctctgatggtgcaatagatggagcatagcctccgcttggcgtgtgcagttgagacgcgtaattgggctgcggcggaggctgaatccacgaagccgaactaggctggatcatgctcatcgtcctcccctgagatccgatttgtggaatctccagatttgaagagtggcccatcccatggcccattccaggattcatcccaggaccaatcccaggacccattccattgcccagggcgccactcatgaacgagttacgctgcagatcagcacccgcctgaaaggagttgccagacatgtctacataagatccgttagaatgtgtcggcatgtgccccatgggacggggagccgcttgagacgatccattgttctgagaggccatcatctgcatgaactgcatctgcatttgcatgaactgtgtcatttgttggttcatctgcagttgtgcctggtctgtgggggtgagcatcgggggttgtgcctgttgcatgcccgtagggtacatcatttgtggcggtatgccattgatagggtcaaatgctgggttcatctgtccatgtggtatcgcgtttctcgcgttgtcggtggcaggactgccccttcgcaaagcccgagctcgctcctcgttggctatcacgccaactagacctcctgtgggaaccactctaggctgacccgaagctgatgaaccacctccaaacgccatggattctcgaggaggttggttgatgagccctgcaccaagataagggtcttggggtagcttcctggcgaatgggggcagtcgtccaccagaactggctcctggagggcctcctgcaacagagccaggtccgccagtggatggggcctgcatcgaaacccgcaagtctggctgggatggcatgttggtgagacgcgtaggcggccgattcttcccaggaaacccatgggcggcgagtatgcccagaggaacctcctcgtcttcttcagagccgtcggagaacggcgagggagatttcccaatgggagcattgccgagagacaagttcggagtgctcatggacatggcaatacctggtcgagctggattcgcagattcacccgtgaccttcatcatcgtttgtcgatacaccgacatctgggcttcctgtcttcggcgttgtttttctgcctgcttcgacttctcaagctcgtcctcatcctcgtcgtcgtaattgacatcctcatcctctttgtccgagccgtcagaatcagcaatgcctagtttttcgtcgttggccttgtcgcggcggtacttttcaaattcctcaggtgtcataaccttgttctgcggcgcagtgagagatcgaccacccatccgcgacccaacaattttgggcgggcgactgaacgacttgtcaaataggttatcttcgttcggattggcataagactctgccagaccggtttttgccctgggtaaatccttctggtagcctcggttcgttgtgccgcttgacaggaatctcgttgcggcaagtgagtcactcagtaaagcagagtcctcgtcgtcctcctcggtcaaacgtctgtcggcggagcctctgctgggcctcgatgcagcagttgtcggtggtggtggtggtgcagcaagaccgcgagtattgacgggcgaggctaccattcggccggttcctagcaagccttcatctgagtgctggctattccaagagcggggcgggggctctaccgcagtcgagcggtcgagatgaagaggggatggctggttcggtcgagcatttgttccctcacgtccctttaaagtcgctacgctggatcgcttgtcaaatttgctgagcgcagtacttaaatcaccacctaagtcgagcatgaaatctcggtcttcgagtctcggcggtgttgcggcgctaattgtggactcggtcgttgcccttgagcgaacgctgggcgttccgggccctgagaattcgggcaggggaggaacaggttcgtcagcggggatcgaggggagaggtccctttttggtgcttccaaaggaaaaggttctccctgccttgttgaggaagccggaggctttggggacaggaggcacgggcggaatcgtcgccgtcgcatcgtcgtgctgcggaggcggagcaggcttcctgtggatgggagatcgccagtcttcctgcggggggacattctcagccgaggagggtgccgtggacacattggagtggcgcgacgaattgtcagagtgtgtcttggtggtattggagctcccactgccactggtgcacacattagcgaaggctcctgcgttacattgtctctcaactgagacaccactttgcagattgatcgcccgcgcgccgaatcgaagaatgcaagtgacctcattcctagacagcgctagacagcccaaccttgagggaacattgaggggtagaaaatgacgtgaaacagacaagatcgaaggctgtaggatcgcacgtaccggttggaactcaagcccgcgaagagattgtcctcgacgtccaagtcgtgcccagtggcggggcgatgggggtgagtaagtggtctcgagtatctggcaccgccatcgaatcctttcgtgttgccggtatttggccgttcgagaactcgaaacgagggcacgtcgggcgggacatttagatcctcggttgcggctgatttccgccggaagttgaccgggaacctaggcatgtagaagacgtcgatcggcctgtgtcgggatcacgacgagcccatagatcagcgaagcagcagggcggagctcgtcgggagtcgatccacacgggctgtcggcggagtgaagaatgagaaaccacgacaggtgcagagtcgagtcgagtcgagtcgggtcgtttcgaccaatgcggctgggaactaacagcgacgagaacacgcgggtaactgcatggtggattgtcagccgtggttatctaatgtaagcacccgggagaactggagctgtgctgacgcctggaagaccacgactgctgtgatctcaccgacatgaagctatgggatttgatagaatggcagaatgggataacgataggtagtttctggtgcccatgaacagatgctttgtcaggtaccggcgtgttggatctggagtgtccccatgttgcgttacacgagatgacatgacttgagctgtgtgactcggtgccgaacgcccattgagttctttccatggttcagtgactgcaaaggaagctttctacttacacggcctcggccaaggttgggcagaggaagagcctgcgagagttcggcccaactttcgaagtgccggcggcgtgtaagacgaggaagagaatttgctctccctgtcaagactggacgaagatcgatcggggcaaagcaaaaattaagccggcaaagtcaatgcaacacacaggaactgcagcgaagaagcaaggtaacgagatatgaccaagtatatagcgatcgatcagtctatgcaggcagaaagttatgaggcgatcggcgagatgggttgacaatgggtagaggttctgtcaggtgttaagatgaccagagggtgaagcgagatctctagcaggcaacgactcgtaacgaactcgggaaagaaaagaaaaaagacaacgattatgacaagactatgtgcacaatatgattaccagaaagcacatccacaacgagggaacgagagagagacctgcagatgctgggagcaggctggaggcgtgaggatgcgtgccagagggaaaagatgatgatggaagagaggttgggtcgatgggacgtgaaaaaag

SEQ ID NO: 10426 - DNA, 2649 bp, Muscodor strobelii
  misc_feature: SGI cDNA ID NO. 563309
  misc_feature: Encodes the peptide sequence at SEQ ID NO 10427
atgtcatctatcctagctctctcaagagatacttgtcgtctcttggtctccaacactggcatcaattctcccgtatctgttgtgaaagaactcatagacaatgctattgatgccaaagccacgacaatagaaatccttctatctaccgatactatctccaagatcgaagttcgggacgatggttctggtactcatccagatgattacgatgctctaggtcggcatggacacactagcaagctcaggaacttcgaacaactacgtcacgtctttggaaagactcttggctttcgtggcgagggcctagcatgtatagtatccatggctgatgttactgtgactaccaaggtctcttctgaacctactgctgccgtcctccaactcgttcgtaacgaaggcggcgtttcatctcaaaaagcaacctcagcaccggttgggacaaccgtcaacatcacgaatctatacggtcgattgccagttagagaacagatggcagttaaactggctaaaaagactatcgacgaggttcatgagcttctccggtcatacgttatggcgcgaccacgtctcaaagttcattttaaattgcaacatcaatcttccaggatcctgtcatactccccgaagccaactgcgacaatgaaagaggcagctttgcagatatttagcctagcaaatcaatgcgttgagagaacaactcatttctcaaaaccgactactgacgatgaacccatgctcacggcggagttgaacgacagtgacaaggaatatacgatccaatgcctcttgctggatccttccgcggacatgagcagaataccaaaccatcactacttctcagttgatagtcgtcccctaagtgctagacgcggcattgcaaaacgacttcttgccatctacacaaagtacatcaggtcaagcgcccttggagccgatattgagaatcgatttattgcgctcgacataagatgccctctgggtacttatgacgccaacatcgaaccttccaaagacgaagttctattctcagatgaacagatcatcctgaatgcttttgagggactgtgtcaggagatgtatgagccgattgagataaagcagaagagctcggatacaccttcaaccatacagccggaggggaaaacttccgccagcctagagcaaacggctaaggatctcatcgataactctttaaatcccacgcgtataggcgacacgaatatagccttgttcaagccccttattggtgctcccatgtcagacaacacaactgaggtaccagtctacacagaatgcctgtcaagtggaagtgtccctatcagtgggaatccaacaaacaaagggggggcaccgaaccttagtgaccactctccttcgttcaaacctatgaacatgagcttgaaaccgaaattaaaccacgatcttaactcaacaggcatgaccacttggatgggggccgttaatatgtcggaagacacgagtgagcgagtaaatgactcaagccagaagaggctcaaagtcagccgagaatgtcttggcttccaccgaccgctctccgctgaaaacaatcatgacggcgagcaagatctcaatcgggcggctagattgagcgagcctgcaactggatcttttcgcagcggcgatctacctcagactccggagccgcctattctttggcaccccagggcgccacctggagatctccagattcccagaagccaggaactcgcaagtagaccccaaaatggcaatcctcgacagaccatagttccaggcggcaagtttcgtagtccgctgccaagcttattggacagtcagatcccgagagcttcgccgaatgattttggcagtgctcatcgccgtccacatcgactgtatcccccctggacaccaccgtcctcggtagagaaaaagaaaacaccagatgccccggtccagccacgacgctccaatggtctcaaacaaacacagatatcttttggtggcaacagagcaagtacccatataaatcagcaacgagatgagccgtcggtgtcacagagcctatttacggccactcgaagtaatcctgagccattgcaaggaaaccttaaaggaatgacggaattaacatgccacacgaagcaacaaggacgtcacaaacaaatacaaaaagagtcgaatccttccaaagtattgcgtaccaacggtttaaaagagaatgaagcggtaaaagatgatacggagccaattgctacgatattgcctacgggtgatccaagagcctaccttcttcgtcggcaaaaatctgtcgcggacggaggtggtcatgcaaactcaaggaagcacaagcgaacgaaaagctcgctcatgccattcgaaaacattctgcccgagctccaaattcatgatctatctttggggatgagtctcggcctccagtctctcaaggaagagatacaagagctggaacgagacgacgtgtacatctccaatgggactctcttcgacggacttgatatgagtctagatgaaggacgaaggatcgagtctcgacttcatgaaattcttgtgcagaacaaggagaatatcagctgtggagacgatattcaaatcaatctaaagacagcacttaaaggtaaacaagttgcggacttgaccaccaagtag

SEQ ID NO: 10427 - protein, 882 aa, Muscodor strobelii
  misc_feature: SGI Peptide ID NO. 563309
  misc_feature (317)..(361): Pfam Id: PF01119 Pfam Desc: DNA mismatch repair protein, C-terminal domain
  misc_feature (19)..(80): Pfam Id: PF02518 Pfam Desc: Histidine kinase-, DNA gyrase B-, and HSP90-like ATPase
  misc_feature (3)..(360): NCBI GI: 156056991 Blast Desc: SS1G_04226 [Sclerotinia sclerotiorum 1980] gi|154702012|gb|EDO01751.1| SS1G_04226 [Sclerotinia sclerotiorum 1980]
  misc_feature (3)..(360): NCBI GI: 116206880 Blast Desc: CHGG_02733 [Chaetomium globosum CBS 148.51] gi|88183330|gb|EAQ90798.1| CHGG_02733 [Chaetomium globosum CBS 148.51]
  misc_feature (3)..(360): NCBI GI: 256735107 Blast Desc: NECHADRAFT_89983 [Nectria haematococca mpVI 77-13-4]
  misc_feature (4)..(360): NCBI GI: 39945290 Blast Desc: MGG_04627 [Magnaporthe grisea 70-15] gi|145011315|gb|EDJ95971.1| MGG_04627 [Magnaporthe grisea 70-15]
  misc_feature (6)..(364): NCBI GI: 261356599 Blast Desc: DNA mismatch repair protein mutL [Verticillium albo-atrum VaMs.102]
  misc_feature (4)..(360): NCBI GI: 85111036 Blast Desc: NCU09373 [Neurospora crassa OR74A] gi|28925469|gb|EAA34508.1| [Neurospora crassa OR74A]
  misc_feature (3)..(360): NCBI GI: 46108566 Blast Desc: FG01165.1 [Gibberella zeae PH-1]
  misc_feature (4)..(360): NCBI GI: 159123611 Blast Desc: DNA mismatch repair protein, [Aspergillus fumigatus A1163]
  misc_feature (4)..(360): NCBI GI: 70983714 Blast Desc: DNA mismatch repair protein [Aspergillus fumigatus Af293] gi|66845010|gb|EAL85346.1| DNA mismatch repair protein, [Aspergillus fumigatus Af293]
  misc_feature (4)..(360): NCBI GI: 171680331 Blast Desc: protein product [Podospora anserina] gi|170939792|emb|CAP65018.1| protein product [Podospora anserina]
MSSILALSRDTCRLLVSNTGINSPVSVVKELIDNAIDAKATTIEILLSTDTISKIEVRDDGSGTHPDDYDALGRHGHTSKLRNFEQLRHVFGKTLGFRGEGLACIVSMADVTVTTKVSSEPTAAVLQLVRNEGGVSSQKATSAPVGTTVNITNLYGRLPVREQMAVKLAKKTIDEVHELLRSYVMARPRLKVHFKLQHQSSRILSYSPKPTATMKEAALQIFSLANQCVERTTHFSKPTTDDEPMLTAELNDSDKEYTIQCLLLDPSADMSRIPNHHYFSVDSRPLSARRGIAKRLLAIYTKYIRSSALGADIENRFIALDIRCPLGTYDANIEPSKDEVLFSDEQIILNAFEGLCQEMYEPIEIKQKSSDTPSTIQPEGKTSASLEQTAKDLIDNSLNPTRIGDTNIALFKPLIGAPMSDNTTEVPVYTECLSSGSVPISGNPTNKGGAPNLSDHSPSFKPMNMSLKPKLNHDLNSTGMTTWMGAVNMSEDTSERVNDSSQKRLKVSRECLGFHRPLSAENNHDGEQDLNRAARLSEPATGSFRSGDLPQTPEPPILWHPRAPPGDLQIPRSQELASRPQNGNPRQTIVPGGKFRSPLPSLLDSQIPRASPNDFGSAHRRPHRLYPPWTPPSSVEKKKTPDAPVQPRRSNGLKQTQISFGGNRASTHINQQRDEPSVSQSLFTATRSNPEPLQGNLKGMTELTCHTKQQGRHKQIQKESNPSKVLRTNGLKENEAVKDDTEPIATILPTGDPRAYLLRRQKSVADGGGHANSRKHKRTKSSLMPFENILPELQIHDLSLGMSLGLQSLKEEIQELERDDVYISNGTLFDGLDMSLDEGRRIESRLHEILVQNKENISCGDDIQINLKTALKGKQVADLTTK

SEQ ID NO: 10428 - DNA, 456 bp, Muscodor strobelii
  misc_feature: SGI EST ID NO. CUFF.24656.0
  misc_feature: Variant of the nucleotide sequence at SEQ ID NO 10426
ggcggcaagtttcgtagtccgctgccaagcttattggacagtcagatcccgagagcttcgccgaatgattttggcagtgctcatcgccgtccacatcgactgtatcccccctggacaccaccgtcctcggtagagaaaaagaaaacaccagatgccccggtccagccacgacgctccaatggtctcaaacaaacacagatatcttttggtggcaacagagcaagtacccatataaatcagcaacgagatgagccgtcggtgtcacagagcctatttacggccactcgaagtaatcctgagccattgcaaggaaaccttaaaggaatgacggaattaacatgccacacgaagcaacaaggacgtcacaaacaaatacaaaaagagtcgaatccttccaaagtattgcgtaccaacggtttaaaagagaatgaagcggtaaaagatgatacggagcca

SEQ ID NO: 10429 - DNA, 1380 bp, Muscodor strobelii
  misc_feature: SGI cDNA ID NO. 563310
  misc_feature: Encodes the peptide sequence at SEQ ID NO 10430
atgaagatcatcaccatcctcacagttgccagcatggcgcttgcagccgttctaccgaaagccggggatacggcgagacacggccaaccaataatccccaagtgccttaagcgtgatattatcattgagcctggcgtgtggtgccgagcggctcaaggccaacagcacataacatacgtcccagcaacagaaagtaaacacactgtaaccctcacacccgcccacccaacatctagccacgcaccactctcaactcgccaaccctccaacgacacctcaccaggccaaatcctagacatccgctccgatttgggcctcgcaaaaaccctctccgtctcctgcttccggacctacagcactcaatccgcaacatcaacctgttacttcgccacccaagtcctactcccattgcacatcccatcaacccacgtaactctcaccgagtctctgctcaccgtccaagacatcgcaacaacaacccaatacatcttcagtacaggcacaaagacggtagcacaagcaacgatcggcaccgatattatcgtgtccgaagtacatcaaaccactaagaccaccacgagcaccgcaacggaaaccagcgaagctttgaatatcagaggagccagctgcgtgaatcgaaccgaggacacggttcaagctgacaccgacatcataaccattaccgtgacggaaactcgcgaagactggggcggcagagcgactgaatgcgttcctattaccaaagtactcgatctaactgccatccccaccaaatacatcacgaacaccgtcacaaaaacagcatgcgaaaactccaatagcccagcaactgagaccaagactgttaccgctactacaaccgggagcatcacaaacaccgtgacggagaccatgacacttaccacaatccccgatttaactgccacccgcaccaagaccattacaaaaactgtaacgaagacttctggagatcgaaatagcacgatgacggagaccatcacgcacaccataacaaaaacttccggaaatccagccaccacagcgacagaaaccaaaaccatcaccaaaacccccaacccaacatctttcccaaccgcgacagtgacagtgacaaacactgtcacagaaataacccgcgaatacttaatcaccaaggtgacagagacagaaaccacgaccgtcaccaagatccccagtcccgcgtctttccgcaccgtcacagaaacaacacacgaaaataccatcagcatggtgaccaagacgaagacgaagacgaagaccatgaccgaaacgcccgattggtcaaccatcttcactaatcccatcactgtacccacgatcgggacaccaactgatgttattattacatttgcaaactaa

SEQ ID NO: 10430 - protein, 459 aa, Muscodor strobelii
  misc_feature: SGI Peptide ID NO. 563310
MKIITILTVASMALAAVLPKAGDTARHGQPIIPKCLKRDIIIEPGVWCRAAQGQQHITYVPATESKHTVTLTPAHPTSSHAPLSTRQPSNDTSPGQILDIRSDLGLAKTLSVSCFRTYSTQSATSTCYFATQVLLPLHIPSTHVTLTESLLTVQDIATTTQYIFSTGTKTVAQATIGTDIIVSEVHQTTKTTTSTATETSEALNIRGASCVNRTEDTVQADTDIITITVTETREDWGGRATECVPITKVLDLTAIPTKYITNTVTKTACENSNSPATETKTVTATTTGSITNTVTETMTLTTIPDLTATRTKTITKTVTKTSGDRNSTMTETITHTITKTSGNPATTATETKTITKTPNPTSFPTATVTVTNTVTEITREYLITKVTETETTTVTKIPSPASFRTVTETTHENTISMVTKTKTKTKTMTETPDWSTIFTNPITVPTIGTPTDVIITFAN

SEQ ID NO: 10431 - DNA, 3489 bp, Muscodor strobelii
  misc_feature: SGI cDNA ID NO. 563311
  misc_feature: Reduced expression when VOC is produced
  misc_feature: Encodes the peptide sequence at SEQ ID NO 10432
atgcggagcccagcatcgagcgtcgcgagacagtctcaagtctcacaaccctatcccgagccgcgcgcctttcgacctgccgccagcctgctctcgctcaccacagctgctctacttctcttgtcttcctctcggctcccaggcgcttcggccgttctcatcgaattcgagaattgcctagacgatagctacatctccacgccggcgacacaggatcaggcccagctacagttcgtgccgctcgtcgccgatgctgtcttcgacacgaagtcgagcaaccataatctgcagatcacagtctggggcaacgtgacgggaagagtgggagatgccgtcctaccgccgtcgaactcgtcagaatggaacagttcaacaggcgctctagacggcaagatccagaataccatagagcagggcctggcgtcattcaacgcgaccacactgcactcgaccgtcgaggtccttagctaccagccgtatgaaaacgatgcctacttttgcaagagtctgctgaattcatcatgtcctctcggccctgtcttcaatgagacttggtttttcaacattacagaagactatcacaggttgccgtcttttcaactatctaatgactttcactcgagctacgcccttgctacctttgcgccttcgttgattattcggtatggtgaccaatttgccactcaagttggatgtgtatcggccatcgtgactccatcgctcggcgacgcggcgtggtcgctgagatatctgcctctcgtcattctcatcttggttggaattgccaccgtctttgccgctgtcctcagtccctggggtacgagtgacattttccactggacatccaactacggacgggatccagatcttctacgactggtcacgccgggttttggagactgtcttaactatatacagtttgtcgttctgagtggcagtctgtctctcgattaccctggatattaccagcccgtggtcagccaggcatcatggtctgttctcatgttcgacgagcacttcgtctccaaggccaagtcattccagagcattgtcgatggcatctacatcaccccagcctcgtatggcatggagcgtatcgcacaactcgccggtatgggggagcttgaagatatatgggctggcatgatcatatgggtactagtcatcattgcagcggttcttctactcacacaagcaggattcctggcgcgcgtgatttggcgcctcgtcaaccgagattcggaggaagatttgcgggcaaagaatatacccttctcgataggcaatgtcacacgcatcgtcttcaacttctttctcttgccgatcattgcgctttcggcattccagctcgtcgttgccgcacagtcaccagcgtatctagtggtactcgccgtgctcacattggctctcatcattggcttcgcggcgtggctaatgcatctaattgtcaccacgaagccgcgttcacatttatttgatgatctgcctactgtgctgctctacggtccattatacaacacgtattgcgacgaagcagctgcctttgcactcgtacccattattctgaccctgctgcgaggtattgccatcggtgctgtgcagccctcgggaacggctcagatcgtcatcttagcggtctgcgaggtcatccagatactggcactacaagccttccgtccctttcattcgccaacatccatgaacgcgtatcactttggcttctcgacgcttcgattcatatcgctcattttgatggttccgtttttcccctcgttgggactcactgaaggtgcgaaagggtggattggctatgccatattgctcatacatggcagcgttttggtttttggcttcctgctaaatgctctccaaacgatcatcgaagttatagctcgtctatgtggagctgcggatgacgacatccgtggtcagacgagaggaggactatccaagatttttggtgctcgccaactttcgaggcgtgttgatcggggggcaccttcaagacaaagccagcttagtagtacggccatgttagatgccagtggtcgcgcctcgtcaagaggctatggccgggtaaggagcgagtctgctggaagcatgggcattctgatgaaccctcgaaggaactcgagtgcgatggatacgcgaagcgtagatgcatattccattccactgggaagcagcacgttggcggcgacgactcctagagaagctagtaccttttcttttttaccttcgccgggtagtgccacacgtccaccacaaccgaccgcggacccgtactaccgcccaccacgagcacgacggggaaccttggatgagggaggtgcagcatctttgcatcggaaccaggactcggtcgggagcattgatctcgcgcaccctcgtcatagcctggctggtgttgatccagatggtgatgcttacatgtcaggaagcgcaactccagcgcatggacctattgcgcccgcgccatatgctccggtttttgcgcctcgtgctgattattcaactcgtgaggttgacttctattacggagtccgggggccggcgctcaattcggaagggcttggccgcaagctggggacaggtccagctgaccctacgagccctgttgccactgcaacaggctggctcaaacgactttttgggggtaaaacgaaggagagcggcaaaggcttcgaagtggttcgaagttcacgaatgccgcccgccatgaaagcaagaggtggtgatctcagcgacgaggcgccgcctgaaggaataccggtggcattgggagtgttgcgtaaaggacctatcgagagcgacgacgacgatgacgacggtcctgtaaactcatctccgagatcaagaaaagggaaagcatctcggcaagacgaaccggagtcagacgacgatgaagagattgagatctctaaagtatcaaaagaccctcctctgctacccgattttgacgccggatccagcttcagagttcccagccgcgtagcgagccgacatgcctcgcaacggactgtcaaaacaccatctcaatcgaacaacattactgacgttcccgacgtccccgaagttcctgaggtccctaggaagagctccaagcgaaattcgagtactgacagaatgatgaacttcactgcccctgggtcgcgctctgcgtctcgaccgcgatcaactttggcggtcgaagaaccacaatctcatctcaccgcaacggctaggctgcctttcgaccggagtaattcgcaaaaacgattgtctggctcatcgaccgccctcactgacacggaagatctcagtcaatcaacttcagtcgatccttcggataatgctgacaggcgaccggcaagtcttggttatgtcaaccagcataacatcagtagagtcgaattggatcaaggcgtggatctattgggaagcactgctgaagttgtcgacgaccctagaaagccgagtcccagttcttcagtgtctcgacgatcttga

SEQ ID NO: 10432 - protein, 1162 aa, Muscodor strobelii
  misc_feature: SGI Peptide ID NO. 563311
  misc_feature (37)..(1111): Pfam Id: PF06011 Pfam Desc: Transient receptor potential (TRP) ion channel
  misc_feature (456)..(1116): Pfam Id: PF06011 Pfam Desc: Transient receptor potential (TRP) ion channel
  misc_feature (1)..(1152): NCBI GI: 256735106 Blast Desc: NECHADRAFT_65512 [Nectria haematococca mpVI 77-13-4]
  misc_feature (50)..(1162): NCBI GI: 85111038 Blast Desc: NCU09374 [Neurospora crassa OR74A] gi|28925470|gb|EAA34509.1| conserved [Neurospora crassa OR74A]
  misc_feature (50)..(1148): NCBI GI: 145602975 Blast Desc: MGG_04629 [Magnaporthe grisea 70-15] gi|145011313|gb|EDJ95969.1| MGG_04629 [Magnaporthe grisea 70-15]
  misc_feature (14)..(1152): NCBI GI: 46108568 Blast Desc: FG01166.1 [Gibberella zeae PH-1]
  misc_feature (2)..(1147): NCBI GI: 156057001 Blast Desc: SS1G_04231 [Sclerotinia sclerotiorum 1980] gi|154702017|gb|EDO01756.1| SS1G_04231 [Sclerotinia sclerotiorum 1980]
  misc_feature (38)..(1148): NCBI GI: 145245885 Blast Desc: An12g01080 [Aspergillus niger] gi|134079906|emb|CAK41038.1| protein product [Aspergillus niger]
  misc_feature (51)..(1155): NCBI GI: 169781950 Blast Desc: [Aspergillus oryzae RIB40] gi|83774180|dbj|BAE64305.1| protein product [Aspergillus oryzae]
  misc_feature (33)..(1149): NCBI GI: 119188813 Blast Desc: CIMG_04454 [Coccidioides immitis RS]
  misc_feature (49)..(1149): NCBI GI: 225562642 Blast Desc: integral membrane protein [Ajellomyces capsulatus G186AR]
  misc_feature (49)..(1149): NCBI GI: 240279449 Blast Desc: integral membrane protein [Ajellomyces capsulatus H143]
  misc_feature: Useful for introducing or modulating the production of volatile compounds
MRSPASSVARQSQVSQPYPEPRAFRPAASLLSLTTAALLLLSSSRLPGASAVLIEFENCLDDSYISTPATQDQAQLQFVPLVADAVFDTKSSNHNLQITVWGNVTGRVGDAVLPPSNSSEWNSSTGALDGKIQNTIEQGLASFNATTLHSTVEVLSYQPYENDAYFCKSLLNSSCPLGPVFNETWFFNITEDYHRLPSFQLSNDFHSSYALATFAPSLIIRYGDQFATQVGCVSAIVTPSLGDAAWSLRYLPLVILILVGIATVFAAVLSPWGTSDIFHWTSNYGRDPDLLRLVTPGFGDCLNYIQFVVLSGSLSLDYPGYYQPVVSQASWSVLMFDEHFVSKAKSFQSIVDGIYITPASYGMERIAQLAGMGELEDIWAGMIIWVLVIIAAVLLLTQAGFLARVIWRLVNRDSEEDLRAKNIPFSIGNVTRIVFNFFLLPIIALSAFQLVVAAQSPAYLVVLAVLTLALIIGFAAWLMHLIVTTKPRSHLFDDLPTVLLYGPLYNTYCDEAAAFALVPIILTLLRGIAIGAVQPSGTAQIVILAVCEVIQILALQAFRPFHSPTSMNAYHFGFSTLRFISLILMVPFFPSLGLTEGAKGWIGYAILLIHGSVLVFGFLLNALQTIIEVIARLCGAADDDIRGQTRGGLSKIFGARQLSRRVDRGAPSRQSQLSSTAMLDASGRASSRGYGRVRSESAGSMGILMNPRRNSSAMDTRSVDAYSIPLGSSTLAATTPREASTFSFLPSPGSATRPPQPTADPYYRPPRARRGTLDEGGAASLHRNQDSVGSIDLAHPRHSLAGVDPDGDAYMSGSATPAHGPIAPAPYAPVFAPRADYSTREVDFYYGVRGPALNSEGLGRKLGTGPADPTSPVATATGWLKRLFGGKTKESGKGFEVVRSSRMPPAMKARGGDLSDEAPPEGIPVALGVLRKGPIESDDDDDDGPVNSSPRSRKGKASRQDEPESDDDEEIEISKVSKDPPLLPDFDAGSSFRVPSRVASRHASQRTVKTPSQSNNITDVPDVPEVPEVPRKSSKRNSSTDRMMNFTAPGSRSASRPRSTLAVEEPQSHLTATARLPFDRSNSQKRLSGSSTALTDTEDLSQSTSVDPSDNADRRPASLGYVNQHNISRVELDQGVDLLGSTAEVVDDPRKPSPSSSVSRRS

SEQ ID NO: 10433 - DNA, 4652 bp, Muscodor strobelii
  misc_feature: SGI EST ID NO. CUFF.24782.0
  misc_feature: Variant of the nucleotide sequence at SEQ ID NO 10431
gcactggccaatatctccggatagattgtcataggtcgcatttactatcactacctaactgtttccaactcgtaagtattgggcgagatattagtaccgtgccgtgattgagcgtggtcgagacctgcgtgtgaggggagagtaggtggctgccgaacctgcttttcgtgagaattatggacaaggagctgagttgtatggggtttacagctggtggtgcatgatgttctcaggtagatcttgtacataaatgatgctggtcgtccgcagggtgcactgccacagtcgtgtatgtgcccgattgacgattgacgacgaggacgccgctttggtcctacttccgtcgactattgtgacttctgcgacttctgtgccgtgatccatcaccccagcgctgccagcccgagatccatcccgacggcaaaggccatcacagccagcaacgtcccctttctgagctctcccacatttttcatgtcatcccagcaccccaattccacttgtccgtcacacgttgcacgtttcccgtccgaccgttcgctacgctcgcttgctacctgctgtactctcgctactctcgcttctgctttgctctaccgtcctcggccggtgctctcagacgatctcgcccccggttgcccatccgtcatccggctcggttgtgttcgttgctcggccttgacactcgtttgacggcacgcggtcttctggctctcatccaacatcatgtgggcctaaacgtctgcgctgctgcctcacttcgcgtagtttcgggctgactggacctccatcgccctcgttccgcccgccacgatgcggagcccagcatcgagcgtcgcgagacagtctcaagtctcacaaccctatcccgagccgcgcgcctttcgacctgccgccagcctgctctcgctcaccacagctgctctacttctcttgtcttcctctcggctcccaggcgcttcggccgttctcatcgaattcgagaattgcctagacgatagctacatctccacgccggcgacacaggatcaggcccagctacagttcgtgccgctcgtcgccgatgctgtcttcgacacgaagtcgagcaaccataatctgcagatcacagtctggggcaacgtgacgggaagagtgggagatgccgtcctaccgccgtcgaactcgtcagaatggaacagttcaacaggcgctctagacggcaagatccagaataccatagagcagggcctggcgtcattcaacgcgaccacactgcactcgaccgtcgaggtccttagctaccagccgtatgaaaacgatgcctacttttgcaagagtctgctgaattcatcatgtcctctcggccctgtcttcaatgagacttggtttttcaacattacagaagactatcacaggttgccgtcttttcaactatctaatgactttcactcgagctacgcccttgctacctttgcgccttcgttgattattcggtatggtgaccaatttgccactcaagttggatgtgtatcggccatcgtgactccatcgctcggcgacgcggcgtggtcgctgagatatctgcctctcgtcattctcatcttggttggaattgccaccgtctttgccgctgtcctcagtccctggggtacgagtgacattttccactggacatccaactacggacgggatccagatcttctacgactggtcacgccgggttttggagactgtcttaactatatacagtttgtcgttctgagtggcagtctgtctctcgattaccctggatattaccagcccgtggtcagccaggcatcatggtctgttctcatgttcgacgagcacttcgtctccaaggccaagtcattccagagcattgtcgatggcatctacatcaccccagcctcgtatggcatggagcgtatcgcacaactcgccggtatgggggagcttgaagatatatgggctggcatgatcatatgggtactagtcatcattgcagcggttcttctactcacacaagcaggattcctggcgcgcgtgatttggcgcctcgtcaaccgagattcggaggaagatttgcgggcaaagaatatacccttctcgataggcaatgtcacacgcatcgtcttcaacttctttctcttgccgatcattgcgctttcggcattccagctcgtcgttgccgcacagtcaccagcgtatctagtggtactcgccgtgctcacattggctctcatcattggcttcgcggcgtggctaatgcatctaattgtcaccacgaagccgcgttcacatttatttgatgatctgcctactgtgctgctctacggtccattatacaacacgtattgcgacgaagcagctgcctttgcactcgtacccattattctgaccctgctgcgaggtattgccatcggtgctgtgcagccctcgggaacggctcagatcgtcatcttagcggtctgcgaggtcatccagatactggcactacaagccttccgtccctttcattcgccaacatccatgaacgcgtatcactttggcttctcgacgcttcgattcatatcgctcattttgatggttccgtttttcccctcgttgggactcactgaaggtgcgaaagggtggattggctatgccatattgctcatacatggcagcgttttggtttttggcttcctgctaaatgctctccaaacgatcatcgaagttatagctcgtctatgtggagctgcggatgacgacatccgtggtcagacgagaggaggactatccaagatttttggtgctcgccaactttcgaggcgtgttgatcggggggcaccttcaagacaaagccagcttagtagtacggccatgttagatgccagtggtcgcgcctcgtcaagaggctatggccgggtaaggagcgagtctgctggaagcatgggcattctgatgaaccctcgaaggaactcgagtgcgatggatacgcgaagcgtagatgcatattccattccactgggaagcagcacgttggcggcgacgactcctagagaagctagtaccttttcttttttaccttcgccgggtagtgccacacgtccaccacaaccgaccgcggacccgtactaccgcccaccacgagcacgacggggaaccttggatgagggaggtgcagcatctttgcatcggaaccaggactcggtcgggagcattgatctcgcgcaccctcgtcatagcctggctggtgttgatccagatggtgatgcttacatgtcaggaagcgcaactccagcgcatggacctattgcgcccgcgccatatgctccggtttttgcgcctcgtgctgattattcaactcgtgaggttgacttctattacggagtccgggggccggcgctcaattcggaagggcttggccgcaagctggggacaggtccagctgaccctacgagccctgttgccactgcaacaggctggctcaaacgactttttgggggtaaaacgaaggagagcggcaaaggcttcgaagtggttcgaagttcacgaatgccgcccgccatgaaagcaagaggtggtgatctcagcgacgaggcgccgcctgaaggaataccggtggcattgggagtgttgcgtaaaggacctatcgagagcgacgacgacgatgacgacggtcctgtaaactcatctccgagatcaagaaaagggaaagcatctcggcaagacgaaccggagtcagacgacgatgaagagattgagatctctaaagtatcaaaagaccctcctctgctacccgattttgacgccggatccagcttcagagttcccagccgcgtagcgagccgacatgcctcgcaacggactgtcaaaacaccatctcaatcgaacaacattactgacgttcccgacgtccccgaagttcctgaggtccctaggaagagctccaagcgaaattcgagtactgacagaatgatgaacttcactgcccctgggtcgcgctctgcgtctcgaccgcgatcaactttggcggtcgaagaaccacaatctcatctcaccgcaacggctaggctgcctttcgaccggagtaattcgcaaaaacgattgtctggctcatcgaccgccctcactgacacggaagatctcagtcaatcaacttcagtcgatccttcggataatgctgacaggcgaccggcaagtcttggttatgtcaaccagcataacatcagtagagtcgaattggatcaaggcgtggatctattgggaagcactgctgaagttgtcgacgaccctagaaagccgagtcccagttcttcagtgtctcgacgatcttgatttttgcatatacgatgtccacgaatcccttttattcctcaagactgtatgaattttatctaccttgcgcggcagttttgcatttcaggataacagcgcggcgcagggtccaccacattggtttggagttttgtccataatatcccgttttaccttcccaaactatgtatagacttatgaggaaaggtcaacaaggcggtgcacaaaaggctatttggatgtaaaatcagtagagagctgggaacataacccgcaccgtggtttgcattgatttgcaaaacttaataatataacgatagtgctgccttagtatatcagaggcgactacaaatatatcataatatccccaa

SEQ ID NO: 10434 - DNA, 741 bp, Muscodor strobelii
  misc_feature: SGI cDNA ID NO. 563312
  misc_feature: Encodes the peptide sequence at SEQ ID NO 10435
atgtcgcggccaaaccctcataaatcatcagccatcaatctaccagaaatacactcaactattttccacatggccgacgactctaccatgaaaatagtcgcgattggactcaatcatgtcaaattctattggccaactaagatcactgagccgatcattcaggtgcctcatacatttattggaatccgcgaactgcaaaatgggagcaccgttccagactctggaaatttttttgctgtgttcacagtcatgacctgggatttgagcgtgcgccgtagctggaagatacgattgttacgcagagacctcgcccgcttttttcgcatccgcgactccggttccaagtgggcgacacattatctctctgacaaagatcacgaatcagtcattcgtggcgaggccgttctcgagtacgcactcctcaaggtctttccttcaggactattcgaacaagggatctccggtttcattgctgaaaagggacagtttctctttcgcgtcgatatacacaaacatgaaggcagtgaaccaggaggcgtgactcaagggccatacaacccagacccgatattcaggtttcaatcgcctcgtatccgacgtggagacgcactttggccagcccctccgatcccagatcatcctcccacgacggagaaagaagatgttcctttaccaagcattgaaagtcctggcgcaccgtgggaagaaggtgacctttcgctggacgaagacgaccagtaa

SEQ ID NO: 10435 - protein, 246 aa, Muscodor strobelii
  misc_feature: SGI Peptide ID NO. 563312
MSRPNPHKSSAINLPEIHSTIFHMADDSTMKIVAIGLNHVKFYWPTKITEPIIQVPHTFIGIRELQNGSTVPDSGNFFAVFTVMTWDLSVRRSWKIRLLRRDLARFFRIRDSGSKWATHYLSDKDHESVIRGEAVLEYALLKVFPSGLFEQGISGFIAEKGQFLFRVDIHKHEGSEPGGVTQGPYNPDPIFRFQSPRIRRGDALWPAPPIPDHPPTTEKEDVPLPSIESPGAPWEEGDLSLDEDDQ

SEQ ID NO: 10436 - DNA, 1254 bp, Muscodor strobelii
  misc_feature: SGI cDNA ID NO. 563313
  misc_feature: Encodes the peptide sequence at SEQ ID NO 10437
atgcctcatcaaaatgacactacggtggcttcggatgccacgactctcgcatccaagtatcagcatttatcagtatcggcgcagactattcacgcagatgattttctaaattcccatacagctgtggcgccgccaatgcacgtctctactacatttcgatatagtagtaacccagacgaattgaaaccaggaagcaatataagtttaaatcatcctcatgattcgcacgtatactctcgactttcgggaccaaatacgacgcgctttgaagctattttgacgtctatcctaaaggggccggcactgagctatacctcgggcctatccgcatttcatgccatgatggtctttcttaacccgaagcgcatcgccatcggagacggctatcacggatgtcatggagtgattagaataatgcaaaagctcaccggcctgaagcaactggagctcgactgtgctgactcggaactcggaccaggtgatttgattcacgtcgaaacacccctgaacccaacaggagaggcccgagacctagaattttacgccgagaaagcccgccgcaccggcgccattctttctgtcgatgctacctttgcaccaccgcccctactagaccctttcgcctttggggtcgacatcgtgatgcacagtggcaccaagtactttggaggtcatagtgatatgctctgcggtgtcctggctattacgccgcgccatgcaaaagagtggctacctaagatgatcgaagagcggattttcatcggttctgtgatgggaagcctggaaggctggcttggtatccgtagcttgcggacacttgaactacgcgtttgcaagcagagcgctgacgcgacgaaattggtacagtggttggctgccgagaaagctaaagaagggagcttggttggcagctcacttgctgatatcaaacacgcaagtttgcaagttggtgatgatggaaaggagcttgcctggctcaagaagcagatgcccaagggctatgggcccgtcttctccttgtacatgaaggacggggaagatgctaagaagttaccgagcaagttacacctattccatcatgctacgagcttgggcggtgtcgagagtcttatagagtggcgtgcaatgtcggatgccggggttgataagaggttgttgagagtcagcattggtattgagggatgggaagatttgcgtgatgatcttctacaagcatttgaggcacttgcaaaggagaaaacaaaggctccatag

SEQ ID NO: 10437 - protein, 417 aa, Muscodor strobelii
  misc_feature: SGI Peptide ID NO. 563313
  misc_feature (26)..(407): Pfam Id: PF01053 Pfam Desc: Cys/Met metabolism PLP-dependent enzyme
  misc_feature (162)..(293): Pfam Id: PF01053 Pfam Desc: Cys/Met metabolism PLP-dependent enzyme
  misc_feature (327)..(372): Pfam Id: PF01053 Pfam Desc: Cys/Met metabolism PLP-dependent enzyme
  misc_feature (378)..(407): Pfam Id: PF01053 Pfam Desc: Cys/Met metabolism PLP-dependent enzyme
  misc_feature (21)..(412): NCBI GI: 164428401 Blast Desc: NCU00522 [Neurospora crassa OR74A] gi|157072133|gb|EAA34488.2| NCU00522 [Neurospora crassa OR74A]
  misc_feature (5)..(413): NCBI GI: 256734558 Blast Desc: [Nectria haematococca mpVI 77-13-4]
  misc_feature (8)..(412): NCBI GI: 171684773 Blast Desc: protein product [Podospora anserina] gi|170942347|emb|CAP67999.1| protein product [Podospora anserina]
  misc_feature (5)..(412): NCBI GI: 46107142 Blast Desc: FG00454.1 [Gibberella zeae PH-1]
  misc_feature (23)..(413): NCBI GI: 154323592 Blast Desc: BC1G_00195 [Botryotinia fuckeliana B05.10] gi|150842424|gb|EDN17617.1| BC1G_00195 [Botryotinia fuckeliana B05.10]
  misc_feature (21)..(416): NCBI GI: 145614430 Blast Desc: MGG_04764 [Magnaporthe grisea 70-15] gi|145021357|gb|EDK05486.1| MGG_04764 [Magnaporthe grisea 70-15]
  misc_feature (28)..(413): NCBI GI: 156056989 Blast Desc: SS1G_04225 [Sclerotinia sclerotiorum 1980] gi|154702011|gb|EDO01750.1| SS1G_04225 [Sclerotinia sclerotiorum 1980]
  misc_feature (21)..(412): NCBI GI: 116192417 Blast Desc: CHGG_05926 [Chaetomium globosum CBS 148.51] gi|88181839|gb|EAQ89307.1| CHGG_05926 [Chaetomium globosum CBS 148.51]
  misc_feature (16)..(413): NCBI GI: 145245891 Blast Desc: An12g01110 [Aspergillus niger] gi|134079909|emb|CAK41041.1| protein product [Aspergillus niger]
  misc_feature (16)..(413): NCBI GI: 119488809 Blast Desc: cystathionine gamma-synthase [Neosartorya fischeri NRRL 181] gi|119410952|gb|EAW20897.1| cystathionine gamma-synthase [Neosartorya fischeri NRRL 181]
  misc_feature (26)..(407): SWISSPROT Homolog: EC 4.4.1.1 Cystathionine gamma-lyase
MPHQNDTTVASDATTLASKYQHLSVSAQTIHADDFLNSHTAVAPPMHVSTTFRYSSNPDELKPGSNISLNHPHDSHVYSRLSGPNTTRFEAILTSILKGPALSYTSGLSAFHAMMVFLNPKRIAIGDGYHGCHGVIRIMQKLTGLKQLELDCADSELGPGDLIHVETPLNPTGEARDLEFYAEKARRTGAILSVDATFAPPPLLDPFAFGVDIVMHSGTKYFGGHSDMLCGVLAITPRHAKEWLPKMIEERIFIGSVMGSLEGWLGIRSLRTLELRVCKQSADATKLVQWLAAEKAKEGSLVGSSLADIKHASLQVGDDGKELAWLKKQMPKGYGPVFSLYMKDGEDAKKLPSKLHLFHHATSLGGVESLIEWRAMSDAGVDKRLLRVSIGIEGWEDLRDDLLQAFEALAKEKTKAP

SEQ ID NO: 10438 - DNA, 2967 bp, Muscodor strobelii
  misc_feature: SGI EST ID NO. CUFF.24710.0
  misc_feature: Variant of the nucleotide sequence at SEQ ID NO 10436
tcggcttgtcgctaaggctgcagcgggtcaataaatgaacttcctcaaaggtaaggtagcgttgggatctatctccttccgactatattcctccgcctaccccgccacgaagaaacggccgagacaatcgcctagatttgtcttttggtattagattgagactactgatacgcccgagtcttctttttgagggtcccatctgtccatttctcttattgaaactcaagggactcgttcttttaggacacgcacctttgcagtgtgaaaggatacgactgtaacttcaacgacggtgttagcatcatttataagacaacgctcgagattattcgtcgacgacatgcctcatcaaaatgacactacggtggcttcggatgccacgactctcgcatccaagtatcagcatttatcagtatcggcgcagactattcacgcagatgattttctaaattcccatacagctgtggcgccgccaatgcacgtctctactacatttcgatatagtagtaacccagacgaattgaaaccaggaagcaatataagtttaaatcatcctcatgattcgcacgtatactctcgactttcgggaccaaatacgacgcgctttgaagctattttgacgtctatcctaaaggggccggcactgagctatacctcgggcctatccgcatttcatgccatgatggtctttcttaacccgaagcgcatcgccatcggagacggctatcacggatgtcatggagtgattagaataatgcaaaagctcaccggcctgaagcaactggagctcgactgtgctgactcggaactcggaccaggtgatttgattcacgtcgaaacacccctgaacccaacaggagaggcccgagacctagaattttacgccgagaaagcccgccgcaccggcgccattctttctgtcgatgctacctttgcaccaccgcccctactagaccctttcgcctttggggtcgacatcgtgatgcacagtggcaccaagtactttggaggtcatagtgatatgctctgcggtgtcctggctattacgccgcgccatgcaaaagagtggctacctaagatgatcgaagagcggattttcatcggttctgtgatgggaagcctggaaggctggcttggtatccgtagcttgcggacacttgaactacgcgtttgcaagcagagcgctgacgcgacgaaattggtacagtggttggctgccgagaaagctaaagaagggagcttggttggcagctcacttgctgatatcaaacacgcaagtttgcaagttggtgatgatggaaaggagcttgcctggctcaagaagcagatgcccaagggctatgggcccgtcttctccttgtacatgaaggacggggaagatgctaagaagttaccgagcaagttacacctattccatcatgctacgagcttgggcggtgtcgagagtcttatagagtggcgtgcaatgtcggatgccggggttgataagaggttgttgagagtcagcattggtattgagggatgggaagatttgcgtgatgatcttctacaagcatttgaggcacttgcaaaggagaaaacaaaggctccatagatcacctcatagtgtgcgggcttttaatgtattaaaaagcaagccatacgatcaatctatccccatttctgatgcatctcaatatatgatacgagacaaaacccaagagctcggcatgacatcctaccaaaattgaaatgcctgttctcattgcacgcagcaaagcatacctatgggtcgtaagtatcaggcattatacattgagcctcagatagaacttaccagcggtgatcagagtaccagctataacatgtcagttcccgtcatcaaggtcatatggcagtttagacttacctaggccaagacctccggtagcaagaccttggagcaacggtccaacccattcgttcttgactttctctgttgtatctagcttagactgggtctcttgtttcagctccttgatctctaatctcattttctctagatcttcttctagaaccctctggcgtcgcctggccaatccggcttcaaggtgttgctgccgattagattcttggactctagttagctcgttcaatccttgcctggctattctgtcgaatctttctctttcatgtcgcgggctgctgtgttcggcaaaggatagcccagtctgcaccgtattggccgacatttctgtcctatgatgatcattctctcgttctgaggcctgattcctgtagtctagctctttgatacgatattcgacttctttcttgttcaattctactttccatttgatctccatcgcggatactctctcaaggaatagttcctcttgtttcttatggatctctagcagagataatcgcatggcgtccaaggcctgacggctttccgcgagcatcttccgaatgtctgagtcttgctctgctaatgatccttgtggagaaatcgtcgattgctgtagttttgtctcgcaaacggcctgttgatcttctatgtatccttcgagaacttttcctgccgatgtcgttttcaaagtcgaattcagatcaaccatctcatgttgaatctgtagcgtcacttgagtatccttccagagttcaaataccgtgcgaagtaattcttgagctaatgtgcttctttgtgcgatcgttcggcacttatcatggcgaaacatctgagagcctccgcgcatcatatcagacaaatacacgtctcgtaattcgcgctctctgtctcgctgtttaatcaattctgctccattgtggtcgaaggaccacatagtggtcagaattgcaatattttcaaaacaatcttcgccacaaattgctttcatcatgttgaaattccgtttagttgacgacccgacccgcgtgtctgaaattcggtgaagataaataactccgtttatgcacacattgtttgcgtaggagacggagagataa

SEQ ID NO: 10439 - DNA, 612 bp, Muscodor strobelii
  misc_feature: SGI cDNA ID NO. 563314
  misc_feature: Encodes the peptide sequence at SEQ ID NO 10440
atgcacagtggcaccaagtactttggaggtcatagtgatatgctctgcggtgtcctggctattacgccgcgccatgcaaaagagtggctacctaagatgatcgaagagcggattttcatcggttctgtgatgggaagcctggaaggctggcttggtatccgtagcttgcggacacttgaactacgcgtttgcaagcagagcgctgacgcgacgaaattggtacagtggttggctgccgagaaagctaaagaagggagcttggttggcagctcacttgctgatatcaaacacgcaagtttgcaagttggtgatgatggaaaggagcttgcctggctcaagaagcagatgcccaagggctatgggcccgtcttctccttgtacatgaaggacggggaagatgctaagaagttaccgagcaagttacacctattccatcatgctacgagcttgggcggtgtcgagagtcttatagagtggcgtgcaatgtcggatgccggggttgataagaggttgttgagagtcagcattggtattgagggatgggaagatttgcgtgatgatcttctacaagcatttgaggcacttgcaaaggagaaaacaaaggctccatag

SEQ ID NO: 10440 - protein, 203 aa, Muscodor strobelii
  misc_feature: SGI Peptide ID NO. 563314
  misc_feature (1)..(193): Pfam Id: PF01053 Pfam Desc: Cys/Met metabolism PLP-dependent enzyme
  misc_feature (113)..(158): Pfam Id: PF01053 Pfam Desc: Cys/Met metabolism PLP-dependent enzyme
  misc_feature (164)..(193): Pfam Id: PF01053 Pfam Desc: Cys/Met metabolism PLP-dependent enzyme
  misc_feature (1)..(79): Pfam Id: PF01053 Pfam Desc: Cys/Met metabolism PLP-dependent enzyme
  misc_feature (1)..(198): NCBI GI: 164428401 Blast Desc: NCU00522 [Neurospora crassa OR74A] gi|157072133|gb|EAA34488.2| NCU00522 [Neurospora crassa OR74A]
  misc_feature (1)..(199): NCBI GI: 256734558 Blast Desc: [Nectria haematococca mpVI 77-13-4]
  misc_feature (1)..(198): NCBI GI: 46107142 Blast Desc: FG00454.1 [Gibberella zeae PH-1]
  misc_feature (1)..(198): NCBI GI: 171684773 Blast Desc: protein product [Podospora anserina] gi|170942347|emb|CAP67999.1| protein product [Podospora anserina]
  misc_feature (1)..(199): NCBI GI: 156056989 Blast Desc: SS1G_04225 [Sclerotinia sclerotiorum 1980] gi|154702011|gb|EDO01750.1| SS1G_04225 [Sclerotinia sclerotiorum 1980]
  misc_feature (1)..(202): NCBI GI: 145614430 Blast Desc: MGG_04764 [Magnaporthe grisea 70-15] gi|145021357|gb|EDK05486.1| MGG_04764 [Magnaporthe grisea 70-15]
  misc_feature (1)..(199): NCBI GI: 154323592 Blast Desc: BC1G_00195 [Botryotinia fuckeliana B05.10] gi|150842424|gb|EDN17617.1| BC1G_00195 [Botryotinia fuckeliana B05.10]
  misc_feature (1)..(198): NCBI GI: 116192417 Blast Desc: CHGG_05926 [Chaetomium globosum CBS 148.51] gi|88181839|gb|EAQ89307.1| CHGG_05926 [Chaetomium globosum CBS 148.51]
  misc_feature (1)..(195): NCBI GI: 169594644 Blast Desc: SNOG_00049 [Phaeosphaeria nodorum SN15] gi|111070424|gb|EAT91544.1| SNOG_00049 [Phaeosphaeria nodorum SN15]
  misc_feature (1)..(198): NCBI GI: 261357543 Blast Desc: cystathionine gamma-synthase [Verticillium albo-atrum VaMs.102]
  misc_feature (1)..(193): SWISSPROT Homolog: EC 4.4.1.8 Cystathionine beta-lyase
MHSGTKYFGGHSDMLCGVLAITPRHAKEWLPKMIEERIFIGSVMGSLEGWLGIRSLRTLELRVCKQSADATKLVQWLAAEKAKEGSLVGSSLADIKHASLQVGDDGKELAWLKKQMPKGYGPVFSLYMKDGEDAKKLPSKLHLFHHATSLGGVESLIEWRAMSDAGVDKRLLRVSIGIEGWEDLRDDLLQAFEALAKEKTKAP

SEQ ID NO: 10441 - DNA, 2967 bp, Muscodor strobelii; identical to SEQ ID NO: 10438
  misc_feature: SGI EST ID NO. CUFF.24710.0
  misc_feature: Variant of the nucleotide sequence at SEQ ID NO 10439

SEQ ID NO: 10442 - DNA, 1392 bp, Muscodor strobelii
  misc_feature: SGI cDNA ID NO. 563315
  misc_feature: Encodes the peptide sequence at SEQ ID NO 10443
atggttatatggctaaccttgaatatcgcagatctgactcgattttcatacttgtcatgggttaggacaacaggttcaggcaaaagctcattcattgccgattgcacgggtcgcgaagatgtccaaattggaagcgatctggaatcatgtacgagctccgtcgcaatctttaataccgagttgcagggtcgtgacattcatctcattgacacgcccggatttgacgacaccaaccgcgaagatgttgagatactcacggcggtggcacattatctctccgtctcctacgcaaacaatgtgtgcataaacggagttatttatcttcaccgaatttcagacacgcgggtcgggtcgtcaactaaacggaatttcaacatgatgaaagcaatttgtggcgaagattgttttgaaaatattgcaattctgaccactatgtggtccttcgaccacaatggagcagaattgattaaacagcgagacagagagcgcgaattacgagacgtgtatttgtctgatatgatgcgcggaggctctcagatgtttcgccatgataagtgccgaacgatcgcacaaagaagcacattagctcaagaattacttcgcacggtatttgaactctggaaggatactcaagtgacgctacagattcaacatgagatggttgatctgaattcgactttgaaaacgacatcggcaggaaaagttctcgaaggatacatagaagatcaacaggccgtttgcgagacaaaactacagcaatcgacgatttctccacaaggatcattagcagagcaagactcagacattcggaagatgctcgcggaaagccgtcaggccttggacgccatgcgattatctctgctagagatccataagaaacaagaggaactattccttgagagagtatccgcgatggagatcaaatggaaagtagaattgaacaagaaagaagtcgaatatcgtatcaaagagctagactacaggaatcaggcctcagaacgagagaatgatcatcataggacagaaatgtcggccaatacggtgcagactgggctatcctttgccgaacacagcagcccgcgacatgaaagagaaagattcgacagaatagccaggcaaggattgaacgagctaactagagtccaagaatctaatcggcagcaacaccttgaagccggattggccaggcgacgccagagggttctagaagaagatctagagaaaatgagattagagatcaaggagctgaaacaagagacccagtctaagctagatacaacagagaaagtcaagaacgaatgggttggaccgttgctccaaggtcttgctaccggaggtcttggcctagctggtactctgatcaccgctggtatgctttgctgcgtgcaatga

SEQ ID NO: 10443 - protein, 463 aa, Muscodor strobelii
  misc_feature: SGI Peptide ID NO. 563315
  misc_feature (47)..(321): NCBI GI: 149210601 Blast Desc: MGCH7_ch7g773 [Magnaporthe grisea 70-15] gi|86196728|gb|EAQ71366.1| MGCH7_ch7g773 [Magnaporthe grisea 70-15]
  misc_feature (47)..(321): NCBI GI: 145609778 Blast Desc: MGG_02991 [Magnaporthe grisea 70-15] gi|145017169|gb|EDK01532.1| MGG_02991 [Magnaporthe grisea 70-15]
  misc_feature (23)..(236): NCBI GI: 169864282 Blast Desc: CC1G_12375 [Coprinopsis cinerea okayama7#130] gi|116500172|gb|EAU83067.1| CC1G_12375 [Coprinopsis cinerea okayama7#130]
  misc_feature (9)..(306): NCBI GI: 256728380 Blast Desc: NECHADRAFT_54176 [Nectria haematococca mpVI 77-13-4]
  misc_feature (24)..(253): NCBI GI: 169769098 Blast Desc: [Aspergillus oryzae RIB40] gi|238501532|ref|XP_002382000.1| conserved [Aspergillus flavus NRRL3357] gi|83766877|dbj|BAE57017.1| protein product oryzae]
  misc_feature (17)..(277): NCBI GI: 256735682 Blast Desc: NECHADRAFT_75781 [Nectria haematococca mpVI 77-13-4]
  misc_feature (23)..(418): NCBI GI: 256728210 Blast Desc: NECHADRAFT_54135 [Nectria haematococca mpVI 77-13-4]
  misc_feature (17)..(236): NCBI GI: 189198139 Blast Desc: conserved [Pyrenophora tritici-repentis Pt-1C-BFP] gi|187981355|gb|EDU47981.1| conserved [Pyrenophora tritici-repentis Pt-1C-BFP]
  misc_feature (24)..(236): NCBI GI: 170095912 Blast Desc: [Laccaria bicolor S238N-H82] gi|164645544|gb|EDR09791.1| [Laccaria bicolor S238N-H82]
  misc_feature (24)..(286): NCBI GI: 189196544 Blast Desc: conserved [Pyrenophora tritici-repentis Pt-1C-BFP] gi|187980489|gb|EDU47115.1| conserved [Pyrenophora tritici-repentis Pt-1C-BFP]
MVIWLTLNIADLTRFSYLSWVRTTGSGKSSFIADCTGREDVQIGSDLESCTSSVAIFNTELQGRDIHLIDTPGFDDTNREDVEILTAVAHYLSVSYANNVCINGVIYLHRISDTRVGSSTKRNFNMMKAICGEDCFENIAILTTMWSFDHNGAELIKQRDRERELRDVYLSDMMRGGSQMFRHDKCRTIAQRSTLAQELLRTVFELWKDTQVTLQIQHEMVDLNSTLKTTSAGKVLEGYIEDQQAVCETKLQQSTISPQGSLAEQDSDIRKMLAESRQALDAMRLSLLEIHKKQEELFLERVSAMEIKWKVELNKKEVEYRIKELDYRNQASERENDHHRTEMSANTVQTGLSFAEHSSPRHERERFDRIARQGLNELTRVQESNRQQHLEAGLARRRQRVLEEDLEKMRLEIKELKQETQSKLDTTEKVKNEWVGPLLQGLATGGLGLAGTLITAGMLCCVQ

SEQ ID NO: 10444 - DNA, 2482 bp, Muscodor strobelii
  misc_feature: SGI EST ID NO. CUFF.24711.1
  misc_feature: Variant of the nucleotide sequence at SEQ ID NO 10442
gttcaggcaaaagctcattcattgccgattgcacgggtcgcgaagatgtccaaattggaagcgatctggaatcatgtacgagctccgtcgcaatctttaataccgagttgcagggtcgtgacattcatctcattgacacgcccggatttgacgacaccaaccgcgaagatgttgagatactcacggcggtggcacattatctctccgtctcctacgcaaacaatgtgtgcataaacggagttatttatcttcaccgaatttcagacacgcgggtcgggtcgtcaactaaacggaatttcaacatgatgaaagcaatttgtggcgaagattgttttgaaaatattgcaattctgaccactatgtggtccttcgaccacaatggagcagaattgattaaacagcgagacagagagcgcgaattacgagacgtgtatttgtctgatatgatgcgcggaggctctcagatgtttcgccatgataagtgccgaacgatcgcacaaagaagcacattagctcaagaattacttcgcacggtatttgaactctggaaggatactcaagtgacgctacagattcaacatgagatggttgatctgaattcgactttgaaaacgacatcggcaggaaaagttctcgaaggatacatagaagatcaacaggccgtttgcgagacaaaactacagcaatcgacgatttctccacaaggatcattagcagagcaagactcagacattcggaagatgctcgcggaaagccgtcaggccttggacgccatgcgattatctctgctagagatccataagaaacaagaggaactattccttgagagagtatccgcgatggagatcaaatggaaagtagaattgaacaagaaagaagtcgaatatcgtatcaaagagctagactacaggaatcaggcctcagaacgagagaatgatcatcataggacagaaatgtcggccaatacggtgcagactgggctatcctttgccgaacacagcagcccgcgacatgaaagagaaagattcgacagaatagccaggcaaggattgaacgagctaactagagtccaagaatctaatcggcagcaacaccttgaagccggattggccaggcgacgccagagggttctagaagaagatctagagaaaatgagattagagatcaaggagctgaaacaagagacccagtctaagctagatacaacagagaaagtcaagaacgaatgggttggaccgttgctccaaggtcttgctaccggaggtcttggcctagctggtactctgatcaccgctggtatgctttgctgcgtgcaatgagaacaggcatttcaattttggtaggatgtcatgccgagctcttgggttttgtctcgtatcatatattgagatgcatcagaaatggggatagattgatcgtatggcttgctttttaatacattaaaagcccgcacactatgaggtgatctatggagcctttgttttctcctttgcaagtgcctcaaatgcttgtagaagatcatcacgcaaatcttcccatccctcaataccaatgctgactctcaacaacctcttatcaaccccggcatccgacattgcacgccactctataagactctcgacaccgcccaagctcgtagcatgatggaataggtgtaacttgctcggtaacttcttagcatcttccccgtccttcatgtacaaggagaagacgggcccatagcccttgggcatctgcttcttgagccaggcaagctcctttccatcatcaccaacttgcaaacttgcgtgtttgatatcagcaagtgagctgccaaccaagctcccttctttagctttctcggcagccaaccactgtaccaatttcgtcgcgtcagcgctctgcttgcaaacgcgtagttcaagtgtccgcaagctacggataccaagccagccttccaggcttcccatcacagaaccgatgaaaatccgctcttcgatcatcttaggtagccactcttttgcatggcgcggcgtaatagccaggacaccgcagagcatatcactatgacctccaaagtacttggtgccactgtgcatcacgatgtcgaccccaaaggcgaaagggtctagtaggggcggtggtgcaaaggtagcatcgacagaaagaatggcgccggtgcggcgggctttctcggcgtaaaattctaggtctcgggcctctcctgttgggttcaggggtgtttcgacgtgaatcaaatcacctggtccgagttccgagtcagcacagtcgagctccagttgcttcaggccggtgagcttttgcattattctaatcactccatgacatccgtgatagccgtctccgatggcgatgcgcttcgggttaagaaagaccatcatggcatgaaatgcggataggcccgaggtatagctcagtgccggcccctttaggatagacgtcaaaatagcttcaaagcgcgtcgtatttggtcccgaaagtc

SEQ ID NO: 10445 - DNA, 1332 bp, Muscodor strobelii
  misc_feature: SGI cDNA ID NO. 563316
  misc_feature: Encodes the peptide sequence at SEQ ID NO 10446
atggggacaacaggttcaggcaaaagctcattcattgccgattgcacgggtcgcgaagatgtccaaattggaagcgatctggaatcatgtacgagctccgtcgcaatctttaataccgagttgcagggtcgtgacattcatctcattgacacgcccggatttgacgacaccaaccgcgaagatgttgagatactcacggcggtggcacattatctctccgtctcctacgcaaacaatgtgtgcataaacggagttatttatcttcaccgaatttcagacacgcgggtcgggtcgtcaactaaacggaatttcaacatgatgaaagcaatttgtggcgaagattgttttgaaaatattgcaattctgaccactatgtggtccttcgaccacaatggagcagaattgattaaacagcgagacagagagcgcgaattacgagacgtgtatttgtctgatatgatgcgcggaggctctcagatgtttcgccatgataagtgccgaacgatcgcacaaagaagcacattagctcaagaattacttcgcacggtatttgaactctggaaggatactcaagtgacgctacagattcaacatgagatggttgatctgaattcgactttgaaaacgacatcggcaggaaaagttctcgaaggatacatagaagatcaacaggccgtttgcgagacaaaactacagcaatcgacgatttctccacaaggatcattagcagagcaagactcagacattcggaagatgctcgcggaaagccgtcaggccttggacgccatgcgattatctctgctagagatccataagaaacaagaggaactattccttgagagagtatccgcgatggagatcaaatggaaagtagaattgaacaagaaagaagtcgaatatcgtatcaaagagctagactacaggaatcaggcctcagaacgagagaatgatcatcataggacagaaatgtcggccaatacggtgcagactgggctatcctttgccgaacacagcagcccgcgacatgaaagagaaagattcgacagaatagccaggcaaggattgaacgagctaactagagtccaagaatctaatcggcagcaacaccttgaagccggattggccaggcgacgccagagggttctagaagaagatctagagaaaatgagattagagatcaaggagctgaaacaagagacccagtctaagctagatacaacagagaaagtcaagaacgaatgggttggaccgttgctccaaggtcttgctaccggaggtcttggcctagctggtactctgatcaccgctggtatgctttgctgcgtgcaatga

SEQ ID NO: 10446 - protein, 443 aa, Muscodor strobelii
  misc_feature: SGI Peptide ID NO. 563316
  misc_feature (27)..(301): NCBI GI: 149210601 Blast Desc: MGCH7_ch7g773 [Magnaporthe grisea 70-15] gi|86196728|gb|EAQ71366.1| MGCH7_ch7g773 [Magnaporthe grisea 70-15]
  misc_feature (27)..(301): NCBI GI: 145609778 Blast Desc: MGG_02991 [Magnaporthe grisea 70-15] gi|145017169|gb|EDK01532.1| MGG_02991 [Magnaporthe grisea 70-15]
  misc_feature (1)..(216): NCBI GI: 169864282 Blast Desc: CC1G_12375 [Coprinopsis cinerea okayama7#130] gi|116500172|gb|EAU83067.1| CC1G_12375 [Coprinopsis cinerea okayama7#130]
  misc_feature (1)..(233): NCBI GI: 169769098 Blast Desc: [Aspergillus oryzae RIB40] gi|238501532|ref|XP_002382000.1| conserved [Aspergillus flavus NRRL3357] gi|83766877|dbj|BAE57017.1| protein product oryzae]
  misc_feature (1)..(286): NCBI GI: 256728380 Blast Desc: NECHADRAFT_54176 [Nectria haematococca mpVI 77-13-4]
  misc_feature (1)..(257): NCBI GI: 256735682 Blast Desc: NECHADRAFT_75781 [Nectria haematococca mpVI 77-13-4]
  misc_feature (1)..(398): NCBI GI: 256728210 Blast Desc: NECHADRAFT_54135 [Nectria haematococca mpVI 77-13-4]
  misc_feature (1)..(213): NCBI GI: 170095912 Blast Desc: [Laccaria bicolor S238N-H82] gi|164645544|gb|EDR09791.1| [Laccaria bicolor S238N-H82]
  misc_feature (1)..(266): NCBI GI: 189196544 Blast Desc: conserved [Pyrenophora tritici-repentis Pt-1C-BFP] gi|187980489|gb|EDU47115.1| conserved [Pyrenophora tritici-repentis Pt-1C-BFP]
  misc_feature (1)..(216): NCBI GI: 189198139 Blast Desc: conserved [Pyrenophora tritici-repentis Pt-1C-BFP] gi|187981355|gb|EDU47981.1| conserved [Pyrenophora tritici-repentis Pt-1C-BFP]
MGTTGSGKSSFIADCTGREDVQIGSDLESCTSSVAIFNTELQGRDIHLIDTPGFDDTNREDVEILTAVAHYLSVSYANNVCINGVIYLHRISDTRVGSSTKRNFNMMKAICGEDCFENIAILTTMWSFDHNGAELIKQRDRERELRDVYLSDMMRGGSQMFRHDKCRTIAQRSTLAQELLRTVFELWKDTQVTLQIQHEMVDLNSTLKTTSAGKVLEGYIEDQQAVCETKLQQSTISPQGSLAEQDSDIRKMLAESRQALDAMRLSLLEIHKKQEELFLERVSAMEIKWKVELNKKEVEYRIKELDYRNQASERENDHHRTEMSANTVQTGLSFAEHSSPRHERERFDRIARQGLNELTRVQESNRQQHLEAGLARRRQRVLEEDLEKMRLEIKELKQETQSKLDTTEKVKNEWVGPLLQGLATGGLGLAGTLITAGMLCCVQ

SEQ ID NO: 10447 - DNA, 2482 bp, Muscodor strobelii; identical to SEQ ID NO: 10444
  misc_feature: SGI EST ID NO. CUFF.24711.1
  misc_feature: Variant of the nucleotide sequence at SEQ ID NO 10445

SEQ ID NO: 10448 - DNA, 2022 bp, Muscodor strobelii
  misc_feature: SGI cDNA ID NO. 563317
  misc_feature: Elevated expression when VOC is produced
  misc_feature: Encodes the peptide sequence at SEQ ID NO 10449
atgtcactagaaacacttgcgttattttctaatgcggacattcctagaaagaatgacatcgttcttgccttgatgggaatgactggctccgggaagagttcgctcatcagcctgtgcactggtcaagaggttgaaataggccacgagctgcaatcatgtacccaagacgttcagacatatgggtttcaacatccgaagctcccaaccagccgtgtttacctcgttgacacacctggctttgacgacactaacaaaagcgataccgaggttcttcggacattagctgcctggctgacagcaacctattccaatggtatcaaattatcaggaatcatatacttgcatcgtatcaatcaaactcgaatgcaaggttctgcactgaagaatttagcccttttcaggtctctatgtggcgagaattctctacgcaagattgtcctcgcgacgaccatgtgggatatcgaggaatttgacgtagcacaaacacgcgaggaacagctcatgcagaccaggaagtattggggtggaatgatagcaaaaggcagtcgggttctgaggcacgataacacgcaacagtctgcgtttgcaataatcgaaaatttcattaaaaacgatgcgaaaattgttctcgatattcagcacgagatggtcaacgatcacaagaccttggacaagactgaagcaggaagagatgtacagggcatgctagctgaccagaatgccaagttgaaactagaaatccaggctgtggaatcggatcttagggcagcactcaaagcaaaagacgaagagttggcagatgtaatgagagatcttcgacttgagcataagcaagcattgcaagaagtacttgagaatcaacaaaggctccaaataacggtgcaacaattatacgagtcaaaattcgccgagcaggaggagaggttgcagaatgcaaccttgaagatcaacccaggcatgacgattaattctgcagagacagtagtcgtcagaaccattggacacactatgtcacatctcatcagcagggatttccaagatgttttcacgttctcaaacaaattcgccgtcacccgtgacggctcgtgttttgcaacgtctaccggcgacgtaggacaggtttcattattctcaactagcacaggttcaaagaccagacacattgacgacttcttggatctttgtgactatgatggcgcgaaccgcccagattggttgcaaagattggccttctcttcggatgactcaacattagccatagaggtcaaattgtttaaccaaacaacgatatatacaattagagtcgataatgaaatgtccaagcccataccactggctggagcttttacaagaccactcaggggtgaagcctttacaggtctggctatttctgaaaatttggagactgtggtgagaagtacagaggatactctcaggcctagtctgtactggccgactactgggaggagctgtcccctagaggcgtttcatttcgaggaagcgccgacttttagattcgctaagaacgacgagctcctggtgtctcgagctggaagtctgctggtcttttgggatgcaacaactggtaagatgttgcatgagacggcccttgatagtacgttcaacggcagactagatttatctggaaactctatgtggattgctgttcccttcaaaagcaatcgttctgaatcacggccagcacacatctttaatctgtcgagagccattcctaagcaggtatcaaccatccagctcggacctgttaatgggcttcagggacggctgtcattctcattgtcttttgatggcaaattcttcgctacattttacaagcgagagctggtagtttataggaccaagtcggcagagataatcctgacgatggagactccggtgaccatggatttccaacgagcaaaattcttcccatcagattaccgcattatgctcatagggtcccacgcattcggcatttatcggctcgagtgcgaggacaattacgttgtccctgctagatag

SEQ ID NO: 10449 - protein, 673 aa, Muscodor strobelii
  misc_feature: SGI Peptide ID NO. 563317
  misc_feature (20)..(96): Pfam Id: PF01926 Pfam Desc: GTPase of function
  misc_feature (9)..(362): NCBI GI: 256735682 Blast Desc: NECHADRAFT_75781 [Nectria haematococca mpVI 77-13-4]
  misc_feature (9)..(297): NCBI GI: 46115214 Blast Desc: FG03449.1 [Gibberella zeae PH-1]
  misc_feature (18)..(304): NCBI GI: 116206562 Blast Desc: CHGG_02574 [Chaetomium globosum CBS 148.51] gi|88183171|gb|EAQ90639.1| CHGG_02574 [Chaetomium globosum CBS 148.51]
  misc_feature (19)..(310): NCBI GI: 256728380 Blast Desc: NECHADRAFT_54176 [Nectria haematococca mpVI 77-13-4]
  misc_feature (19)..(350): NCBI GI: 189198139 Blast Desc: conserved [Pyrenophora tritici-repentis Pt-1C-BFP] gi|187981355|gb|EDU47981.1| conserved [Pyrenophora tritici-repentis Pt-1C-BFP]
  misc_feature (18)..(312): NCBI GI: 256728210 Blast Desc: NECHADRAFT_54135 [Nectria haematococca mpVI 77-13-4]
  misc_feature (9)..(308): NCBI GI: 169769100 Blast Desc: [Aspergillus oryzae RIB40] gi|238501534|ref|XP_002382001.1| conserved [Aspergillus flavus NRRL3357] gi|83766878|dbj|BAE57018.1| protein product oryzae]
  misc_feature (18)..(304): NCBI GI: 116206564 Blast Desc: CHGG_02575 [Chaetomium globosum CBS 148.51] gi|88183172|gb|EAQ90640.1| CHGG_02575 [Chaetomium globosum CBS 148.51]
  misc_feature (18)..(327): NCBI GI: 242782693 Blast Desc: conserved [Talaromyces stipitatus ATCC 10500] gi|218720198|gb|EED19617.1| conserved [Talaromyces stipitatus ATCC 10500]
  misc_feature (18)..(316): NCBI GI: 189196544 Blast Desc: conserved [Pyrenophora tritici-repentis Pt-1C-BFP] gi|187980489|gb|EDU47115.1| conserved [Pyrenophora tritici-repentis Pt-1C-BFP]
  misc_feature: Useful for introducing or modulating the production of volatile compounds
MSLETLALFSNADIPRKNDIVLALMGMTGSGKSSLISLCTGQEVEIGHELQSCTQDVQTYGFQHPKLPTSRVYLVDTPGFDDTNKSDTEVLRTLAAWLTATYSNGIKLSGIIYLHRINQTRMQGSALKNLALFRSLCGENSLRKIVLATTMWDIEEFDVAQTREEQLMQTRKYWGGMIAKGSRVLRHDNTQQSAFAIIENFIKNDAKIVLDIQHEMVNDHKTLDKTEAGRDVQGMLADQNAKLKLEIQAVESDLRAALKAKDEELADVMRDLRLEHKQALQEVLENQQRLQITVQQLYESKFAEQEERLQNATLKINPGMTINSAETVVVRTIGHTMSHLISRDFQDVFTFSNKFAVTRDGSCFATSTGDVGQVSLFSTSTGSKTRHIDDFLDLCDYDGANRPDWLQRLAFSSDDSTLAIEVKLFNQTTIYTIRVDNEMSKPIPLAGAFTRPLRGEAFTGLAISENLETVVRSTEDTLRPSLYWPTTGRSCPLEAFHFEEAPTFRFAKNDELLVSRAGSLLVFWDATTGKMLHETALDSTFNGRLDLSGNSMWIAVPFKSNRSESRPAHIFNLSRAIPKQVSTIQLGPVNGLQGRLSFSLSFDGKFFATFYKRELVVYRTKSAEIILTMETPVTMDFQRAKFFPSDYRIMLIGSHAFGIYRLECEDNYVVPAR

SEQ ID NO: 10450 - DNA, 3901 bp, Muscodor strobelii
  misc_feature: SGI EST ID NO. CUFF.24695.0
  misc_feature: Variant of the nucleotide sequence at SEQ ID NO 10448
cttcacacttgtgcccaactttagagactctaaccaaaggctgttctcaacggtcttttcacaggacatctattaataacgtctcagcgtggaccttgtactcatctcacttcgtgcctgtttgcttcccgcaagctttcatccgcgaggtgtagtgacgatagagtgatgctcaacacatgcttagaccccatgcaggatgtcactagaaacacttgcgttattttctaatgcggacattcctagaaagaatgacatcgttcttgccttgatgggaatgactggctccgggaagagttcgctcatcagcctgtgcactggtcaagaggttgaaataggccacgagctgcaatcatgtacccaagacgttcagacatatgggtttcaacatccgaagctcccaaccagccgtgtttacctcgttgacacacctggctttgacgacactaacaaaagcgataccgaggttcttcggacattagctgcctggctgacagcaacctattccaatggtatcaaattatcaggaatcatatacttgcatcgtatcaatcaaactcgaatgcaaggttctgcactgaagaatttagcccttttcaggtctctatgtggcgagaattctctacgcaagattgtcctcgcgacgaccatgtgggatatcgaggaatttgacgtagcacaaacacgcgaggaacagctcatgcagaccaggaagtattggggtggaatgatagcaaaatcgggttctgaggcacgataacacgcaacagtctgcgtttgcaataatcgaaaatttcattaaaaacgatgcgaaaattgttctcgatattcagcacgagatggtcaacgatcacaagaccttggacaagactgaagcaggaagagatgtacagggcatgctagctgaccagaatgccaagttgaaactagaaatccaggctgtggaatcggatcttagggcagcactcaaagcaaaagacgaagagttggcagatgtaatgagagatcttcgacttgagcataagcaagcattgcaagaagtacttgagaatcaacaaaggctccaaataacggtgcaacaattatacgagtcaaaattcgccgagcaggaggagaggttgcagaatgcaaccttgaagatcaacccaggcatgacgattaattctgcagagacagtagtcgtcagaaccattggacacactatgtcacatctcatcagcagggatttccaagatgttttcacgttctcaaacaaattcgccgtcacccgtgacggctcgtgttttgcaacgtctaccggcgacgtaggacaggtttcattattctcaactagcacaggttcaaagaccagacacattgacgacttcttggatctttgtgactatgatggcgcgaaccgcccagattggttgcaaagattggccttctcttcggatgactcaacattagccatagaggtcaaattgtttaaccaaacaacgatatatacaattagagtcgataatgaaatgtccaagcccataccactggctggagcttttacaagaccactcaggggtgaagcctttacaggtctggctatttctgaaaatttggagactgtggtgagaagtacagaggatactctcaggcctagtctgtactggccgactactgggaggagctgtcccctagaggcgtttcatttcgaggaagcgccgacttttagattcgctaagaacgacgagctcctggtgtctcgagctggaagtctgctggtcttttgggatgcaacaactggtaagatgttgcatgagacggcccttgatagtacgttcaacggcagactagatttatctggaaactctatgtggattgctgttcccttcaaaagcaatcgttctgaatcacggccagcacacatctttaatctgtcgagagccattcctaagcaggtatcaaccatccagctcggacctgttaatgggcttcagggacggctgtcattctcattgtcttttgatggcaaattcttcgctacattttacaagcgagagctggtagtttataggaccaagtcggcagagataatcctgacgatggagactccggtgaccatggatttccaacgagcaaaattcttcccatcagattaccgcattatgctcatagggtcccacgcattcggcatttatcggctcgagtgcgaggacaattacgttgtccctgctagatagttaattagttaggccgtcgatattaggtagcgcgcgagctgtctctcgttctcttgggtgagaaatgggtgaggctgggggagtgggggcgaggggagcgaaggggggatgtttaactggagcatcgcctattgaaaatgtatattctgttactctttcatacacattgtctgagccgtacaattcactactgtattgagaggagggtcgaatgcatacgcattctgcataaggaaaagacactatgaactacatgactacttgctctgtcaacagagtgtaccacaagttatatatagacgagtaacaagcaatctagtgtctagtatacaaagagcctgaaggctacaacaaattttatgcttcaaagaagaaacccagtcatgtcgattgcaacgacctttcctggctctattaaagttccattgatcggggatctcattcctccacacgtttcaatgtatagagtactctggtcagtgctgccacgtccgaaaatggcggaagtatcaccggcaagtgccagactatcagttgcgccgtcaacgacaacactgcggttcgtaaagggctctatagcgatcaagcggttgtctgaattcgtcgcgacccagatcgtattgtcctcaccgatagcaaagtcatcgacaaaaacagcgtcaagagtagaaacaacttcgacacgggcacagggagcgggaaatcccttgtctatgatcttgatacgatacaccgagaccgtagcactattggtccagtatagataaccgtcacggatgtgaacgccattgactccaacgcttgaagctcctgtgccgggtttcatctcgtcgacctcaacagcggcttcgtactcgccagtcttgatatcgacacgccagacaactcctttcgtagagtcggcgataaggacggcatcggcgactccaggaagcgccgtaatgccattcaggacgccagcgttctcaagcttgcggacaagcttaacttcggggtcgacagcgtcagtgcgaaaatcgacagtccacacaggcgcaatagtatcattggcggtccctccatagccagcgacgacaaagagttcaggctcaggctccgcgatgccaagtagtcctgcagcgccatcgccgaaggtatgcaaaagcttaaggataggttcttcactcgtaggagccacaacggtgtagagagacgcggtcggaaataagactgttagaagaagatcgccgttactgcgagctgcaaggttctcaatccaggtgttcgaatcaaattgtgtgacgagtctggaagacaaagggagatcaactccgtgggaagtagactttgctgaagacatgagtacgaaactggacgcaatcgccagctgttttaatctgaccatagtatgaagattatagtaaagatgttttgatgtcaaggagttgctaatagtccgatattgagtctcacatcacgaatacttaccaagctctggtctagcctggacttcttatacatttggtcgctgctgattgtcgccgccaagctcatggactcttgtaacttatgcaagttagacggagctaaaggactatcttaaacgagcctcgtttagactatcatagccttgccatgagtccagctgttgagacttgaaggaggtctaccgaatgcatagactgcgccagcttcgtcttagaaaa

SEQ ID NO: 10451 - DNA, 1020 bp, Muscodor strobelii
  misc_feature: SGI cDNA ID NO. 563318
  misc_feature: Encodes the peptide sequence at SEQ ID NO 10452
atggtcagattaaaacagctggcgattgcgtccagtttcgtactcatgtcttcagcaaagtctacttcccacggagttgatctccctttgtcttccagactcgtcacacaatttgattcgaacacctggattgagaaccttgcagctcgcagtaacggcgatcttcttctaacagtcttatttccgaccgcgtctctctacaccgttgtggctcctacgagtgaagaacctatccttaagcttttgcataccttcggcgatggcgctgcaggactacttggcatcgcggagcctgagcctgaactctttgtcgtcgctggctatggagggaccgccaatgatactattgcgcctgtgtggactgtcgattttcgcactgacgctgtcgaccccgaagttaagcttgtccgcaagcttgagaacgctggcgtcctgaatggcattacggcgcttcctggagtcgccgatgccgtccttatcgccgactctacgaaaggagttgtctggcgtgtcgatatcaagactggcgagtacgaagccgctgttgaggtcgacgagatgaaacccggcacaggagcttcaagcgttggagtcaatggcgttcacatccgtgacggttatctatactggaccaatagtgctacggtctcggtgtatcgtatcaagatcatagacaagggatttcccgctccctgtgcccgtgtcgaagttgtttctactcttgacgctgtttttgtcgatgactttgctatcggtgaggacaatacgatctgggtcgcgacgaattcagacaaccgcttgatcgctatagagccctttacgaaccgcagtgttgtcgttgacggcgcaactgatagtctggcacttgccggtgatacttccgccattttcggacgtggcagcactgaccagagtactctatacattgaaacgtgtggaggaatgagatccccgatcaatggaactttaatagagccaggaaaggtcgttgcaatcgacatgactgggtttcttctttga

SEQ ID NO: 10452 - protein, 339 aa, Muscodor strobelii
  misc_feature: SGI Peptide ID NO. 563318
  misc_feature (2)..(337): NCBI GI: 171683788 Blast Desc: protein product [Podospora anserina] gi|170941854|emb|CAP67507.1| protein product [Podospora anserina]
  misc_feature (24)..(331): NCBI GI: 46110901 Blast Desc: FG02332.1 [Gibberella zeae PH-1]
  misc_feature (30)..(333): NCBI GI: 256729493 Blast Desc: NECHADRAFT_47685 [Nectria haematococca mpVI 77-13-4]
  misc_feature (112)..(339): NCBI GI: 85095914 Blast Desc: NCU05626 [Neurospora crassa OR74A] gi|28921649|gb|EAA30934.1| [Neurospora crassa OR74A]
  misc_feature (30)..(333): NCBI GI: 256722873 Blast Desc: NECHADRAFT_52990 [Nectria haematococca mpVI 77-13-4]
  misc_feature (28)..(335): NCBI GI: 156049683 Blast Desc: SS1G_08548 [Sclerotinia sclerotiorum 1980] gi|154692947|gb|EDN92685.1| SS1G_08548 [Sclerotinia sclerotiorum 1980]
  misc_feature (28)..(287): NCBI GI: 238846091 Blast Desc: conserved [Microsporum canis CBS 113480]
  misc_feature (31)..(334): NCBI GI: 115397413 Blast Desc: [Aspergillus terreus NIH2624] gi|114192489|gb|EAU34189.1| [Aspergillus terreus NIH2624]
  misc_feature (29)..(334): NCBI GI: 119482818 Blast Desc: NFIA_026140 [Neosartorya fischeri NRRL 181] gi|119409592|gb|EAW19540.1| conserved [Neosartorya fischeri NRRL 181]
  misc_feature (35)..(334): NCBI GI: 67901802 Blast Desc: AN7888.2 [Aspergillus nidulans FGSC A4] gi|40740352|gb|EAA59542.1| AN7888.2 [Aspergillus nidulans FGSC A4]
MVRLKQLAIASSFVLMSSAKSTSHGVDLPLSSRLVTQFDSNTWIENLAARSNGDLLLTVLFPTASLYTVVAPTSEEPILKLLHTFGDGAAGLLGIAEPEPELFVVAGYGGTANDTIAPVWTVDFRTDAVDPEVKLVRKLENAGVLNGITALPGVADAVLIADSTKGVVWRVDIKTGEYEAAVEVDEMKPGTGASSVGVNGVHIRDGYLYWTNSATVSVYRIKIIDKGFPAPCARVEVVSTLDAVFVDDFAIGEDNTIWVATNSDNRLIAIEPFTNRSVVVDGATDSLALAGDTSAIFGRGSTDQSTLYIETCGGMRSPINGTLIEPGKVVAIDMTGFLL

SEQ ID NO: 10453 - DNA, 792 bp, Muscodor strobelii
  misc_feature: SGI cDNA ID NO. 563319
  misc_feature: Reduced expression when VOC is produced
  misc_feature: Encodes the peptide sequence at SEQ ID NO 10454
atgccgcgctgctgcccttcactgttccgcctgccctccaaactacggcggcgggctcggcggcggaggatgtcgacgctgctgctacttctatcgatactaatattgtttataatacctttctacgtcatatacaagccacccacaacactcatccgatactttgcgcgacgatggcccgatgtcttgtggcacgttgaaaccgacaagaagatcgttgccttaaccatcgatgatgccccatccgaacacaccgaagacattattggtatcctaaaagcgaatgatgccaaagccacattcttcgtcatcggaggtcaggttccggggcgtgaggataagctggtagacatcgtgctcaatggcaacgaactcggcaatcacgccatgcacgacgaaccttcgcgcgatctatcggacgacgagctcacggagcaaatcgagacggtgcgcaacaaaattagcgttgcgtaccaaactgctaagcacaaaccatcaccacaatacttccgaccaggctcaggttttttcagcgatcgtatgcggacgcttgtaaataagctgggatacagacttgtcttgggaagcgtgtatccgcacgaccctcagattcattcatcctggctcaacgcaagacacattttaagcatggtacggccggggtctataataatatgtcacgataggaggagttggaccgcaccgatgctacaggcggtcttgagtcagttgaagaaagacggctatcaggttacaacattgactgagatgctgaaactaacaaaggaataa

SEQ ID NO: 10454 - protein, 263 aa, Muscodor strobelii
  misc_feature: SGI Peptide ID NO. 563319
  misc_feature (66)..(193): Pfam Id: PF01522 Pfam Desc: Polysaccharide deacetylase
  misc_feature (1)..(262): NCBI GI: 189196208 Blast Desc: chitooligosaccharide deacetylase [Pyrenophora tritici-repentis Pt-1C-BFP] gi|187980321|gb|EDU46947.1| chitooligosaccharide deacetylase [Pyrenophora tritici-repentis
  misc_feature (24)..(259): NCBI GI: 261357545 Blast Desc: nodulation protein nodB [Verticillium albo-atrum VaMs.102]
  misc_feature (3)..(262): NCBI GI: 258575465 Blast Desc: conserved [Uncinocarpus reesii 1704] gi|237902180|gb|EEP76581.1| conserved [Uncinocarpus reesii 1704]
  misc_feature (42)..(259): NCBI GI: 115401538 Blast Desc: conserved [Aspergillus terreus NIH2624] gi|114190298|gb|EAU31998.1| conserved [Aspergillus terreus NIH2624]
  misc_feature (15)..(263): NCBI GI: 169775285 Blast Desc: [Aspergillus oryzae RIB40] gi|83769973|dbj|BAE60108.1| protein product [Aspergillus oryzae]
  misc_feature (42)..(263): NCBI GI: 238496087 Blast Desc: polysaccharide deacetylase (NodB), [Aspergillus flavus NRRL3357] gi|220694159|gb|EED50503.1| polysaccharide deacetylase (NodB), [Aspergillus flavus NRRL3357]
  misc_feature (27)..(262): NCBI GI: 119195879 Blast Desc: CIMG_02314 [Coccidioides immitis RS]
  misc_feature (29)..(263): NCBI GI: 255957149 Blast Desc: Pc21g23600 [Penicillium chrysogenum Wisconsin 54-1255] gi|211591038|emb|CAP97257.1| Pc21g23600 [Penicillium chrysogenum Wisconsin 54-1255]
  misc_feature (27)..(262): NCBI GI: 240110542 Blast Desc: Polysaccharide deacetylase family protein [Coccidioides posadasii C735 delta SOWgp]
  misc_feature (27)..(259): NCBI GI: 70997525 Blast Desc: polysaccharide deacetylase (NodB) [Aspergillus fumigatus Af293] gi|66851144|gb|EAL91470.1| polysaccharide deacetylase (NodB), [Aspergillus fumigatus Af293] polysaccharide
  misc_feature (69)..(249): SWISSPROT Homolog: EC 3.2.1.8 Endo-1,4-beta-xylanase
  misc_feature: Useful for introducing or modulating the production of volatile compounds
MPRCCPSLFRLPSKLRRRARRRRMSTLLLLLSILILFIIPFYVIYKPPTTLIRYFARRWPDVLWHVETDKKIVALTIDDAPSEHTEDIIGILKANDAKATFFVIGGQVPGREDKLVDIVLNGNELGNHAMHDEPSRDLSDDELTEQIETVRNKISVAYQTAKHKPSPQYFRPGSGFFSDRMRTLVNKLGYRLVLGSVYPHDPQIHSSWLNARHILSMVRPGSIIICHDRRSWTAPMLQAVLSQLKKDGYQVTTLTEMLKLTKE

SEQ ID NO: 10455 - DNA, 882 bp, Muscodor strobelii
  misc_feature: SGI cDNA ID NO. 563320
  misc_feature: Encodes the peptide sequence at SEQ ID NO 10456
atgtcgatcgcacgggccttaaccacccggcgcaataagcagcagtctgcagatatgcatagcatacctcatcggagcaacacgacagcaaagggccatgcaagcattagctccattcgcaacaagatctctagcccgatggagttgacgcacacgacaaatatgcttgcctacaacgctccggatttgtaccctaagcctgcgagttcgccaagtcgcacatcaagctccgatgatgatgctgcatcagaaagtccgagcactacactttcttcaccacctaccagccccgaaatgcccgctgaagagagcttatctgggtcgccagaaccaaatcatctgtcttgttatttcactgctccgactcaaaagctgcaggctcccccaaaggtgcaagaggccccggttattcctcaacggtctccatcacacaccaaaaaggcgtcattggacaacatggcaaacaaatacgcacgtctctctaaccagtcgagcaagacagtttccactcaggccagcttttcgttatcgcgctctccttcgacttcgacaactgcaacatcaatgacatctgggtcatatgctcagaaatcgccgctaccggtaatttctacggacgtcactccattatctccgccgcgatttcgcagacctactaatgcggagtctcatccattcggtcaagagctggctaaggtttccgagctggcagaagagcttggtgtgaaggacaagcttcaggacgctgaagatgaagcgcaacaactcatcgcccagggtcttttcagattcacacctcaagattatctttccgaaatacaaggtttatattcgaccttcttcaagcctgaacactctcagccacaagctgtatggatctaa

SEQ ID NO: 10456 - protein, 293 aa, Muscodor strobelii
  misc_feature: SGI Peptide ID NO. 563320
  misc_feature (1)..(293): NCBI GI: 39945622 Blast Desc: MGG_04793 [Magnaporthe grisea 70-15] gi|145021341|gb|EDK05470.1| MGG_04793 [Magnaporthe grisea 70-15]
  misc_feature (2)..(293): NCBI GI: 164427768 Blast Desc: NCU02730 [Neurospora crassa OR74A] gi|157071876|gb|EAA35879.2| [Neurospora crassa OR74A]
  misc_feature (1)..(293): NCBI GI: 171680247 Blast Desc: protein product [Podospora anserina] gi|170939750|emb|CAP64976.1| protein product [Podospora anserina]
  misc_feature (1)..(293): NCBI GI: 256735272 Blast Desc: NECHADRAFT_98838 [Nectria haematococca mpVI 77-13-4]
  misc_feature (1)..(293): NCBI GI: 46107134 Blast Desc: FG00450.1 [Gibberella zeae PH-1]
  misc_feature (2)..(293): NCBI GI: 261357546 Blast Desc: VDBG_06083 [Verticillium albo-atrum VaMs.102]
  misc_feature (1)..(293): NCBI GI: 154313745 Blast Desc: BC1G_05722 [Botryotinia fuckeliana B05.10] gi|150849304|gb|EDN24497.1| BC1G_05722 [Botryotinia fuckeliana B05.10]
  misc_feature (1)..(293): NCBI GI: 156061511 Blast Desc: SS1G_02900 [Sclerotinia sclerotiorum 1980] gi|154700302|gb|EDO00041.1| SS1G_02900 [Sclerotinia sclerotiorum 1980]
  misc_feature (1)..(293): NCBI GI: 189203535 Blast Desc: conserved [Pyrenophora tritici-repentis Pt-1C-BFP] gi|187985202|gb|EDU50690.1| conserved [Pyrenophora tritici-repentis Pt-1C-BFP]
  misc_feature (1)..(156): NCBI GI: 116206970 Blast Desc: CHGG_02778 [Chaetomium globosum CBS 148.51] gi|88183375|gb|EAQ90843.1| CHGG_02778 [Chaetomium globosum CBS 148.51]
MSIARALTTRRNKQQSADMHSIPHRSNTTAKGHASISSIRNKISSPMELTHTTNMLAYNAPDLYPKPASSPSRTSSSDDDAASESPSTTLSSPPTSPEMPAEESLSGSPEPNHLSCYFTAPTQKLQAPPKVQEAPVIPQRSPSHTKKASLDNMANKYARLSNQSSKTVSTQASFSLSRSPSTSTTATSMTSGSYAQKSPLPVISTDVTPLSPPRFRRPTNAESHPFGQELAKVSELAEELGVKDKLQDAEDEAQQLIAQGLFRFTPQDYLSEIQGLYSTFFKPEHSQPQAVWI

SEQ ID NO: 10457 - DNA, 1599 bp, Muscodor strobelii
  misc_feature: SGI cDNA ID NO. 563321
  misc_feature: Encodes the peptide sequence at SEQ ID NO 10458
atgcccgattccatgatcacggccgccgcctgggtgcctagaggctttgcagctcctttcccctctagatacaatttcgacgaggaagagttccaaagaatagcagacctggccaagctgcgcctcgacgacgccaacgaagacctggaagaagcgcaagcagcgcaagcaacgcaggacgagagcgtacagaatggcctaaccgccactgatgggacacacaaacccgaaaagatcgacataaatgacgaagacctcaaggagtacgatctcgagcactacgacgacgatgaggatgatgttcaaggccagcgcatggacatgttcggaaacatcaagtcgctagcctactacgagtccaacaaagaagatccctacatcaccatacccgacgagcaagatcaggaggatgacgaccgggaggagctacaggtcctggccaccgacaacctgttattagccgcaaagctcgaggatgagcttgcgcatctcgaggtctacgtctacgaggacgaggccgacaatctgtacgtccatcacgatatcatgctgcccgccataccgctgtgcatcgagtggttagatatccccgtctccaagaccggtgtcgacaaagatgctactgccaacttcgtcgccatcggcaccatggatcccgatatcgaggtctgggacttggatacggtcgactgcatgtaccccaatgccatcttagggcagggtggaaatccacaagaccaggagaagcagaagaaaaagaaaaaggccaaaagggccaacgacgagtaccacgtggatgccgtcctgtcgctagcagccaaccgaaaacatagaaatttgctggcctcagcctcagcagacaagaccatcaaactctgggatctgcacaccgctaaatgcgcaaaatcctactcataccataccgacaaggtgtgctcattagcctggcacgccgtagagtcgacggtgttgctgagcggcagttatgacagaactgtcgtcgcctctgatatgcgcgcgccagaagcaaaggctcccagatggggagtagaaagcgatgtcgagaacgtcaggtgggatccccatgacccaaacttcttctacgtctctaccgagaacggcataatacactattacgacatccgcaacattccatcaaacccagccgcgagtaaagctacttggactctgcaggcccacgacgaatcgctgtcctcgttcgacctcaatactcacatacctggctacatggtcaccggatcaacagacaagacagtcaagctctggaacatacaacctacgggcccgaccatggtcgtgtcccgcaacttagacatcggccgcatattctcgactactttcgctccagacgccgaagtagccttccgtctcgcggtggccggaagtaaaggaaccatgcatgtctgggacaccagcactaatgctgccgtgcgacaagcatttgcgcacaaaatggcggacaagcctgaaggagatgtcaaggagcgagtagttggtgttgcggcggatgacgaaagctcggacgacgacgaagaggacgacgatgaggacagtggggattcgatggacgaggactga

SEQ ID NO: 10458 - protein, 532 aa, Muscodor strobelii
  misc_feature: SGI Peptide ID NO. 563321
  misc_feature (391)..(430): Pfam Id: PF00400 Pfam Desc: WD domain, G-beta repeat
  misc_feature (255)..(294): Pfam Id: PF00400 Pfam Desc: WD domain, G-beta repeat
  misc_feature (298)..(337): Pfam Id: PF00400 Pfam Desc: WD domain, G-beta repeat
  misc_feature (264)..(294): Pfam Id: PF00400 Pfam Desc: WD domain, G-beta repeat
  misc_feature (4)..(507): NCBI GI: 145614408 Blast Desc: MGG_04802 [Magnaporthe grisea 70-15] gi|145021340|gb|EDK05469.1| MGG_04802 [Magnaporthe grisea 70-15]
  misc_feature (4)..(532): NCBI GI: 256735273 Blast Desc: NECHADRAFT_74945 [Nectria haematococca mpVI 77-13-4]
  misc_feature (4)..(492): NCBI GI: 46107132 Blast Desc: FG00449.1 [Gibberella zeae PH-1]
  misc_feature (4)..(532): NCBI GI: 154313749 Blast Desc: BC1G_05724 [Botryotinia fuckeliana B05.10] gi|150849306|gb|EDN24499.1| BC1G_05724 [Botryotinia fuckeliana B05.10]
  misc_feature (4)..(507): NCBI GI: 171680249 Blast Desc: protein product [Podospora anserina] gi|170939751|emb|CAP64977.1| protein product [Podospora anserina]
  misc_feature (4)..(507): NCBI GI: 156061515 Blast Desc: SS1G_02902 [Sclerotinia sclerotiorum 1980] gi|154700304|gb|EDO00043.1| SS1G_02902 [Sclerotinia sclerotiorum 1980]
  misc_feature (4)..(507): NCBI GI: 85116766 Blast Desc: NCU02729 [Neurospora crassa OR74A] gi|28926917|gb|EAA35878.1| NCU02729 [Neurospora crassa OR74A]
  misc_feature (4)..(507): NCBI GI: 116206966 Blast Desc: CHGG_02776 [Chaetomium globosum CBS 148.51] gi|88183373|gb|EAQ90841.1| CHGG_02776 [Chaetomium globosum CBS 148.51]
  misc_feature (4)..(532): NCBI GI: 67516057 Blast Desc: AN0310.2 [Aspergillus nidulans FGSC A4] gi|40746560|gb|EAA65716.1| AN0310.2 [Aspergillus nidulans FGSC A4] gi|259489460|tpe|CBF89749.1| TPA: rRNA processing protein A4]
  misc_feature (4)..(515): NCBI GI: 189203537 Blast Desc: transducin family protein [Pyrenophora tritici-repentis Pt-1C-BFP] gi|187985203|gb|EDU50691.1| transducin family protein [Pyrenophora tritici-repentis
MPDSMITAAAWVPRGFAAPFPSRYNFDEEEFQRIADLAKLRLDDANEDLEEAQAAQATQDESVQNGLTATDGTHKPEKIDINDEDLKEYDLEHYDDDEDDVQGQRMDMFGNIKSLAYYESNKEDPYITIPDEQDQEDDDREELQVLATDNLLLAAKLEDELAHLEVYVYEDEADNLYVHHDIMLPAIPLCIEWLDIPVSKTGVDKDATANFVAIGTMDPDIEVWDLDTVDCMYPNAILGQGGNPQDQEKQKKKKKAKRANDEYHVDAVLSLAANRKHRNLLASASADKTIKLWDLHTAKCAKSYSYHTDKVCSLAWHAVESTVLLSGSYDRTVVASDMRAPEAKAPRWGVESDVENVRWDPHDPNFFYVSTENGIIHYYDIRNIPSNPAASKATWTLQAHDESLSSFDLNTHIPGYMVTGSTDKTVKLWNIQPTGPTMVVSRNLDIGRIFSTTFAPDAEVAFRLAVAGSKGTMHVWDTSTNAAVRQAFAHKMADKPEGDVKERVVGVAADDESSDDDEEDDDEDSGDSMDED

SEQ ID NO: 10459 - DNA, 3042 bp, Muscodor strobelii
  misc_feature: SGI EST ID NO. CUFF.24714.0
  misc_feature: Variant of the nucleotide sequence at SEQ ID NO 10457
agtcgcgatcgagcgccagctggtcctctttattcacctcgggctccgggccgtcgaactcgtgttgcttgggcgtggaggcgtagtgggagctcgcgcgaggtgtggagtcgcgagagtggtatggtttaggaaagcgactgttggatcgcgacgcattgctgcttcgattcgggagagaggagtatcgatcgtcggatcgtagcgggttgaagtccagcttgcgtcgcttggggctgaagtttccatcttcgcgatccattgtgaagagatagctacctcttgtttagttccttgtgtctttacactcctcccttcgacccatgcgaccaaggaactacaatatttagaggcggtcaggggtttaggctctcagcagttattgtactaaggtacttcagaggttacaggcgaaacatgcacgccccctacctaagccctggcggcggtcggtcaatcgggcggtgctaaggtactacagcttttatcgatagtgctgttggccccgctgaaatttggcaactcaaaaaatgttggaggggcagctctacttgtatctgcgatttgaggtacctacgattggacagtttcaagatcgggcttttgtagcttgatttgcaactacaaaggctcatagatactggttacatcgagaatcagccaaaatgcccgattccatgatcacggccgccgcctgggtgcctagaggctttgcagctcctttcccctctagatacaatttcgacgaggaagagttccaaagaatagcagacctggccaagctgcgcctcgacgacgccaacgaagacctggaagaagcgcaagcagcgcaagcaacgcaggacgagagcgtacagaatggcctaaccgccactgatgggacacacaaacccgaaaagatcgacataaatgacgaagacctcaaggagtacgatctcgagcactacgacgacgatgaggatgatgttcaaggccagcgcatggacatgttcggaaacatcaagtcgctagcctactacgagtccaacaaagaagatccctacatcaccatacccgacgagcaagatcaggaggatgacgaccgggaggagctacaggtcctggccaccgacaacctgttattagccgcaaagctcgaggatgagcttgcgcatctcgaggtctacgtctacgaggacgaggccgacaatctgtacgtccatcacgatatcatgctgcccgccataccgctgtgcatcgagtggttagatatccccgtctccaagaccggtgtcgacaaagatgctactgccaacttcgtcgccatcggcaccatggatcccgatatcgaggtctgggacttggatacggtcgactgcatgtaccccaatgccatcttagggcagggtggaaatccacaagaccaggagaagcagaagaaaaagaaaaaggccaaaagggccaacgacgagtaccacgtggatgccgtcctgtcgctagcagccaaccgaaaacatagaaatttgctggcctcagcctcagcagacaagaccatcaaactctgggatctgcacaccgctaaatgcgcaaaatcctactcataccataccgacaaggtgtgctcattagcctggcacgccgtagagtcgacggtgttgctgagcggcagttatgacagaactgtcgtcgcctctgatatgcgcgcgccagaagcaaaggctcccagatggggagtagaaagcgatgtcgagaacgtcaggtgggatccccatgacccaaacttcttctacgtctctaccgagaacggcataatacactattacgacatccgcaacattccatcaaacccagccgcgagtaaagctacttggactctgcaggcccacgacgaatcgctgtcctcgttcgacctcaatactcacatacctggctacatggtcaccggatcaacagacaagacagtcaagctctggaacatacaacctacgggcccgaccatggtcgtgtcccgcaacttagacatcggccgcatattctcgactactttcgctccagacgccgaagtagccttccgtctcgcggtggccggaagtaaaggaaccatgcatgtctgggacaccagcactaatgctgccgtgcgacaagcatttgcgcacaaaatggcggacaagcctgaaggagatgtcaaggagcgagtagttggtgttgcggcggatgacgaaagctcggacgacgacgaagaggacgacgatgaggacagtggggattcgatggacgaggactgaaaatttccaagttgcggacttcccttggttcagaccgggtaataagttgaggctcaaaacaaactacttgatcgacgcatcgcattgaaacccgggggtcatggtttgatgcgaccgggttcatctgtatcgtcgaatctctcctcagatgaacgatctgcgctgggctcaaatagccgagccacataggggacaaccggggctgctatgaatcaattataccacagttgaggatccggtgagcggattgatattccggagttgttacgacaattgatgatactctactatagatattggatggctttaaagttggctttgagagacacttttccaactgcagccagaattcgttaccacgccttgattcatgctttggatgattgattacgtgtaattgtgcagcagatataatagagtgggtaaaaataggccgtggacggtttcgtctccacgggcttcatgcgccgcctggacaaccacgagggtgttgtttggaagaaaatcactatcatgcaagaggaaagctccaaactccagtggatccgaagagaaggtatcataacgttatgtagatgcatcaaggatatttttgggtagtcatgatgccattacattcctccaagacagtcgaaatagcaggtggtcatcttgcatctaacggttgtgggttcgtagatgggccgtctcatccgccacaagttgcaacggtaactttagtagttggcgcggccgtcgcgtataaagaggctgaggcgggtgtgtcggcgtttttttg

SEQ ID NO: 10460 - DNA, 2997 bp, Muscodor strobelii
  misc_feature: SGI cDNA ID NO. 563322
  misc_feature: Encodes the peptide sequence at SEQ ID NO 10461
atggatcgcgaagatggaaacttcagccccaagcgacgcaagctggacttcaacccgctacgatccgacgatcgatactcctctctcccgaatcgaagcagcaatgcgtcgcgatccaacagtcgctttcctaaaccataccactctcgcgactccacacctcgcgcgagctcccactacgcctccacgcccaagcaacacgagttcgacggcccggagcccgaggtgaataaagaggaccagctggcgctcgatcgcgactggtacggcggcgacgaaactggcggtcacaccttcggcgacgacgcccacaatccctttggcgactatgatacatcatgggtcgagaagcagcagagggaggtcgacatggtcgagaagaaggccgggaggcacatggatgcgcgtcagctccagcggcagaaggacaacgacgcctgggagacgaaccgcatgctcacctctggtgtcgcccaacgccgcggcttgggagacgacttcgaagatgacgaagaggctacgcgcgtgcacttgctggtccacgacttgaaaccgccgttcctcgacggccggactgtcttcaccaagcagctggaaccggtacccgccgtgttagactaccagagcgatatggccgtgttcagccgcaaaggaagtcgtgttgtgaaggagcggagacagcagagggaacgccagcgtcaggctcaacaagctacaaacatggcaggcaccactcttggtaacctcatgggtgtgaaagaagaggatggcgacagtgctctgcccatcgctgctgaagatgaccagaccaagtctagcgaaaacaagttcagctctcacatgaagaagagcgacggggccagcaatttcagtcagagtaaaacattgaaggagcagagggagtttttaccggccttcgctgtgcgcgaagaattacttagagtcatcagggataatcaagtggtcatcgtcgtcggtgagacaggctctgggaaaaccacccagctcacacaattcttatacgaagacggatacggcaagcttgggatgataggctgcacacagcctcgtcgagtggccgcgatgagcgtagccaagcgagtggccgaagagatggaagtaaagctgggcagcaccgttggctacgctattcgatttgaagactgcacgagcaaggacaccgtcatcaaatacatgaccgacggtgtactgttgcgagagtctctaaacgaaagagacctggatcgatattcgtgcgtcatcatggacgaagcgcacgagcgagctctgaataccgacgtccttctggggttattcaacaagattttacagcgacgaaaggatctcaagcttattgtcacttcagctacgatgaactccaagagattctccgactttttcgggggtgcacccgagcttattatacccggcaggaccttccccgtggacatcatgttccaccgatccccagttgaggattatgtagaccaagcggttcaacaggttctttcaatccatgtttccatgggcgctggggatatcctcgtgttcatgactggccaggaagacatcgaatgtacctgcgagctggtccgggaacgcctcagcgcgctcaatgaccctccagaactaagcattttacctatatatagtcaaatgcctgctgatctacagtccaaaatctttgaccgcgcgccgcctggcgtgcgcaaatgtattgtggctacaaatatcgcagaaaccagtttgactgtcgacggcatcatgtacgtcgtcgacgccggatactcaaagctgaaagtttacaatccgcgaatgggcatggatacacttcaaatcacgccaatctctcaagccaatgccggtcagcgtgcaggtcgagccggcagaacaggtccagggcgagctttccgcctcttcacagagaaggcattcaaggatgaaatgtacattcagactattcctgagattcagcggacaaacttgagcaataccgtactgttgctcaaatctctaggcgtaagagatctcctcgacttcgatttcatggatccacccccgcaggataccataacaacgtccatgttcgacctatgggcactgggcggcctggacaacctaggtgaactgacagatctgggtgcaaaaatgaacgccttcccaatggacccatctctagcgaagctattaatcatgtcggaagagtatggttgcagcgaagaaatggtgacaatcgtatccatgctctctgttcctaacgtcttctaccggccaaaagaacgacaagaggagtccgatgccgcccgtgagaagttttttgttcccgaatccgatcatttgacttatctacacgtctactcacagtggaaatcaaacggcttctcagatggatggtgtacacgccactttttacacccaaaatctttacgcagggccaaggaaatccgagaccaactactggatatcatgaagatgcagaaaatggagatgatcagctgtggcacggactgggacatgatacggaaatgtatctgctctggatactaccaccaagctgcgaaagtgaagggaatcggtgaatatgtcaatctccggacatcagtcacagtacaacttcacccgaccagcgcactctacggtcttgggtttctcccagattacgtcgtgtaccacgagttgatccttacatcgaaagaatacatgtcgaccgtgacgtccgtcgacccacattggctcgcagaactcggcggtgtgttttactcagtgaaggagaaagggtattcggctcgtgagaaacgtatcacggagacggagttcaataggaagatggagatcgagactaagatggcggaggataagagacggcatgaggagaagctgaagatggaggaggagagagctacgaagaaaccggctagtgctgataaggcgaagaagattgtgcagtctggagctgtgaagaaacccgttattaagaggaagggaagggggttttga

SEQ ID NO: 10461 - protein, 998 aa, Muscodor strobelii
  misc_feature: SGI Peptide ID NO. 563322
  misc_feature (817)..(920): Pfam Id: PF07717 Pfam Desc: Domain of function (DUF1605)
  misc_feature (693)..(783): Pfam Id: PF04408 Pfam Desc: Helicase associated domain (HA2)
  misc_feature (538)..(632): Pfam Id: PF00271 Pfam Desc: Helicase conserved C-terminal domain
  misc_feature (700)..(783): Pfam Id: PF04408 Pfam Desc: Helicase associated domain (HA2)
  misc_feature (140)..(990): NCBI GI: 145255060 Blast Desc: An18g03910 [Aspergillus niger] gi|134084436|emb|CAK97428.1| protein product [Aspergillus niger]
  misc_feature (140)..(997): NCBI GI: 169771219 Blast Desc: [Aspergillus oryzae RIB40] gi|83767938|dbj|BAE58077.1| protein product [Aspergillus oryzae]
  misc_feature (140)..(997): NCBI GI: 238486248 Blast Desc: mRNA splicing factor RNA helicase (Prp16), [Aspergillus flavus NRRL3357] gi|220699241|gb|EED55580.1| mRNA splicing factor RNA helicase (Prp16), [Aspergillus flavus
  misc_feature (140)..(998): NCBI GI: 67527247 Blast Desc: AN4032.2 [Aspergillus nidulans FGSC A4] gi|40740313|gb|EAA59503.1| AN4032.2 [Aspergillus nidulans FGSC A4] gi|259481381|tpe|CBF74845.1| TPA: mRNA splicing factor RNA
  misc_feature (11)..(957): NCBI GI: 71020209 Blast Desc: UM04188.1 [Ustilago maydis 521] gi|46099959|gb|EAK85192.1| UM04188.1 [Ustilago maydis 521]
  misc_feature (23)..(998): NCBI GI: 58267576 Blast Desc: pre-mRNA splicing factor [Cryptococcus neoformans var. neoformans JEC21] gi|57227178|gb|AAW43637.1| pre-mRNA splicing factor, [Cryptococcus neoformans var. neoformans JEC21]
  misc_feature (23)..(998): NCBI GI: 134111987 Blast Desc: CNBE2430 [Cryptococcus neoformans var. neoformans B-3501A] gi|50258188|gb|EAL20882.1| CNBE2430 [Cryptococcus neoformans var. neoformans B-3501A]
  misc_feature (82)..(972): NCBI GI: 164656745 Blast Desc: MGL_3535 [Malassezia globosa CBS 7966] gi|159103391|gb|EDP42286.1| MGL_3535 [Malassezia globosa CBS 7966]
  misc_feature (78)..(984): NCBI GI: 169843671 Blast Desc: CC1G_12010 [Coprinopsis cinerea okayama7#130] gi|116510381|gb|EAU93276.1| CC1G_12010 [Coprinopsis cinerea okayama7#130]
  misc_feature (75)..(995): NCBI GI: 189235866 Blast Desc: : similar to pre-mRNA splicing factor ATP-dependent RNA helicase PRP16 [Tribolium castaneum] gi|270004535|gb|EFA00983.1| TcasGA2_TC003896 [Tribolium
MDREDGNFSPKRRKLDFNPLRSDDRYSSLPNRSSNASRSNSRFPKPYHSRDSTPRASSHYASTPKQHEFDGPEPEVNKEDQLALDRDWYGGDETGGHTFGDDAHNPFGDYDTSWVEKQQREVDMVEKKAGRHMDARQLQRQKDNDAWETNRMLTSGVAQRRGLGDDFEDDEEATRVHLLVHDLKPPFLDGRTVFTKQLEPVPAVLDYQSDMAVFSRKGSRVVKERRQQRERQRQAQQATNMAGTTLGNLMGVKEEDGDSALPIAAEDDQTKSSENKFSSHMKKSDGASNFSQSKTLKEQREFLPAFAVREELLRVIRDNQVVIVVGETGSGKTTQLTQFLYEDGYGKLGMIGCTQPRRVAAMSVAKRVAEEMEVKLGSTVGYAIRFEDCTSKDTVIKYMTDGVLLRESLNERDLDRYSCVIMDEAHERALNTDVLLGLFNKILQRRKDLKLIVTSATMNSKRFSDFFGGAPELIIPGRTFPVDIMFHRSPVEDYVDQAVQQVLSIHVSMGAGDILVFMTGQEDIECTCELVRERLSALNDPPELSILPIYSQMPADLQSKIFDRAPPGVRKCIVATNIAETSLTVDGIMYVVDAGYSKLKVYNPRMGMDTLQITPISQANAGQRAGRAGRTGPGRAFRLFTEKAFKDEMYIQTIPEIQRTNLSNTVLLLKSLGVRDLLDFDFMDPPPQDTITTSMFDLWALGGLDNLGELTDLGAKMNAFPMDPSLAKLLIMSEEYGCSEEMVTIVSMLSVPNVFYRPKERQEESDAAREKFFVPESDHLTYLHVYSQWKSNGFSDGWCTRHFLHPKSLRRAKEIRDQLLDIMKMQKMEMISCGTDWDMIRKCICSGYYHQAAKVKGIGEYVNLRTSVTVQLHPTSALYGLGFLPDYVVYHELILTSKEYMSTVTSVDPHWLAELGGVFYSVKEKGYSAREKRITETEFNRKMEIETKMAEDKRRHEEKLKMEEERATKKPASADKAKKIVQSGAVKKPVIKRKGRGF

SEQ ID NO: 10462 - DNA, 3042 bp, Muscodor strobelii
  misc_feature: SGI EST ID NO. CUFF.24714.0
  misc_feature: Variant of the nucleotide sequence at SEQ ID NO 10460
caaaaaaacgccgacacacccgcctcagcctctttatacgcgacggccgcgccaactactaaagttaccgttgcaacttgtggcggatgagacggcccatctacgaacccacaaccgttagatgcaagatgaccacctgctatttcgactgtcttggaggaatgtaatggcatcatgactacccaaaaatatccttgatgcatctacataacgttatgataccttctcttcggatccactggagtttggagctttcctcttgcatgatagtgattttcttccaaacaacaccctcgtggttgtccaggcggcgcatgaagcccgtggagacgaaaccgtccacggcctatttttacccactctattatatctgctgcacaattacacgtaatcaatcatccaaagcatgaatcaaggcgtggtaacgaattctggctgcagttggaaaagtgtctctcaaagccaactttaaagccatccaatatctatagtagagtatcatcaattgtcgtaacaactccggaatatcaatccgctcaccggatcctcaactgtggtataattgattcatagcagccccggttgtcccctatgtggctcggctatttgagcccagcgcagatcgttcatctgaggagagattcgacgatacagatgaacccggtcgcatcaaaccatgacccccgggtttcaatgcgatgcgtcgatcaagtagtttgttttgagcctcaacttattacccggtctgaaccaagggaagtccgcaacttggaaattttcagtcctcgtccatcgaatccccactgtcctcatcgtcgtcctcttcgtcgtcgtccgagctttcgtcatccgccgcaacaccaactactcgctccttgacatctccttcaggcttgtccgccattttgtgcgcaaatgcttgtcgcacggcagcattagtgctggtgtcccagacatgcatggttcctttacttccggccaccgcgagacggaaggctacttcggcgtctggagcgaaagtagtcgagaatatgcggccgatgtctaagttgcgggacacgaccatggtcgggcccgtaggttgtatgttccagagcttgactgtcttgtctgttgatccggtgaccatgtagccaggtatgtgagtattgaggtcgaacgaggacagcgattcgtcgtgggcctgcagagtccaagtagctttactcgcggctgggtttgatggaatgttgcggatgtcgtaatagtgtattatgccgttctcggtagagacgtagaagaagtttgggtcatggggatcccacctgacgttctcgacatcgctttctactccccatctgggagcctttgcttctggcgcgcgcatatcagaggcgacgacagttctgtcataactgccgctcagcaacaccgtcgactctacggcgtgccaggctaatgagcacaccttgtcggtatggtatgagtaggattttgcgcatttagcggtgtgcagatcccagagtttgatggtcttgtctgctgaggctgaggccagcaaatttctatgttttcggttggctgctagcgacaggacggcatccacgtggtactcgtcgttggcccttttggcctttttctttttcttctgcttctcctggtcttgtggatttccaccctgccctaagatggcattggggtacatgcagtcgaccgtatccaagtcccagacctcgatatcgggatccatggtgccgatggcgacgaagttggcagtagcatctttgtcgacaccggtcttggagacggggatatctaaccactcgatgcacagcggtatggcgggcagcatgatatcgtgatggacgtacagattgtcggcctcgtcctcgtagacgtagacctcgagatgcgcaagctcatcctcgagctttgcggctaataacaggttgtcggtggccaggacctgtagctcctcccggtcgtcatcctcctgatcttgctcgtcgggtatggtgatgtagggatcttctttgttggactcgtagtaggctagcgacttgatgtttccgaacatgtccatgcgctggccttgaacatcatcctcatcgtcgtcgtagtgctcgagatcgtactccttgaggtcttcgtcatttatgtcgatcttttcgggtttgtgtgtcccatcagtggcggttaggccattctgtacgctctcgtcctgcgttgcttgcgctgcttgcgcttcttccaggtcttcgttggcgtcgtcgaggcgcagcttggccaggtctgctattctttggaactcttcctcgtcgaaattgtatctagaggggaaaggagctgcaaagcctctaggcacccaggcggcggccgtgatcatggaatcgggcattttggctgattctcgatgtaaccagtatctatgagcctttgtagttgcaaatcaagctacaaaagcccgatcttgaaactgtccaatcgtaggtacctcaaatcgcagatacaagtagagctgcccctccaacattttttgagttgccaaatttcagcggggccaacagcactatcgataaaagctgtagtaccttagcaccgcccgattgaccgaccgccgccagggcttaggtagggggcgtgcatgtttcgcctgtaacctctgaagtaccttagtacaataactgctgagagcctaaacccctgaccgcctctaaatattgtagttccttggtcgcatgggtcgaagggaggagtgtaaagacacaaggaactaaacaagaggtagctatctcttcacaatggatcgcgaagatggaaacttcagccccaagcgacgcaagctggacttcaacccgctacgatccgacgatcgatactcctctctcccgaatcgaagcagcaatgcgtcgcgatccaacagtcgctttcctaaaccataccactctcgcgactccacacctcgcgcgagctcccactacgcctccacgcccaagcaacacgagttcgacggcccggagcccgaggtgaataaagaggaccagctggcgctcgatcgcgact

SEQ ID NO: 10463 - DNA, 1062 bp, Muscodor strobelii
  misc_feature: SGI cDNA ID NO. 563323
  misc_feature: Encodes the peptide sequence at SEQ ID NO 10464
atggaaacgacggcaccagaggagaatcctttccaacccatagtcttccgtggcaagaaacgtaaatcctaccgccagcgcccagacacaagtacagacacaccatcactcgatgcgacaagtcctgtcccagacgccccaataccacaaaatgccgacgcagcaacgcaagccgaagacgactcatcgacatccatagccacagccttgcgcctacgtaacgcgcgcaagtcaaagctcggcggtgtgacattcggcgtcgataaaccagcccatctagacgcagaagaaggcagcaacgacctcgacgaactaagccagatgatagccgaggaggagcaaaaggctatggagcggtccgtcgtagcggccaataagcgcttcgcgccacagacggggctgtcgggcgatatagtgaacaaacacatggaggaatatatagaagccgaactcgctaggcgccacggcgcttcctccgcaaacccatcctctgacattttgaacaacccaaattcagcgaatagagctgatgagaaaggaacagggactgccgtgacgggcaagttgttcgaagtcgatctcggagaggaagtcaggaatcgaaacgaactcatgaccgatcgcgcgaggcgcaagatggctggtgaggaaatcgaagacgaggatgctactactgcgagaccgaagaaagtccgcctgggtaaggatggaaaggtctataggccgaggaataggagggatagcgatgcggttaagcgggatgcgcttgtcgatgagattctgagggagaatagactggacgtatacgaatcccctacgccccaacccctcgacgacgaggccgccggcgacgcagacgagcgtattgccgaggaattccggcgcgagttcctggacgctatggcggagaagcagagacggaagaaacctgttggtcccccggctaaaccgggcgctaagaaggacgaggaagttctcaagggccccaagctaggcgggagcaggaatgcgagagcggcgatgcgggatttgttgctgaagcagcaggaaggcaggaagtag

SEQ ID NO: 10464 - protein, 353 aa, Muscodor strobelii
  misc_feature: SGI Peptide ID NO. 563323
  misc_feature (1)..(349): NCBI GI: 116206972 Blast Desc: CHGG_02779 [Chaetomium globosum CBS 148.51] gi|88183376|gb|EAQ90844.1| CHGG_02779 [Chaetomium globosum CBS 148.51]
  misc_feature (1)..(349): NCBI GI: 171680245 Blast Desc: protein product [Podospora anserina] gi|170939749|emb|CAP64975.1| protein product [Podospora anserina]
  misc_feature (1)..(343): NCBI GI: 256734560 Blast Desc: NECHADRAFT_74947 [Nectria haematococca mpVI 77-13-4]
  misc_feature (15)..(353): NCBI GI: 85116774 Blast Desc: NCU02731 [Neurospora crassa OR74A] gi|28926919|gb|EAA35880.1| [Neurospora crassa OR74A]
  misc_feature (1)..(343): NCBI GI: 46107053 Blast Desc: FG00446.1 [Gibberella zeae PH-1]
  misc_feature (4)..(347): NCBI GI: 156036348 Blast Desc: SS1G_12863 [Sclerotinia sclerotiorum 1980] gi|154698268|gb|EDN98006.1| SS1G_12863 [Sclerotinia sclerotiorum 1980]
  misc_feature (13)..(347): NCBI GI: 154291077 Blast Desc: BC1G_15426 [Botryotinia fuckeliana B05.10] gi|150847116|gb|EDN22309.1| BC1G_15426 [Botryotinia fuckeliana B05.10]
  misc_feature (3)..(348): NCBI GI: 145614396 Blast Desc: MGG_04822 [Magnaporthe grisea 70-15] gi|145021328|gb|EDK05457.1| MGG_04822 [Magnaporthe grisea 70-15]
  misc_feature (1)..(343): NCBI GI: 225563093 Blast Desc: conserved [Ajellomyces capsulatus G186AR]
  misc_feature (1)..(349): NCBI GI: 154281453 Blast Desc: [Ajellomyces capsulatus NAm1] gi|150411718|gb|EDN07106.1| [Ajellomyces capsulatus NAm1]
METTAPEENPFQPIVFRGKKRKSYRQRPDTSTDTPSLDATSPVPDAPIPQNADAATQAEDDSSTSIATALRLRNARKSKLGGVTFGVDKPAHLDAEEGSNDLDELSQMIAEEEQKAMERSVVAANKRFAPQTGLSGDIVNKHMEEYIEAELARRHGASSANPSSDILNNPNSANRADEKGTGTAVTGKLFEVDLGEEVRNRNELMTDRARRKMAGEEIEDEDATTARPKKVRLGKDGKVYRPRNRRDSDAVKRDALVDEILRENRLDVYESPTPQPLDDEAAGDADERIAEEFRREFLDAMAEKQRRKKPVGPPAKPGAKKDEEVLKGPKLGGSRNARAAMRDLLLKQQEGRK

SEQ ID NO: 10465 - DNA, 4028 bp, Muscodor strobelii
  misc_feature: SGI EST ID NO. CUFF.24746.1
  misc_feature: Variant of the nucleotide sequence at SEQ ID NO 10463
ccgtgatatcttcatttacaacaaaacatcactgaacgaccactctgatctacggcgagcctcgctgcggcaaaggccaacatggaaacgacggcaccagaggagaatcctttccaacccatagtcttccgtggcaagaaacgtaaatcctaccgccagcgcccagacacaagtacagacacaccatcactcgatgcgacaagtcctgtcccagacgccccaataccacaaaatgccgacgcagcaacgcaagccgaagacgactcatcgacatccatagccacagccttgcgcctacgtaacgcgcgcaagtcaaagctcggcggtgtgacattcggcgtcgataaaccagcccatctagacgcagaagaaggcagcaacgacctcgacgaactaagccagatgatagccgaggaggagcaaaaggctatggagcggtccgtcgtagcggccaataagcgcttcgcgccacagacggggctgtcgggcgatatagtgaacaaacacatggaggaatatatagaagccgaactcgctaggcgccacggcgcttcctccgcaaacccatcctctgacattttgaacaacccaaattcagcgaatagagctgatgagaaaggaacagggactgccgtgacgggcaagttgttcgaagtcgatctcggagaggaagtcaggaatcgaaacgaactcatgaccgatcgcgcgaggcgcaagatggctggtgaggaaatcgaagacgaggatgctactactgcgagaccgaagaaagtccgcctgggtaaggatggaaaggtctataggccgaggaataggagggatagcgatgcggttaagcgggatgcgcttgtcgatgagattctgagggagaatagactggacgtatacgaatcccctacgccccaacccctcgacgacgaggccgccggcgacgcagacgagcgtattgccgaggaattccggcgcgagttcctggacgctatggcggagaagcagagacggaagaaacctgttggtcccccggctaaaccgggcgctaagaaggacgaggaagttctcaagggccccaagctaggcgggagcaggaatgcgagagcggcgatgcgggatttgttgctgaagcagcaggaaggcaggaagtaggtggtgaacgatcggggaaatcagatgtgaagtgtccctcaccaggctgtctactggcgggactggaagaaattgaggagagtctggttcatgtgaccactattttatgattcggtaactctggaagtcacgttctagaggtatttaatcctatatatatactgatgaagatacccaacaacatacaagcctgcctaggtgcacatccatatcaaaacccccttcccttcctcttaataacgggtttcttcacagctccagactgcacaatcttcttcgccttatcagcactagccggtttcttcgtagctctctcctcctccatcttcagcttctcctcatgccgtctcttatcctccgccatcttagtctcgatctccatcttcctattgaactccgtctccgtgatacgtttctcacgagccgaataccctttctccttcactgagtaaaacacaccgccgagttctgcgagccaatgtgggtcgacggacgtcacggtcgacatgtattctttcgatgtaaggatcaactcgtggtacacgacgtaatctgggagaaacccaagaccgtagagtgcgctggtcgggtgaagttgtactgtgactgatgtccggagattgacatattcaccgattcccttcactttcgcagcttggtggtagtatccagagcagatacatttccgtatcatgtcccagtccgtgccacagctgatcatctccattttctgcatcttcatgatatccagtagttggtctcggatttccttggccctgcgtaaagattttgggtgtaaaaagtggcgtgtacaccatccatctgagaagccgtttgatttccactgtgagtagacgtgtagataagtcaaatgatcggattcgggaacaaaaaacttctcacgggcggcatcggactcctcttgtcgttcttttggccggtagaagacgttaggaacagagagcatggatacgattgtcaccatttcttcgctgcaaccatactcttccgacatgattaatagcttcgctagagatgggtccattgggaaggcgttcatttttgcacccagatctgtcagttcacctaggttgtccaggccgcccagtgcccataggtcgaacatggacgttgttatggtatcctgcgggggtggatccatgaaatcgaagtcgaggagatctcttacgcctagagatttgagcaacagtacggtattgctcaagtttgtccgctgaatctcaggaatagtctgaatgtacatttcatccttgaatgccttctctgtgaagaggcggaaagctcgccctggacctgttctgccggctcgacctgcacgctgaccggcattggcttgagagattggcgtgatttgaagtgtatccatgcccattcgcggattgtaaactttcagctttgagtatccggcgtcgacgacgtacatgatgccgtcgacagtcaaactggtttctgcgatatttgtagccacaatacatttgcgcacgccaggcggcgcgcggtcaaagattttggactgtagatcagcaggcatttgactatatataggtaaaatgcttagttctggagggtcattgagcgcgctgaggcgttcccggaccagctcgcaggtacattcgatgtcttcctggccagtcatgaacacgaggatatccccagcgcccatggaaacatggattgaaagaacctgttgaaccgcttggtctacataatcctcaactggggatcggtggaacatgatgtccacggggaaggtcctgccgggtataataagctcgggtgcacccccgaaaaagtcggagaatctcttggagttcatcgtagctgaagtgacaataagcttgagatcctttcgtcgctgtaaaatcttgttgaataaccccagaaggacgtcggtattcagagctcgctcgtgcgcttcgtccatgatgacgcacgaatatcgatccaggtctctttcgtttagagactctcgcaacagtacaccgtcggtcatgtatttgatgacggtgtccttgctcgtgcagtcttcaaatcgaatagcgtagccaacggtgctgcccagctttacttccatctcttcggccactcgcttggctacgctcatcgcggccactcgacgaggctgtgtgcagcctatcatcccaagcttgccgtatccgtcttcgtataagaattgtgtgagctgggtggttttcccagagcctgtctcaccgacgacgatgaccacttgattatccctgatgactctaagtaattcttcgcgcacagcgaaggccggtaaaaactccctctgctccttcaatgttttactctgactgaaattgctggccccgtcgctcttcttcatgtgagagctgaacttgttttcgctagacttggtctggtcatcttcagcagcgatgggcagagcactgtcgccatcctcttctttcacacccatgaggttaccaagagtggtgcctgccatgtttgtagcttgttgagcctgacgctggcgttccctctgctgtctccgctccttcacaacacgacttcctttgcggctgaacacggccatatcgctctggtagtctaacacggcgggtaccggttccagctgcttggtgaagacagtccggccgtcgaggaacggcggtttcaagtcgtggaccagcaagtgcacgcgcgtagcctcttcgtcatcttcgaagtcgtctcccaagccgcggcgttgggcgacaccagaggtgagcatgcggttcgtctcccaggcgtcgttgtccttctgccgctggagctgacgcgcatccatgtgcctcccggccttcttctcgaccatgtcgacctccctctgctgcttctcgacccatgatgtatcatagtcg

SEQ ID NO: 10466 - DNA, 288 bp, Muscodor strobelii
  misc_feature: SGI cDNA ID NO. 563324
  misc_feature: Encodes the peptide sequence at SEQ ID NO 10467
atggcacatgtcatgtctcagagaatttatttcctggtccacggccaggtccaaggtgtcaacttccgcaatttcacccagagaaaggccaccgagctcaaggtaacaggatggtgtcgaaatactgaaaatgaaaaggtggaaggagaggcacaaggcgacgaagacagcatcaagcaattcctcaaggctattgatgagggtccgcgccttgcccgcgtagtcaagctggataaagaggctcgcgatatccaagagggcgagacgagtttcgaggtgcgccactga

SEQ ID NO: 10467 - protein, 95 aa, Muscodor strobelii
  misc_feature: SGI Peptide ID NO. 563324
  misc_feature (1)..(94): Pfam Id: PF00708 Pfam Desc: Acylphosphatase
  misc_feature (13)..(61): Pfam Id: PF00708 Pfam Desc: Acylphosphatase
  misc_feature (5)..(94): NCBI GI: 171680215 Blast Desc: protein product [Podospora anserina] gi|170939734|emb|CAP64960.1| protein product [Podospora anserina]
  misc_feature (5)..(93): NCBI GI: 154281619 Blast Desc: [Ajellomyces capsulatus NAm1] gi|150411801|gb|EDN07189.1| [Ajellomyces capsulatus NAm1]
  misc_feature (5)..(93): NCBI GI: 226282589 Blast Desc: PAAG_01076 [Paracoccidioides brasiliensis Pb01]
  misc_feature (8)..(94): NCBI GI: 212528928 Blast Desc: acylphosphatase family protein [Penicillium marneffei ATCC 18224] gi|210074019|gb|EEA28106.1| acylphosphatase family protein [Penicillium marneffei ATCC 18224]
  misc_feature (6)..(94): NCBI GI: 238487562 Blast Desc: acylphosphatase, [Aspergillus flavus NRRL3357] gi|220699898|gb|EED56237.1| acylphosphatase, [Aspergillus flavus NRRL3357]
  misc_feature (5)..(93): NCBI GI: 225563180 Blast Desc: HCBG_00914 [Ajellomyces capsulatus G186AR] gi|240275758|gb|EER39271.1| conserved [Ajellomyces capsulatus H143]
  misc_feature (5)..(93): NCBI GI: 240105748 Blast Desc: Acylphosphatase family protein [Coccidioides posadasii C735 delta SOWgp]
  misc_feature (8)..(94): NCBI GI: 242765095 Blast Desc: acylphosphatase family protein [Talaromyces stipitatus ATCC 10500] gi|218724101|gb|EED23518.1| acylphosphatase family protein [Talaromyces stipitatus ATCC 10500]
  misc_feature (5)..(93): NCBI GI: 119193346 Blast Desc: CIMG_01050 [Coccidioides immitis RS]
  misc_feature (16)..(94): NCBI GI: 121710156 Blast Desc: [Aspergillus clavatus NRRL 1] gi|119400844|gb|EAW11268.1| [Aspergillus clavatus NRRL 1]
  misc_feature (7)..(95): SWISSPROT Homolog: EC 3.6.1.7 Acylphosphatase
MAHVMSQRIYFLVHGQVQGVNFRNFTQRKATELKVTGWCRNTENEKVEGEAQGDEDSIKQFLKAIDEGPRLARVVKLDKEARDIQEGETSFEVRH

SEQ ID NO: 10468 - DNA, 3679 bp, Muscodor strobelii
  misc_feature: SGI EST ID NO. CUFF.24738.0
  misc_feature: Variant of the nucleotide sequence at SEQ ID NO 10466
tcttgatatcgaagaacaaacacaattcccattcggaacagcaaatggcacatgtcatgtctcagagaatttatttcctggtccacggccaggtccaaggtgtcaacttccgcaatttcacccagagaaaggccaccgagctcaaggtaacaggatggtgtcgaaatactgaaaatgaaaaggtggaaggagaggcacaaggcgacgaagacagcatcaagcaattcctcaaggctattgatgagggtccgcgccttgcccgcgtagtcaagctggataaagaggctcgcgatatccaagagggcgagacgagtttcgaggtgcgccactgatgtgcttcagcatcggactacctaggtagtgacgcagcaggaaactgagcatagaaaaataagggggtgtcaaatttcgcggtcttatttcactacctaagagcagttttcctagaggccattgatccaccaatccttgatcaagtaatgcatctcacggcactcagttgtgaaaacgagcacgatctagcctatggccactgagatccagacgcctaactccagttccttctattgcaatctctgtacagcatcccaatacgactcgctggatcctcaaaatgcaatctatactgaaaatgaaggcgaattcaaatgaatgttgaaccggcttgtaaatccgcacatgcggtgcaaaggcgcgtgaccgatgaactggaaacaccggattatgtctcgtccgatcctcggatcggaatcccatgcgacaaatggcgaggatattgtcaacggatgtgtgaatgtagagagatgcatcacgcaggcaaacaagagatgctcgcggtcagtgcattctcgaggctaatacctcaactctctggtgcacttccccaatgctgcggcctcggtagcctatcaatcttatgagcttaggagtatggcgcggaaaacgctattgtcgtccaagcggatgaggtcggaatccgtaacaggcgcgacatggtcagttggtgtgagatgtaatcaaacgcgagtgctaagccgctctgattgcaacgtactcagggtgtagatcgttgtggtggcaagtgctgtagatgtatctcgacctcgagttgtgatggttgggcagtaaaacccagtgagagtacaaagtatgctatgcctcttctcataataattaccaatgctttggaccggttgcgcttcagcgtatgtcaagctgaaatggtttgtatctacctccgatggttgcgcatcgagggcatttgcgacgcgccccttgctcctccatcaatatgttgacgcagtctcgacacaggccacagatacactccgtacatgcatacgaggcattgagcttgctggttcgttggcaggcagcacagtagatatgaacatcttgggatgagtaggtcggcgacgagtccgacagacctatggcatcaatgtggaagtttccaccgctctcagcgctttcaatagttgggaacggctcggggatctcttgggcaaaggagggtggagtgagggcttgctgcagcggagaggcctggtagccatggaagtgcggatggggaaagggcggcaaggaggccctgtgaacggagatgggggggagattgggggcacctgataagttagatcagggtctataagccgtgggtctagactcactggggtcctgtcctcgccgatgtcttccgtcgccgaagcggctgcatcgatcaagtcttcccagcgtttgccgtagtcggcggtaggctcgaccgagtgagccttgcggtctgccggcccgccgggcttgagacggtcgtcaccctggattctgcggagccagtccgcagtcgacccacgggacttctgctttttgtggccgcgcttggtgacggactgcttcctgggccgcgtaggaccaagcgggcgctgcagcggaggcaaggtagaggagcgtcccggcggcgagttagagaggatggagggcaacagctctcttcgactcgggccaggggtcaacaggggatagggatcattgcttgggtcggcaccatactggatgggaggcagctcaatggtcgagcggggaaatcgtctgccctccgtgtcagactgccagcccttttcacacacaaaccagtcagctgatgaccacgacaaagttgggggctgatgggtgacatacaggctcggattcccagtccgcctcaaacttgtgctgcccgcccaactgcgcgagggcggcggcggcactggcggcagggagcatcgaggcgccggcatgctcgtcggcaagccctggcgtggctggcgtactggactcgtcgcgcagaaatgcatggcggtcatgcggatagggctttgctgcgtcgatggcggccgggggtggtggcggtgggccagcggaggactgcccctgaggtcggtcggaaggcggggtattgatcatgagcaggaagctgtcctcggtcgccgggagcttagagatgtagtgctccgggtgcgccctgcggatatgctcctgcatggagcgatatctcttttcctgtcggccatagtattaatatcgtgtcgcttgagataatgaaaagaaacgattgagttgaattgaattgaattgctgtgttatacaccattggtgtgtagagcagtgcaatgccttccgtcgtgctgggcgggtgggtagcgcgctgtactacactggacacactgactgttgggtaggggctgcgctgcgtacagcatggtggaaatgggcaaaggtggacttacgccgatgcaccgcttgcgacagctggaaccatcttggttgcgcagcggacagacaacttcattgttgacatcggtgattgagaacgacgacgtcagtgaggttcgcggcggcatcttgaactcgggctgtgatccaaccccaccatgtgctgctgctgtgctggttgtgctgtccgccgccgctgggctcgaagcgggggggatttgtcgtgagactggttgatacgctgttgtcgataagagctaccgcgataccttccagcgcagggcgattgcggccgtcaagtgaagctcagactcgagcactggacgcgggattctagaaatgcaattgtaagtctgctgccgaggtagctccaagctcctgttcttgcggtgcaagtgttacatgaattgtttcgtgggcgccgtgggtaaggtagaggagttgagttggggagtaagtggagggcgactcgaggacagcgggtgtgcaggtaggcaaagagcatgaggtagggcctcagggagggggccaccagacgaagggggaggcgacctgacctcaagcttaagctccatggaacttcattcaaggccggaaacagcacctccagaccacattcaagcaatcgacagccacacgcttcaatgcgcactacgaccaagagacccagcagcctgactggaaacacggcactacgccatccgctgaggcccacggctgctgtctacctgcttcagctactaacatgtcgtaggcgcggccagctttaccactacctactaatgatcatctatccctaccatgtccttgtgctccgcctgtgtgtccacgtcgtatcggcgtggaggtgcgtagtcagacctcggggtgcatctatgcccaaagtcaaaccgctccagggttgggatccctaaggtcttgattaggcgcg

SEQ ID NO: 10469 - DNA, 1122 bp, Muscodor strobelii
  misc_feature: SGI cDNA ID NO. 563325
  misc_feature: Encodes the peptide sequence at SEQ ID NO 10470
atgccgccgcgaacctcactgacgtcgtcgttctcaatcaccgatgtcaacaatgaagttgtctgtccgctgcgcaaccaagatggttccagctgtcgcaagcggtgcatcggcgaaaagagatatcgctccatgcaggagcatatccgcagggcgcacccggagcactacatctctaagctcccggcgaccgaggacagcttcctgctcatgatcaataccccgccttccgaccgacctcaggggcagtcctccgctggcccaccgccaccacccccggccgccatcgacgcagcaaagccctatccgcatgaccgccatgcatttctgcgcgacgagtccagtacgccagccacgccagggcttgccgacgagcatgccggcgcctcgatgctccctgccgccagtgccgccgccgccctcgcgcagttgggcgggcagcacaagtttgaggcggactgggaatccgagcctgtatgtcacccatcagcccccaactttgtcgtgtatggtgccgacccaagcaatgatccctatcccctgttgacccctggcccgagtcgaagagagctgttgccctccatcctctctaactcgccgccgggacgctcctctaccttgcctccgctgcagcgcccgcttggtcctacgcggcccaggaagcagtccgtcaccaagcgcggccacaaaaagcagaagtcccgtgggtcgactgcggactggctccgcagaatccagggtgacgaccgtctcaagcccggcgggccggcagaccgcaaggctcactcggtcgagcctaccgccgactacggcaaacgctgggaagacttgatcgatgcagccgcttcggcgacggaagacatcggcgaggacaggaccccagtgagtctagacccacggcttatagaccctgatctaacttatcaggtgcccccaatctcccccccatctccgttcacagggcctccttgccgccctttccccatccgcacttccatggctaccaggcctctccgctgcagcaagccctcactccaccctcctttgcccaagagatccccgagccgttcccaactattgaaagcgctgagagcggtggaaacttccacattgatgccatag

SEQ ID NO: 10470 - protein, 373 aa, Muscodor strobelii
  misc_feature: SGI Peptide ID NO. 563325
  misc_feature (1)..(316): NCBI GI: 171680231 Blast Desc: protein product [Podospora anserina] gi|170939742|emb|CAP64968.1| protein product [Podospora anserina]
  misc_feature (1)..(314): NCBI GI: 39945676 Blast Desc: MGG_04821 [Magnaporthe grisea 70-15] gi|145021329|gb|EDK05458.1| MGG_04821 [Magnaporthe grisea 70-15]
  misc_feature (1)..(295): NCBI GI: 256735274 Blast Desc: [Nectria haematococca mpVI 77-13-4]
  misc_feature (1)..(345): NCBI GI: 46107051 Blast Desc: FG00445.1 [Gibberella zeae PH-1]
  misc_feature (1)..(311): NCBI GI: 116206988 Blast Desc: CHGG_02787 [Chaetomium globosum CBS 148.51] gi|88183384|gb|EAQ90852.1| CHGG_02787 [Chaetomium globosum CBS 148.51]
  misc_feature (1)..(295): NCBI GI: 239610657 Blast Desc: transcription factor RfeD [Ajellomyces dermatitidis ER-3]
  misc_feature (1)..(295): NCBI GI: 261195156 Blast Desc: transcription factor RfeD [Ajellomyces dermatitidis SLH14081] gi|239587854|gb|EEQ70497.1| transcription factor RfeD [Ajellomyces dermatitidis SLH14081]
  misc_feature (1)..(286): NCBI GI: 255948424 Blast Desc: Pc22g09690 [Penicillium chrysogenum Wisconsin 54-1255] gi|211591996|emb|CAP98257.1| Pc22g09690 [Penicillium chrysogenum Wisconsin 54-1255]
  misc_feature (1)..(295): NCBI GI: 115399108 Blast Desc: ATEG_05965 [Aspergillus terreus NIH2624] gi|114192026|gb|EAU33726.1| ATEG_05965 [Aspergillus terreus NIH2624]
  misc_feature (1)..(295): NCBI GI: 212528950 Blast Desc: transcription factor RfeD, [Penicillium marneffei ATCC 18224] gi|210074030|gb|EEA28117.1| transcription factor RfeD, [Penicillium marneffei ATCC 18224]
MPPRTSLTSSFSITDVNNEVVCPLRNQDGSSCRKRCIGEKRYRSMQEHIRRAHPEHYISKLPATEDSFLLMINTPPSDRPQGQSSAGPPPPPPAAIDAAKPYPHDRHAFLRDESSTPATPGLADEHAGASMLPAASAAAALAQLGGQHKFEADWESEPVCHPSAPNFVVYGADPSNDPYPLLTPGPSRRELLPSILSNSPPGRSSTLPPLQRPLGPTRPRKQSVTKRGHKKQKSRGSTADWLRRIQGDDRLKPGGPADRKAHSVEPTADYGKRWEDLIDAAASATEDIGEDRTPVSLDPRLIDPDLTYQVPPISPPSPFTGPPCRPFPIRTSMATRPLRCSKPSLHPPLPKRSPSRSQLLKALRAVETSTLMP

SEQ ID NO: 10471 - DNA, 3407 bp, Muscodor strobelii
  misc_feature: SGI EST ID NO. CUFF.24739.1
  misc_feature: Variant of the nucleotide sequence at SEQ ID NO 10469
cgcgcctaatcaagaccttagggatcccaaccctggagcggtttgactttgggcatagatgcaccccgaggtctgactacgcacctccacgccgatacgacgtggacacacaggcggagcacaaggacatggtagggatagatgatcattagtaggtagtggtaaagctggccgcgcctacgacatgttagtagctgaagcaggtagacagcagccgtgggcctcagcggatggcgtagtgccgtgtttccagtcaggctgctgggtctcttggtcgtagtgcgcattgaagcgtgtggctgtcgattgcttgaatgtggtctggaggtgctgtttccggccttgaatgaagttccatggagcttaagcttgaggtcaggtcgcctcccccttcgtctggtggccccctccctgaggccctacctcatgctctttgcctacctgcacacccgctgtcctcgagtcgccctccacttactccccaactcaactcctctaccttacccacggcgcccacgaaacaattcatgtaacacttgcaccgcaagaacaggagcttggagctacctcggcagcagacttacaattgcatttctagaatcccgcgtccagtgctcgagtctgagcttcacttgacggccgcaatcgccctgcgctggaaggtatcgcggtagctcttatcgacaacagcgtatcaaccagtctcacgacaaatcccccccgcttcgagcccagcggcggcggacagcacaaccagcacagcagcagcacatggtggggttggatcacagcccgagttcaagatgccgccgcgaacctcactgacgtcgtcgttctcaatcaccgatgtcaacaatgaagttgtctgtccgctgcgcaaccaagatggttccagctgtcgcaagcggtgcatcggcgaaaagagatatcgctccatgcaggagcatatccgcagggcgcacccggagcactacatctctaagctcccggcgaccgaggacagcttcctgctcatgatcaataccccgccttccgaccgacctcaggggcagtcctccgctggcccaccgccaccacccccggccgccatcgacgcagcaaagccctatccgcatgaccgccatgcatttctgcgcgacgagtccagtacgccagccacgccagggcttgccgacgagcatgccggcgcctcgatgctccctgccgccagtgccgccgccgccctcgcgcagttgggcgggcagcacaagtttgaggcggactgggaatccgagcctggctggcagtctgacacggagggcagacgatttccccgctcgaccattgagctgcctcccatccagtatggtgccgacccaagcaatgatccctatcccctgttgacccctggcccgagtcgaagagagctgttgccctccatcctctctaactcgccgccgggacgctcctctaccttgcctccgctgcagcgcccgcttggtcctacgcggcccaggaagcagtccgtcaccaagcgcggccacaaaaagcagaagtcccgtgggtcgactgcggactggctccgcagaatccagggtgacgaccgtctcaagcccggcgggccggcagaccgcaaggctcactcggtcgagcctaccgccgactacggcaaacgctgggaagacttgatcgatgcagccgcttcggcgacggaagacatcggcgaggacaggaccccagtgagtctagacccacggcttatagaccctgatctaacttatcaggtgcccccaatctcccccccatctccgttcacagggcctccttgccgccctttccccatccgcacttccatggctaccaggcctctccgctgcagcaagccctcactccaccctcctttgcccaagagatccccgagccgttcccaactattgaaagcgctgagagcggtggaaacttccacattgatgccataggtctgtcggactcgtcgccgacctactcatcccaagatgttcatatctactgtgctgcctgccaacgaaccagcaagctcaatgcctcgtatgcatgtacggagtgtatctgtggcctgtgtcgagactgcgtcaacatattgatggaggagcaaggggcgcgtcgcaaatgccctcgatgcgcaaccatcggaggtagatacaaaccatttcagcttgacatacgctgaagcgcaaccggtccaaagcattggtaattattatgagaagaggcatagcatactttgtactctcactgggttttactgcccaaccatcacaactcgaggtcgagatacatctacagcacttgccaccacaacgatctacaccctgagtacgttgcaatcagagcggcttagcactcgcgtttgattacatctcacaccaactgaccatgtcgcgcctgttacggattccgacctcatccgcttggacgacaatagcgttttccgcgccatactcctaagctcataagattgataggctaccgaggccgcagcattggggaagtgcaccagagagttgaggtattagcctcgagaatgcactgaccgcgagcatctcttgtttgcctgcgtgatgcatctctctacattcacacatccgttgacaatatcctcgccatttgtcgcatgggattccgatccgaggatcggacgagacataatccggtgtttccagttcatcggtcacgcgcctttgcaccgcatgtgcggatttacaagccggttcaacattcatttgaattcgccttcattttcagtatagattgcattttgaggatccagcgagtcgtattgggatgctgtacagagattgcaatagaaggaactggagttaggcgtctggatctcagtggccataggctagatcgtgctcgttttcacaactgagtgccgtgagatgcattacttgatcaaggattggtggatcaatggcctctaggaaaactgctcttaggtagtgaaataagaccgcgaaatttgacacccccttatttttctatgctcagtttcctgctgcgtcactacctaggtagtccgatgctgaagcacatcagtggcgcacctcgaaactcgtctcgccctcttggatatcgcgagcctctttatccagcttgactacgcgggcaaggcgcggaccctcatcaatagccttgaggaattgcttgatgctgtcttcgtcgccttgtgcctctccttccacctaagaggtggttcaacagtctgatataaaatatacggaaggaattagaaacagaccttttcattttcagtatttcgacaccatcctgttaccttgagctcggtggcctttctctgggtgaaattgcggaagttgacacctgggttgacgtcagtcctggtggtctatgagctccattcgcacctatggggtagatgttaa

SEQ ID NO: 10472 - DNA, 1260 bp, Muscodor strobelii
  misc_feature: SGI cDNA ID NO. 563326
  misc_feature: Encodes the peptide sequence at SEQ ID NO 10473
atgccgccgcgaacctcactgacgtcgtcgttctcaatcaccgatgtcaacaatgaagttgtctgtccgctgcgcaaccaagatggttccagctgtcgcaagcggtgcatcggcgaaaagagatatcgctccatgcaggagcatatccgcagggcgcacccggagcactacatctctaagctcccggcgaccgaggacagcttcctgctcatgatcaataccccgccttccgaccgacctcaggggcagtcctccgctggcccaccgccaccacccccggccgccatcgacgcagcaaagccctatccgcatgaccgccatgcatttctgcgcgacgagtccagtacgccagccacgccagggcttgccgacgagcatgccggcgcctcgatgctccctgccgccagtgccgccgccgccctcgcgcagttgggcgggcagcacaagtttgaggcggactgggaatccgagcctggctggcagtctgacacggagggcagacgatttccccgctcgaccattgagctgcctcccatccagtatggtgccgacccaagcaatgatccctatcccctgttgacccctggcccgagtcgaagagagctgttgccctccatcctctctaactcgccgccgggacgctcctctaccttgcctccgctgcagcgcccgcttggtcctacgcggcccaggaagcagtccgtcaccaagcgcggccacaaaaagcagaagtcccgtgggtcgactgcggactggctccgcagaatccagggtgacgaccgtctcaagcccggcgggccggcagaccgcaaggctcactcggtcgagcctaccgccgactacggcaaacgctgggaagacttgatcgatgcagccgcttcggcgacggaagacatcggcgaggacaggaccccagcctctccgctgcagcaagccctcactccaccctcctttgcccaagagatccccgagccgttcccaactattgaaagcgctgagagcggtggaaacttccacattgatgccataggtctgtcggactcgtcgccgacctactcatcccaagatgttcatatctactgtgctgcctgccaacgaaccagcaagctcaatgcctcgtatgcatgtacggagtgtatctgtggcctgtgtcgagactgcgtcaacatattgatggaggagcaaggggcgcgtcgcaaatgccctcgatgcgcaaccatcggaggtagatacaaaccatttcagcttgacatacgctga

SEQ ID NO: 10473 - protein, 419 aa, Muscodor strobelii
  misc_feature: SGI Peptide ID NO. 563326
  misc_feature (1)..(419): NCBI GI: 39945676 Blast Desc: MGG_04821 [Magnaporthe grisea 70-15] gi|145021329|gb|EDK05458.1| MGG_04821 [Magnaporthe grisea 70-15]
  misc_feature (1)..(419): NCBI GI: 171680231 Blast Desc: protein product [Podospora anserina] gi|170939742|emb|CAP64968.1| protein product [Podospora anserina]
  misc_feature (1)..(419): NCBI GI: 46107051 Blast Desc: FG00445.1 [Gibberella zeae PH-1]
  misc_feature (1)..(419): NCBI GI: 116206988 Blast Desc: CHGG_02787 [Chaetomium globosum CBS 148.51] gi|88183384|gb|EAQ90852.1| CHGG_02787 [Chaetomium globosum CBS 148.51]
  misc_feature (1)..(419): NCBI GI: 261357549 Blast Desc: RfeD [Verticillium albo-atrum VaMs.102]
  misc_feature (131)..(419): NCBI GI: 156036354 Blast Desc: SS1G_12866 [Sclerotinia sclerotiorum 1980] gi|154698271|gb|EDN98009.1| SS1G_12866 [Sclerotinia sclerotiorum 1980]
  misc_feature (1)..(419): NCBI GI: 255948424 Blast Desc: Pc22g09690 [Penicillium chrysogenum Wisconsin 54-1255] gi|211591996|emb|CAP98257.1| Pc22g09690 [Penicillium chrysogenum Wisconsin 54-1255]
  misc_feature (1)..(419): NCBI GI: 212528950 Blast Desc: transcription factor RfeD, [Penicillium marneffei ATCC 18224] gi|210074030|gb|EEA28117.1| transcription factor RfeD, [Penicillium marneffei ATCC 18224]
  misc_feature (1)..(419): NCBI GI: 70989611 Blast Desc: transcription factor RfeD [Aspergillus fumigatus Af293] gi|66847286|gb|EAL87617.1| transcription factor RfeD, [Aspergillus fumigatus Af293] gi|159129062|gb|EDP54176.1| factor
  misc_feature (1)..(419): NCBI GI: 119193340 Blast Desc: CIMG_01047 [Coccidioides immitis RS]
MPPRTSLTSSFSITDVNNEVVCPLRNQDGSSCRKRCIGEKRYRSMQEHIRRAHPEHYISKLPATEDSFLLMINTPPSDRPQGQSSAGPPPPPPAAIDAAKPYPHDRHAFLRDESSTPATPGLADEHAGASMLPAASAAAALAQLGGQHKFEADWESEPGWQSDTEGRRFPRSTIELPPIQYGADPSNDPYPLLTPGPSRRELLPSILSNSPPGRSSTLPPLQRPLGPTRPRKQSVTKRGHKKQKSRGSTADWLRRIQGDDRLKPGGPADRKAHSVEPTADYGKRWEDLIDAAASATEDIGEDRTPASPLQQALTPPSFAQEIPEPFPTIESAESGGNFHIDAIGLSDSSPTYSSQDVHIYCAACQRTSKLNASYACTECICGLCRDCVNILMEEQGARRKCPRCATIGGRYKPFQLDIR

SEQ ID NO: 10474 - DNA, 3407 bp, Muscodor strobelii; identical to SEQ ID NO: 10471
  misc_feature: SGI EST ID NO. CUFF.24739.1
  misc_feature: Variant of the nucleotide sequence at SEQ ID NO 10472

SEQ ID NO: 10475 - DNA, 1656 bp, Muscodor strobelii
  misc_feature: SGI cDNA ID NO. 563327
  misc_feature: Reduced expression when VOC is produced
  misc_feature: Encodes the peptide sequence at SEQ ID NO 10476
atggccctcgttgtgaagcacctcaactcagatgcctccttccttctatcatttgagcccatcgtccccgaagccatcgcagactcggtaaattggcgtccttttaccattttattagatccgtggattagcggtccgtcgacggtcttccactctaagatatcaagctcaacacacatacaaccagcctgtatctcgtctctgagagagctatcacagcctccggacctcgtcattatcagtcagcataagagcgaccattgtaatgaagctacgcttcggcagttgcccgcaagtggtcccgacacgttgattctagcggagccagcgtctgcgcgcctgatcaaaagttggagatacttcaatccctccatggtccggacggttgaacgatgggaggatccaaggttgacaggaaagcagtccgttatcaggattcccgttccacccttatatcccggcgacagagagggagaggtcaccgtcgcattcattccacagaagcgtgacatcactggcacacatactgctatcggcatcacctatcggccgccgcctacgcgcggcgtagctgggcagtcaccagacttgaagctcatgacaccgccaacaacaccagaattccagcagagactcgccattgcacgcacaaacacagctactaatatggcaggcgatgacacatttctcttaccaccaacgccgcccatttccccgaactccctgcgatccgttcgctctgcttctcctctgaacccaatgcacgctctctacagccctagccttcgaccgtcaaccgcttatggggaggacaaccccatcgccgtgggtacttttggccacagaccgatttcgctcatcttttcgccgcacggcataccgtacgattctctagcttcatatgccacatcacacttggtcgcagaagcagccctgccgttaacggcgctccttcattgtatggacgaagtcgataatccctggtggatgggcggaaatgtctgcgcaggtgccccacatggttgtgagatcgcaaagagcctgggagctagagtctggattagcgcacatgacggtgagaaggacgtcaaggggcttgggacatcgatgctaaagactcgccgatgggagcaagaagagatagaacgcgccctacagtccggggatacccacggagaaagggagaagaaggactctgactcggcaagaggcaggccagaaaagaggaaaacggaagtcatgcgcctcaactctggtgacgagatggtcgtgttagcaacaggtagcgtgtggcgcaacgaggatcttccaccacgcccgagtcccgctgagagtagcattactcctacaccgacattattcaagatgacaccaaagaaattacaagagaaacgagcaccagagacgatgaccttacccaaagtacagaaagagatgtcaccgaagacatcgggcttctacaaagttctgaaaacgaaggacttgctgaggccgtcgccgaagcttgttctagaaccggagactccgaaaccgtttattcacgtcgtgccaacaccaggccggcgcacgaagactgccacgggatcccagatctctgacaaagcggcggaaacactggggatcgaccaagtgttgtcggagaatgagtcctgctag

SEQ ID NO: 10476 - protein, 551 aa, Muscodor strobelii
  misc_feature: SGI Peptide ID NO. 563327
  misc_feature (1)..(429): NCBI GI: 154291075 Blast Desc: BC1G_15425 [Botryotinia fuckeliana B05.10] gi|150847115|gb|EDN22308.1| BC1G_15425 [Botryotinia fuckeliana B05.10]
  misc_feature (1)..(428): NCBI GI: 156036350 Blast Desc: SS1G_12864 [Sclerotinia sclerotiorum 1980] gi|154698269|gb|EDN98007.1| SS1G_12864 [Sclerotinia sclerotiorum 1980]
  misc_feature (1)..(421): NCBI GI: 169618080 Blast Desc: SNOG_12228 [Phaeosphaeria nodorum SN15] gi|111059520|gb|EAT80640.1| SNOG_12228 [Phaeosphaeria nodorum SN15]
  misc_feature (1)..(421): NCBI GI: 189194591 Blast Desc: conserved [Pyrenophora tritici-repentis Pt-1C-BFP] gi|187979198|gb|EDU45824.1| conserved [Pyrenophora tritici-repentis Pt-1C-BFP]
  misc_feature (1)..(238): NCBI GI: 225681054 Blast Desc: [Paracoccidioides brasiliensis Pb03]
  misc_feature (1)..(185): NCBI GI: 226282586 Blast Desc: [Paracoccidioides brasiliensis Pb01]
  misc_feature (1)..(238): NCBI GI: 226292248 Blast Desc: [Paracoccidioides brasiliensis Pb18]
  misc_feature (283)..(388): NCBI GI: 225681054 Blast Desc: [Paracoccidioides brasiliensis Pb03]
  misc_feature (283)..(388): NCBI GI: 226282586 Blast Desc: [Paracoccidioides brasiliensis Pb01]
  misc_feature (283)..(388): NCBI GI: 226292248 Blast Desc: [Paracoccidioides brasiliensis Pb18]
  misc_feature: Useful for introducing or modulating the production of volatile compounds
MALVVKHLNSDASFLLSFEPIVPEAIADSVNWRPFTILLDPWISGPSTVFHSKISSSTHIQPACISSLRELSQPPDLVIISQHKSDHCNEATLRQLPASGPDTLILAEPASARLIKSWRYFNPSMVRTVERWEDPRLTGKQSVIRIPVPPLYPGDREGEVTVAFIPQKRDITGTHTAIGITYRPPPTRGVAGQSPDLKLMTPPTTPEFQQRLAIARTNTATNMAGDDTFLLPPTPPISPNSLRSVRSASPLNPMHALYSPSLRPSTAYGEDNPIAVGTFGHRPISLIFSPHGIPYDSLASYATSHLVAEAALPLTALLHCMDEVDNPWWMGGNVCAGAPHGCEIAKSLGARVWISAHDGEKDVKGLGTSMLKTRRWEQEEIERALQSGDTHGEREKKDSDSARGRPEKRKTEVMRLNSGDEMVVLATGSVWRNEDLPPRPSPAESSITPTPTLFKMTPKKLQEKRAPETMTLPKVQKEMSPKTSGFYKVLKTKDLLRPSPKLVLEPETPKPFIHVVPTPGRRTKTATGSQISDKAAETLGIDQVLSENESC

SEQ ID NO: 10477 - DNA, 4103 bp, Muscodor strobelii
  misc_feature: SGI EST ID NO. CUFF.24822.3
  misc_feature: Variant of the nucleotide sequence at SEQ ID NO 10475
tttgtttctgttttttgctgcaggccgactgccatctctcttttctcctcgccaatgcttccaaatattccatcccaagtctctaacatagcccacaggatttacacaattcctgatgctctgcacatctcgcaccttcttggtgtgacagtctaccaagaacttagcaatataccaccgctcattcaacaaggacgttgacaatattgattacaaccggcaatacaaccggggaactcttcaagatggccctcgttgtgaagcacctcaactcagatgcctccttccttctatcatttgagcccatcgtccccgaagccatcgcagactcggtaaattggcgtccttttaccattttattagatccgtggattagcggtccgtcgacggtcttccactctaagatatcaagctcaacacacatacaaccagcctgtatctcgtctctgagagagctatcacagcctccggacctcgtcattatcagtcagcataagagcgaccattgtaatgaagctacgcttcggcagttgcccgcaagtggtcccgacacgttgattctagcggagccagcgtctgcgcgcctgatcaaaagttggagatacttcaatccctccatggtccggacggttgaacgatgggaggatccaaggttgacaggaaagcagtccgttatcaggattcccgttccacccttatatcccggcgacagagagggagaggtcaccgtcgcattcattccacagaagcgtgacatcactggcacacatactgctatcggcatcacctatcggccgccgcctacgcgcggcgtagctgggcagtcaccagacttgaagctcatgacaccgccaacaacaccagaattccagcagagactcgccattgcacgcacaaacacagctactaatatggcaggcgatgacacatttctcttaccaccaacgccgcccatttccccgaactccctgcgatccgttcgctctgcttctcctctgaacccaatgcacgctctctacagccctagccttcgaccgtcaaccgcttatggggaggacaaccccatcgccgtgggtacttttggccacagaccgatttcgctcatcttttcgccgcacggcataccgtacgattctctagcttcatatgccacatcacacttggtcgcagaagcagccctgccgttaacggcgctccttcattgtatggacgaagtcgataatccctggtggatgggcggaaatgtctgcgcaggtgccccacatggttgtgagatcgcaaagagcctgggagctagagtctggattagcgcacatgacggtgagaaggacgtcaaggggcttgggacatcgatgctaaagactcgccgatgggagcaagaagagatagaacgcgccctacagtccggggatacccacggagaaagggagaagaaggactctgactcggcaagaggcaggccagaaaagaggaaaacggaagtcatgcgcctcaactctggtgacgagatggtcgtgttagcaacaggtagcgtgtggcgcaacgaggatcttccaccacgcccgagtcccgctgagagtagcattactcctacaccgacattattcaagatgacaccaaagaaattacaagagaaacgagcaccagagacgatgaccttacccaaagtacagaaagagatgtcaccgaagacatcgggcttctacaaagttctgaaaacgaaggacttgctgaggccgtcgccgaagcttgttctagaaccggagactccgaaaccgtttattcacgtcgtgccaacaccaggccggcgcacgaagactgccacgggatcccagatctctgacaaagcggcggaaacactggggatcgaccaagtgttgtcggagaatgagtcctgctagccgggttagcttagttgccaggaaggagagttatatatacaaacggcgttatagccatttcaatttagaaatgaaaaagggatgagagcaaggcacaacggttcacgagtttacgataccacatcggcgaaacagaatgagacggcgtcgggttcaatcaagttgatttacaccgggaaccctgaatatcagattaggggatgtgggaatgcctacgagctttcttatgagttgcccttcaagataataattgagcaaagaagatacctttacacataaacgcgtgatgtgtcacatcgtgctggagcatagagctaaattcatctacttcttgattttgcgcttatgaaggaatatgtcggagagcaaatacatcctatatatctaagatccattctcactctctaccatttcaatgtcacacagtaacatagacttggtcaatccttcattatctaccgtaacgagctttcgaatgaacgagtcttgggtatctcctaaggcgcccgcgcatcttacgcattttgcgtcgttctttatttctcttcgcctcatcacagtatacgaaatttgtctcagatgacattcttcccctcgtacatcctatatacccgcgctttgcaagtttacaccgacaccttatggctgtcgagctctttgagagacagctagtcatgatttgcagctctacttaagctgtttcagaatctcgaccaagaaatcctcaaagctcagagtgatgtagccatcgcgatcatcgtcatacttcttgaagacatccgtcatgcgcttgaggctgatgcaagcctgaacgaagaggtcgaagctcatgacgccttcgccgcgcttgtcgtaagtgtggaaaagcagatcgatgaagctggggctcaagcggtaacggaaggcaatcagggcgttggtgaattcgtccagactgatgttgccggaacggtcagtgtcaaaacgatcgaacagcgttcgccacgaagccaggaacgaccacaggccgcagaactcgtcgaagccgattgtgccagagcggtcgctgtcgaacattcggatcatcatgcgcactgtctgggggtcgaaggccgtccagtcaccgttgacgagcgctgccgaaagttcgcgctctgagagctggccggtgcctagtgaggtcttggtcagctaactcttacataatgccggtatgaaatatcaagtaattgaccggagatgcgcgccgagccaaaacatggatccggactcgtgcattctttcgcataatggcaaatgtactaatgcctgtgtagacgtgggcgcaatgtttgacacacgatccaggttcattcatccgagctaataaatagaagcaaagaaatacgacgcaccatctttgtccacagcgcgaaagagtggcaggagagtaggatcggcgccgccgtcctggggagcaggcgagggaggcggtctattggaagtcggaggacggttgtgagccgacgggcgcggacctgacgactggggcggaggcgacatgggcgactgatgatgcgaggcgtattgcgacgggcgtgcctgttcctgtcttcggcctgagtatgagtcgtggcgagactggctggggactgccgggggtggtttgctctggtagtgcgacgactgctccggtcttgagctgtgtttctgtaggcaaggaagtcaagagtcagttcggtttacgggagttgcaggtatgcgacaggtgtctggtgacgagtcatcttgtcgcgaggcgcggtgagattaggcagtgatggaggctacctgcacgaggctacgtacatgttccggctcggcgaacctgcgtgcgcaagaggtcagtggctagtccaaaagatcgacaaattgtcgaaatgtgtaactcggggcgtctcgaaacaggataccagttgaatggcaactgctggttggcggggtagggaatactccaggcaagggaagctactcactttgggagctcatcgggattgtacgatcggttgtaggccattttgctcgcgatgtcttctttcacaccggctcttgcaccttgaattgggcctttgaaaaagaaaccgaatatttcaggtggactgactttacacttgttcttcttgtcgagagattgaaaagggagaaaggttggtagtgtcaggagggagtcatggggagttgggctcagcaggtggattagagatt

SEQ ID NO: 10478 - DNA, 1146 bp, Muscodor strobelii
  misc_feature: SGI cDNA ID NO. 563328
  misc_feature: Encodes the peptide sequence at SEQ ID NO 10479
atgcatggtgctgcggctgacaacccgacacatcgtctgcgcccctccgacactccccctccaagccccgcctccctggtgcccccctttgtctcttacaagcctccatatgacactcattgccggagttatgttcatcaatctctaatccacctgctgagcccaactccccatgactccctcctgacactaccaacctttctcccttttcaatctctcgacaagaagaacaagtgtaaagtcagtccacctgaaatattcggtttctttttcaaaggcccaattcaaggtgcaagagccggtgtgaaagaagacatcgcgagcaaaatggcctacaaccgatcgtacaatcccgatgagctcccaaagttcgccgagccggaacataaacacagctcaagaccggagcagtcgtcgcactaccagagcaaaccacccccggcagtccccagccagtctcgccacgactcatactcaggccgaagacaggaacaggcacgcccgtcgcaatacgcctcgcatcatcagtcgcccatgtcgcctccgccccagtcgtcaggtccgcgcccgtcggctcacaaccgtcctccgacttccaatagaccgcctccctcgcctgctccccaggacggcggcgccgatcctactctcctgccactctttcgcgctgtggacaaagatggcaccggccagctctcagagcgcgaactttcggcagcgctcgtcaacggtgactggacggccttcgacccccagacagtgcgcatgatgatccgaatgttcgacagcgaccgctctggcacaatcggcttcgacgagttctgcggcctgtggtcgttcctggcttcgtggcgaacgctgttcgatcgttttgacactgaccgttccggcaacatcagtctggacgaattcaccaacgccctgattgccttccgttaccgcttgagccccagcttcatcgatctgcttttccacacttacgacaagcgcggcgaaggcgtcatgagcttcgacctcttcgttcaggcttgcatcagcctcaagcgcatgacggatgtcttcaagaagtatgacgatgatcgcgatggctacatcactctgagctttgaggatttcttggtcgagattctgaaacagcttaagtag

SEQ ID NO: 10479 - protein, 381 aa, Muscodor strobelii
  misc_feature: SGI Peptide ID NO. 563328
  misc_feature (253)..(281): Pfam Id: PF00036 Pfam Desc: EF hand
  misc_feature (283)..(311): Pfam Id: PF00036 Pfam Desc: EF hand
  misc_feature (110)..(381): NCBI GI: 116206986 Blast Desc: CHGG_02786 [Chaetomium globosum CBS 148.51] gi|88183383|gb|EAQ90851.1| CHGG_02786 [Chaetomium globosum CBS 148.51]
  misc_feature (110)..(381): NCBI GI: 85116804 Blast Desc: NCU02738 [Neurospora crassa OR74A] gi|28926926|gb|EAA35887.1| NCU02738 [Neurospora crassa OR74A]
  misc_feature (110)..(381): NCBI GI: 46106991 Blast Desc: FG00444.1 [Gibberella zeae PH-1]
  misc_feature (110)..(381): NCBI GI: 171680233 Blast Desc: protein product [Podospora anserina] gi|170939743|emb|CAP64969.1| protein product [Podospora anserina]
  misc_feature (110)..(381): NCBI GI: 256735275 Blast Desc: [Nectria haematococca mpVI 77-13-4]
  misc_feature (110)..(381): NCBI GI: 39945670 Blast Desc: MGG_04818 [Magnaporthe grisea 70-15] gi|145021331|gb|EDK05460.1| MGG_04818 [Magnaporthe grisea 70-15]
  misc_feature (181)..(379): NCBI GI: 156061487 Blast Desc: SS1G_02888 [Sclerotinia sclerotiorum 1980] gi|154700290|gb|EDO00029.1| SS1G_02888 [Sclerotinia sclerotiorum 1980]
  misc_feature (110)..(379): NCBI GI: 154313717 Blast Desc: BC1G_05708 [Botryotinia fuckeliana B05.10] gi|150849290|gb|EDN24483.1| BC1G_05708 [Botryotinia fuckeliana B05.10]
  misc_feature (110)..(378): NCBI GI: 119177433 Blast Desc: CIMG_07655 [Coccidioides immitis RS] gi|240107673|gb|EER25852.1| EF hand domain containing protein [Coccidioides posadasii C735 delta SOWgp]
  misc_feature (110)..(374): NCBI GI: 189204155 Blast Desc: peflin [Pyrenophora tritici-repentis Pt-1C-BFP] gi|187985512|gb|EDU51000.1| peflin [Pyrenophora tritici-repentis Pt-1C-BFP]
MHGAAADNPTHRLRPSDTPPPSPASLVPPFVSYKPPYDTHCRSYVHQSLIHLLSPTPHDSLLTLPTFLPFQSLDKKNKCKVSPPEIFGFFFKGPIQGARAGVKEDIASKMAYNRSYNPDELPKFAEPEHKHSSRPEQSSHYQSKPPPAVPSQSRHDSYSGRRQEQARPSQYASHHQSPMSPPPQSSGPRPSAHNRPPTSNRPPPSPAPQDGGADPTLLPLFRAVDKDGTGQLSERELSAALVNGDWTAFDPQTVRMMIRMFDSDRSGTIGFDEFCGLWSFLASWRTLFDRFDTDRSGNISLDEFTNALIAFRYRLSPSFIDLLFHTYDKRGEGVMSFDLFVQACISLKRMTDVFKKYDDDRDGYITLSFEDFLVEILKQLK

SEQ ID NO: 10480 - DNA, 4299 bp, Muscodor strobelii
  misc_feature: SGI EST ID NO. CUFF.24823.1
  misc_feature: Variant of the nucleotide sequence at SEQ ID NO 10478
gccggagttatgttcatcaatctctaatccacctgctgagcccaactccccatgactccctcctgacactaccaacctttctcccttttcaatctctcgacaagaagaacaagtgtaaagtcagtccacctgaaatattcggtttctttttcaaaggcccaattcaaggtgcaagagccggtgtgaaagaagacatcgcgagcaaaatggcctacaaccgatcgtacaatcccgatgagctcccaaagttcgccgagccggaacatgtacgtagcctcgtgcaggtagcctccatcactgcctaatctcaccgcgcctcgcgacaagatgactcgtcaccagacacctgtcgcatacctgcaactcccgtaaaccgaactgactcttgacttccttgcctacagaaacacagctcaagaccggagcagtcgtcgcactaccagagcaaaccacccccggcagtccccagccagtctcgccacgactcatactcaggccgaagacaggaacaggcacgcccgtcgcaatacgcctcgcatcatcagtcgcccatgtcgcctccgccccagtcgtcaggtccgcgcccgtcggctcacaaccgtcctccgacttccaatagaccgcctccctcgcctgctccccaggacggcggcgccgatcctactctcctgccactctttcgcgctgtggacaaagatggcaccggccagctctcagagcgcgaactttcggcagcgctcgtcaacggtgactggacggccttcgacccccagacagtgcgcatgatgatccgaatgttcgacagcgaccgctctggcacaatcggcttcgacgagttctgcggcctgtggtcgttcctggcttcgtggcgaacgctgttcgatcgttttgacactgaccgttccggcaacatcagtctggacgaattcaccaacgccctgattgccttccgttaccgcttgagccccagcttcatcgatctgcttttccacacttacgacaagcgcggcgaaggcgtcatgagcttcgacctcttcgttcaggcttgcatcagcctcaagcgcatgacggatgtcttcaagaagtatgacgatgatcgcgatggctacatcactctgagctttgaggatttcttggtcgagattctgaaacagcttaagtagagctgcaaatcatgactagctgtctctcaaagagctcgacagccataaggtgtcggtgtaaacttgcaaagcgcgggtatataggatgtacgaggggaagaatgtcatctgagacaaatttcgtatactgtgatgaggcgaagagaaataaagaacgacgcaaaatgcgtaagatgcgcgggcgccttaggagatacccaagactcgttcattcgaaagctcgttacggtagataatgaaggattgaccaagtctatgttactgtgtgacattgaaatggtagagagtgagaatggatcttagatatataggatgtatttgctctccgacatattccttcataagcgcaaaatcaagaagtagatgaatttagctctatgctccagcacgatgtgacacatcacgcgtttatgtgtaaaggtatcttctttgctcaattattatcttgaagggcaactcataagaaagctcgtaggcattcccacatcccctaatctgatattcagggttcccggtgtaaatcaacttgattgaacccgacgccgtctcattctgtttcgccgatgtggtatcgtaaactcgtgaaccgttgtgccttgctctcatccctttttcatttctaaattgaaatggctataacgccgtttgtatatataactctccttcctggcaactaagctaacccggctagcaggactcattctccgacaacacttggtcgatccccagtgtttccgccgctttgtcagagatctgggatcccgtggcagtcttcgtgcgccggcctggtgttggcacgacgtgaataaacggtttcggagtctccggttctagaacaagcttcggcgacggcctcagcaagtccttcgttttcagaactttgtagaagcccgatgtcttcggtgacatctctttctgtactttgggtaaggtcatcgtctctggtgctcgtttctcttgtaatttctttggtgtcatcttgaataatgtcggtgtaggagtaatgctactctcagcgggactcgggcgtggtggaagatcctcgttgcgccacacgctacctgttgctaacacgaccatctcgtcaccagagttgaggcgcatgacttccgttttcctcttttctggcctgcctcttgccgagtcagagtccttcttctccctttctccgtgggtatccccggactgtagggcgcgttctatctcttcttgctcccatcggcgagtctttagcatcgatgtcccaagccccttgacgtccttctcaccgtcatgtgcgctaatccagactctagctcccaggctctttgcgatctcacaaccatgtggggcacctgcgcagacatttccgcccatccaccagggattatcgacttcgtccatacaatgaaggagcgccgttaacggcagggctgcttctgcgaccaagtgtgatgtggcatatgaagctagagaatcgtacggtatgccgtgcggcgaaaagatgagcgaaatcggtctgtggccaaaagtacccacggcgatggggttgtcctccccataagcggttgacggtcgaaggctagggctgtagagagcgtgcattgggttcagaggagaagcagagcgaacggatcgcagggagttcggggaaatgggcggcgttggtggtaagagaaatgtgtcatcgcctgccatattagtagctgtgtttgtgcgtgcaatggcgagtctctgctggaattctggtgttgttggcggtgtcatgagcttcaagtctggtgactgcccagctacgccgcgcgtaggcggcggccgataggtgatgccgatagcagtatgtgtgccagtgatgtcacgcttctgtggaatgaatgcgacggtgacctctccctctctgtcgccgggatataagggtggaacgggaatcctgataacggactgctttcctgtcaaccttggatcctcccatcgttcaaccgtccggaccatggagggattgaagtatctccaacttttgatcaggcgcgcagacgctggctccgctagaatcaacgtgtcgggaccacttgcgggcaactgccgaagcgtagcttcattacaatggtcgctcttatgctgactgataatgacgaggtccggaggctgtgatagctctctcagagacgagatacaggctggttgtatgtgtgttgagcttgatatcttagagtggaagaccgtcgacggaccgctaatccacggatctaataaaatggtaaaaggacgccaatttaccgagtctgcgatggcttcggggacgatgggctcaaatgatagaaggaaggaggcatctgagttgaggtgcttcacaacgagggccatcttgaagagttccccggttgtattgccggttgtaatcaatattgtcaacgtccttgttgaatgagcggtggtatattgctaagttcttggtagactgtcacaccaagaaggtgcgagatgtgcagagcatcaggaattgtgtaaatcctgtgggctatgttagagacttgggatggaatatttggaagcattggcgaggagaaaagagagatggcagtcggcctgcagcaaaaaacagaaacaaaagaaagatacgagatgaggatgctcagagctgagacacagacatacgttaacctggattaaaagaacatatctcaaagtaccgtgtgcccgtgaacgattggtgacgttggatcctcaaaactgcgcaatctacctgaacgggcaggttgttgaatcataggcagcagatgagtgtaccaagtggatgaagtacagtaggtagaaaattaggattgtaccacaataatgtgaaatgcggacggaatgtgacggtactccgtaaagacgaaaagaaggacaatgagagtggcgatgcaagtggctgcgtggttctaggcgggcaatatcaaatggaatgtttcacgagcttggattgtgatggcaggtggaaacgagctgagtcagtttagtatcagtgcattcggcatgtctcgcaatctgaatggcggccttaactcagtgcgaatactcgaatggtctgggtaattgcaaacttaggtgccggctgagatactagacaaaattgacggctctctgctaggagacataatatcacaatgaggtgaat

SEQ ID NO: 10481 - DNA, 720 bp, Muscodor strobelii
  misc_feature: SGI cDNA ID NO. 563329
  misc_feature: Encodes the peptide sequence at SEQ ID NO 10482
atggcagagaccaatggagtcgcctccacttcgccagacgaggaattttggttgttcggctatgggtcgttgatctggaagcctccgccgcatttcgatagacgagtaccaggatgggtcactggatacgttagacggttctggcaggcaagtcaggaccaccgtggtacaccagacgcgccagggcgtgtagtcactctcatagagcgctctttctgggcatctcttgtagatgagcatgacagcgcgccagataaagtatggggcgtagcatatcggatcgagtccgctcacgtggcagaagtcaaagaatatttggacatccgtgagattaacggatatacgatccatttcaccccatttcaccccagtgatggatcaaaaattatccgtacacttgtatatatcggaacgccggacaacgaccagttcatcgggcctcaggatcctcaaaaattagcggaacacatctatcgcagcgagggccccagcggcttgaatcgcgattacttactagagctagagaaggcgctggatgcacttggtcaggagagcggcgatactcatgtcaaagatttgtccgaccggctgcgtgcttttgaacatcacatgaaaaataacgggacccaggattataatcctggagtgccaaacccgatactacatgaattcgcccagaaagcgagtatagacgaacaagaagagaccgagaaggtgtga

SEQ ID NO: 10482 - protein, 239 aa, Muscodor strobelii
  misc_feature: SGI Peptide ID NO. 563329
  misc_feature (16)..(200): Pfam Id: PF04752 Pfam Desc: ChaC-like protein
  misc_feature (14)..(195): NCBI GI: 171680235 Blast Desc: protein product [Podospora anserina] gi|170939744|emb|CAP64970.1| protein product [Podospora anserina]
  misc_feature (33)..(239): NCBI GI: 85116799 Blast Desc: NCU02737 [Neurospora crassa OR74A] gi|28926925|gb|EAA35886.1| conserved [Neurospora crassa OR74A]
  misc_feature (10)..(201): NCBI GI: 46106989 Blast Desc: FG00443.1 [Gibberella zeae PH-1]
  misc_feature (13)..(200): NCBI GI: 169603501 Blast Desc: SNOG_04760 [Phaeosphaeria nodorum SN15] gi|111067400|gb|EAT88520.1| SNOG_04760 [Phaeosphaeria nodorum SN15]
  misc_feature (51)..(201): NCBI GI: 145614398 Blast Desc: MGG_04817 [Magnaporthe grisea 70-15] gi|145021332|gb|EDK05461.1| MGG_04817 [Magnaporthe grisea 70-15]
  misc_feature (15)..(237): NCBI GI: 256734561 Blast Desc: NECHADRAFT_74950 [Nectria haematococca mpVI 77-13-4]
  misc_feature (1)..(201): NCBI GI: 50556972 Blast Desc: YALI0F26103p [Yarrowia lipolytica] gi|49651764|emb|CAG78706.1| YALI0F26103p [Yarrowia lipolytica]
  misc_feature (52)..(239): NCBI GI: 116206984 Blast Desc: CHGG_02785 [Chaetomium globosum CBS 148.51] gi|88183382|gb|EAQ90850.1| CHGG_02785 [Chaetomium globosum CBS 148.51]
  misc_feature (12)..(201): NCBI GI: 67525061 Blast Desc: AN2988.2 [Aspergillus nidulans FGSC A4] gi|40744383|gb|EAA63559.1| AN2988.2 [Aspergillus nidulans FGSC A4]
  misc_feature (10)..(238): NCBI GI: 156061485 Blast Desc: SS1G_02887 [Sclerotinia sclerotiorum 1980] gi|154700289|gb|EDO00028.1| SS1G_02887 [Sclerotinia sclerotiorum 1980]
MAETNGVASTSPDEEFWLFGYGSLIWKPPPHFDRRVPGWVTGYVRRFWQASQDHRGTPDAPGRVVTLIERSFWASLVDEHDSAPDKVWGVAYRIESAHVAEVKEYLDIREINGYTIHFTPFHPSDGSKIIRTLVYIGTPDNDQFIGPQDPQKLAEHIYRSEGPSGLNRDYLLELEKALDALGQESGDTHVKDLSDRLRAFEHHMKNNGTQDYNPGVPNPILHEFAQKASIDEQEETEKV

SEQ ID NO: 10483 - DNA, 281 bp, Muscodor strobelii
  misc_feature: SGI EST ID NO. CUFF.24748.0
  misc_feature: Variant of the nucleotide sequence at SEQ ID NO 10481
gtttaacgttcgttcaactcttatacttatgatacatatagatcactcattgcgttactaagcaacatagatgtcggtttacatatacagattacacaagtaaaaatcgcttcgtattgtcgattgccgatccggccgtgagactatggcagagaccaatggagtcgcctccacttcgccagacgaggaattttggttgttcggctatgggtcgttgatctggaagcctccgccgcatttcgatagacgagtaccaggatgggtcactggatacgttagac

SEQ ID NO: 10484 - DNA, 498 bp, Muscodor strobelii
  misc_feature: SGI cDNA ID NO. 563330
  misc_feature: Encodes the peptide sequence at SEQ ID NO 10485
atggcgaagctcttcatcggcggccttgcctggcacactgaagagaccaccttgagacagaagttcgaggagttcggccccgtcgaggaagcggttgttgtgaaggatcgagacacgggccgaagccgtggcttcggattcgtccggtttgccaacgaagcagatgccgagaccgcaatcgcgagcatgaacaacgtcgagttcgacggacgcgcaattcgtgttgacaaggcttcagatactggaccacgaagcggtggctttggtggtggccgaggtggcggtggctaccaaggccgaggtggccactctcagcagcagatgccctacggtggtggccaaggctatggagggtccaattcgtatgcgccccaagggtacggacgtggggggtacggacagcagtaccagcaacagggctacgctccagccccatactacccagagcagaatggcggtggacagcagcctccgcaaggaccgccccggtaccagtga

SEQ ID NO: 10485 - protein, 165 aa, Muscodor strobelii
  misc_feature: SGI Peptide ID NO. 563330
  misc_feature (4)..(75): Pfam Id: PF00076 Pfam Desc: RNA recognition motif. (a.k.a. RRM, RBD, or RNP domain)
  misc_feature (1)..(139): NCBI GI: 219881900 Blast Desc: cold response protein 2 [Metarhizium anisopliae]
  misc_feature (1)..(144): NCBI GI: 39945666 Blast Desc: MGG_04816 [Magnaporthe grisea 70-15] gi|145021333|gb|EDK05462.1| MGG_04816 [Magnaporthe grisea 70-15]
  misc_feature (1)..(130): NCBI GI: 171680237 Blast Desc: protein product [Podospora anserina] gi|170939745|emb|CAP64971.1| protein product [Podospora anserina]
  misc_feature (1)..(107): NCBI GI: 121705230 Blast Desc: glycine-rich RNA-binding protein, [Aspergillus clavatus NRRL 1] gi|119399024|gb|EAW09452.1| glycine-rich RNA-binding protein, [Aspergillus clavatus NRRL 1]
  misc_feature (1)..(162): NCBI GI: 116206982 Blast Desc: CHGG_02784 [Chaetomium globosum CBS 148.51] gi|88183381|gb|EAQ90849.1| CHGG_02784 [Chaetomium globosum CBS 148.51]
  misc_feature (1)..(143): NCBI GI: 256735276 Blast Desc: NECHADRAFT_74951 [Nectria haematococca mpVI 77-13-4]
  misc_feature (1)..(89): NCBI GI: 119177425 Blast Desc: CIMG_07653 [Coccidioides immitis RS]
  misc_feature (1)..(80): NCBI GI: 46106940 Blast Desc: FG00442.1 [Gibberella zeae PH-1]
  misc_feature (1)..(89): NCBI GI: 240107675 Blast Desc: Glycine-rich RNA-binding protein 2, mitochondrial precursor , [Coccidioides posadasii C735 delta SOWgp]
  misc_feature (1)..(80): NCBI GI: 189203945 Blast Desc: conserved [Pyrenophora tritici-repentis Pt-1C-BFP] gi|187985407|gb|EDU50895.1| conserved [Pyrenophora tritici-repentis Pt-1C-BFP]
MAKLFIGGLAWHTEETTLRQKFEEFGPVEEAVVVKDRDTGRSRGFGFVRFANEADAETAIASMNNVEFDGRAIRVDKASDTGPRSGGFGGGRGGGGYQGRGGHSQQQMPYGGGQGYGGSNSYAPQGYGRGGYGQQYQQQGYAPAPYYPEQNGGGQQPPQGPPRYQ

SEQ ID NO: 10486 - DNA, 3926 bp, Muscodor strobelii
  misc_feature: SGI EST ID NO. CUFF.24872.1
  misc_feature: Variant of the nucleotide sequence at SEQ ID NO 10484
aacattttgagactgaagtgtcgcatgtgtctagattcgttgtttgctatttactcctgtccgtctcagcttacgagagcaagaagctaagacttggtacaaagttcagacgtatattctgcttcagctgatttcgatgctgcgcggctatggaatggcgctatcctcgcaaaggccaccatttctacctatactttaggtaggaagtagcatcattggatgtggtcgttgaatcgcggggaagacttaacaatgcgcgacgatgaggggtctatgttacccacaagcggctgagcccaaacgttccagctatcgacatgcaccagcagtctgtagatcatgaccaggggccagggtgtgactggggtatccggccgtcattcttggcaaagctgcaatattgtggccacattattcatgtaaaggcttatatcaaagttcttctctttaccagacaaggttaatccattggatattctccctgagtatggcgctttcgtcgattcaaacgggcccctgcacttggagtttcccatgatacaacttgttccaccgatgttaagggaagggccgcgaatcatccctaaagatgagctaattaatgagacgacaattgtagctctcgagaaggaccccgcaacagccaagaactagcaccttaatctttggttggcatgacccggcaaaacacttctcttatgcctttacacattgatttgctcctattgccttctcatggaggccggttgaggcagactgagtgttcgatggatgtacccggacatgcagtgagcaaacaccactgccttataacaaggattgcgaaaccgtcaaagcaatgttaagcgtcaattcggaagtccttggcaggagcgatttcctaaacctggcaacctggacaaggttgacagcacacaacccgattttgagtagcaatcttcaactacctggccggcaccaagctcctatgctatcaatcataacctaacaagaccaaatggcgacggaagtgggcaaaagggtgggcatagcctcagtaaaattggttctcgtagtcgtcacctcacagtgggaagctcttagcgcgtgtcgcatgctgcctcgtatcggccgtttcgagtgacgggtcaactgcgcagcttcctttcctctcgatctcgaggaggtcgacaggaagccagctcctctgtttgaagctcgtttagagacaaccttgcaagcacttagatgactcgcaccgcaaatcagttcctgcacatggcttttgtagggattgagggcgcaaatcccgcctgtcaagtagtacgggaaagtcgaaccggattatataacggtctcgttgcccgttgcagctcgaacgtcatgttgcgaaagagtataaatgatctgcctaggtagctcgaaaccgtgaactattcacagccgttggtgaatcacaagccaacaacatttgatttattcaaacattgagaatcagaaattgccaccaggcacccctcccgtcgtcccttccttcactggcctattagtagcacaccttcctggtacgcctacctctagcgtacctctagcctccggcctctactgcaagagacgtaagtattcctaatgtactcgaccgaccccgctatatatcccactattacatatgggtttgttgttttcaccatcgcggccaaatctccatcttctcaacacaaacagaaggtcaactcagacgaccacgaatcactgtcgcctgacctcagggactcatctttctacaattctagtgtgcttccttcatcaatcattgaccggattcagcagttacactcggcgactctcgatcgacatttcaactcatcacactctactctacccgcggtcttcactgtcgactcaggcttccaaaatggcgaagctcttcatcggcggccttgcctggcacactgaagagaccaccttgagacagaagttcgaggagttcggccccgtcgaggaagcggtacgtcgctcggacatcagtagctcattgtcttttgcggcgacgcaagaatgacacatgtaacgttttcatgcactataacaaaacgattaatctttacctgtaggttgttgtgaaggatcgagacacgggccgaagccgtggcttcggattcgtccggtttgccaacgaagcagatgccgagaccgcaatcgcgagcatgaacaacgtcgagttcgacggacgcgcaattcgtgttgacaaggcttcagatactggaccacgaagcggtggctttggtggtggccgaggtggcggtggctaccaaggccgaggtggccactctcagcagcagatgccctacggtggtggccaaggctatggagggtccaattcgtatgcgccccaagggtacggacgtggggggtacggacagcagtaccagcaacagggctacgctccagccccatactacccagagcagaatggcggtggacagcagcctccgcaaggaccgccccggtaccagtgatcgcactcgacaccgtttgaagtcgacgaccatgatcaatttatgacaacatgatgctgttggtctttggacaaaaagagctcagatgtgagacaggaacgaagagaaaggaacgatcgactgccgggggaaatcttaatcggatattccatgagtgctccagattcgacatgctactgtccattttacttgagcaccgctctttccaaaaaatcttgcgtctgagacaatacgcgtactgagtagatctcccaaccccgattcccaaagccaccagtaggaggagtcacaaacatgcaacgttgcttgcgttctctcgttttattttcctgtacttatttcttcatgagtctcatgaacatacgatcttttacgacttttcaaggatggggactaggtttgtttcgttgagagacaaatcttgatcaagcgttcttcgttcggaaggagaagtagatcattgattcgccaaccgccctaggcagatctcgttcttaaaaaatgggggggttggagtcggcatcgagactcgatgtttgattgatagctatcaatagactcaaatgattaagatctaggccgaaagcttgtgcttgcaatttactccttgctctccggctgacttcgcgagctgctacagggttgatattgtgtttgcctatgtttattttctgttagatcggcttcaaacatagttatcgcgctgagccactgctcaagtccctcacaccttctcggtctcttcttgttcgtctatactcgctttctgggcgaattcatgtagtatcgggtttggcactccaggattataatcctgggtcccgttatttttcatgtgatgttcaaaagcacgcagccggtcggacaaatctttgacatgagtatcgccgctctcctgaccaagtgcatccagcgccttctctagctctagtaagtaatcgcgattcaagccgctggggccctcgctgcgatagatgtgttccgctaatttttgaggatcctgaggcccgatgaactggtcgttgtccggcgttccgatatatacaagtgtacggataatttttgatccatcactggggtgaaatggggtgaaatggatcgtatatccgttaatctcacggatgtccaaatattctttgacttctgccacgtgagcggactcgatccgatatgctacgccccatactttatctggcgcgctgtcatgctcatctacaagagatgcccagaaagagcgctctatgagagtgactacacgccctggcgcgtctggtgtaccacggtggtcctgactacgacgtcattagcgaggttgtatgccgacctgcgattctcttgagatttgttcgaaagctacgtcaatcaagcaaagttgcaagcaaacaaatatggaaaagtcgtcgggccagcttgtaccttgcctaaaac

SEQ ID NO: 10487 - DNA, 744 bp, Muscodor strobelii
  misc_feature: SGI cDNA ID NO. 563331
  misc_feature: Reduced expression when VOC is produced
  misc_feature: Encodes the peptide sequence at SEQ ID NO 10488
atgtactcgaccgaccccgctatatatcccactattacatatgggtttgttgttttcaccatcgcggccaaatctccatcttctcaacacaaacagaaggtcaactcagacgaccacgaatcactgtcgcctgacctcagggactcatctttctacaattctagtgtgcttccttcatcaatcattgaccggattcagcagttacactcggcgactctcgatcgacatttcaactcatcacactctactctacccgcggtcttcactgtcgactcaggcttccaaaatggcgaagctcttcatcggaagttcgaggagttcggccccgtcgaggaagcggttgttgtgaaggatcgagacacgggccgaagccgtggcttcggattcgtccggtttgccaacgaagcagatgccgagaccgcaatcgcgagcatgaacaacgtcgagttcgacggacgcgcaattcgtgttgacaaggcttcagatactggaccacgaagcggtggctttggtggtggccgaggtggcggtggctaccaaggccgaggtggccactctcagcagcagatgccctacggtggtggccaaggctatggagggtccaattcgtatgcgccccaagggtacggacgtggggggtacggacagcagtaccagcaacagggctacgctccagccccatactacccagagcagaatggcggtggacagcagcctccgcaaggaccgccccggtaccagtga

SEQ ID NO: 10488 - protein, 247 aa, Muscodor strobelii
  misc_feature: SGI Peptide ID NO. 563331
  misc_feature (98)..(157): Pfam Id: PF00076 Pfam Desc: RNA recognition motif. (a.k.a. RRM, RBD, or RNP domain)
  misc_feature (100)..(226): NCBI GI: 39945666 Blast Desc: MGG_04816 [Magnaporthe grisea 70-15] gi|145021333|gb|EDK05462.1| MGG_04816 [Magnaporthe grisea 70-15]
  misc_feature (100)..(221): NCBI GI: 219881900 Blast Desc: cold response protein 2 [Metarhizium anisopliae]
  misc_feature (99)..(225): NCBI GI: 256735276 Blast Desc: NECHADRAFT_74951 [Nectria haematococca mpVI 77-13-4]
  misc_feature (98)..(189): NCBI GI: 121705230 Blast Desc: glycine-rich RNA-binding protein, [Aspergillus clavatus NRRL 1] gi|119399024|gb|EAW09452.1| glycine-rich RNA-binding protein, [Aspergillus clavatus NRRL 1]
  misc_feature (100)..(212): NCBI GI: 171680237 Blast Desc: protein product [Podospora anserina] gi|170939745|emb|CAP64971.1| protein product [Podospora anserina]
  misc_feature (100)..(244): NCBI GI: 116206982 Blast Desc: CHGG_02784 [Chaetomium globosum CBS 148.51] gi|88183381|gb|EAQ90849.1| CHGG_02784 [Chaetomium globosum CBS 148.51]
  misc_feature (100)..(162): NCBI GI: 164427760 Blast Desc: NCU02736 [Neurospora crassa OR74A] gi|157071873|gb|EAA35885.2| [Neurospora crassa OR74A]
  misc_feature (96)..(162): NCBI GI: 189203945 Blast Desc: conserved [Pyrenophora tritici-repentis Pt-1C-BFP] gi|187985407|gb|EDU50895.1| conserved [Pyrenophora tritici-repentis Pt-1C-BFP]
  misc_feature (98)..(170): NCBI GI: 119177425 Blast Desc: CIMG_07653 [Coccidioides immitis RS]
  misc_feature (98)..(170): NCBI GI: 240107675 Blast Desc: Glycine-rich RNA-binding protein 2, mitochondrial precursor , [Coccidioides posadasii C735 delta SOWgp]
  misc_feature: Useful for introducing or modulating the production of volatile compounds
MYSTDPAIYPTITYGFVVFTIAAKSPSSQHKQKVNSDDHESLSPDLRDSSFYNSSVLPSSIIDRIQQLHSATLDRHFNSSHSTLPAVFTVDSGFQNGEALHRKFEEFGPVEEAVVVKDRDTGRSRGFGFVRFANEADAETAIASMNNVEFDGRAIRVDKASDTGPRSGGFGGGRGGGGYQGRGGHSQQQMPYGGGQGYGGSNSYAPQGYGRGGYGQQYQQQGYAPAPYYPEQNGGGQQPPQGPPRYQ

SEQ ID NO: 10489 - DNA, 3926 bp, Muscodor strobelii; identical to SEQ ID NO: 10486
  misc_feature: SGI EST ID NO. CUFF.24872.1
  misc_feature: Variant of the nucleotide sequence at SEQ ID NO 10487

SEQ ID NO: 10490 - DNA, 2559 bp, Muscodor strobelii
  misc_feature: SGI cDNA ID NO. 563332
  misc_feature: Encodes the peptide sequence at SEQ ID NO 10491
atgggtcggcaggagtcttccccacctcaccaaggtcatcgcatgcctcatcaacgtcgccgtcatcattaccaccagaaacatgccaagcgggcacatcccgaaccgcagctgagcctaggcaagttaaaccgagaattccaagagccccgcggcaaagctcgagtggagagctggttgggacaagtgacaggtcttccatccaatgcagggttgacatcagaaaagccccgacgacaggagatctactccgctgagcaaccactttcacaacatggtgatacctctcttaccaaccagacgccaggacgcgtagatccattgtggagaccgaaacacatgcttcccgcaaatggagcaacgcccgcgctcttctcgacctcgacaggtcaggggtttggtttgaaccggtataaacgaaacagcagtgggaacagttcgctgatcagcgactctggttctccctcgcagtcccgcaatcatggccacagtcaacctccggtcgaatacaagagtcagcctcactgtggaccctgggatgaagcagaggtgggttacgcacgtgtctcgtcatcaacgtctgacgaagcaagccagccgcaaacctttgagaaacgaccccgaaggaagaccaaggcggacaagtatgacataaagaagcaagacgacagaaagaggaagaaactgacaaatgagaaaacaacagttcaagatgagaagaggacagcagaattcagagctcgtggaaagaaacaaagaaaaaggtcagcaatattaggcaagaatgtgatgaacaaattcacttcggaagctgtcttgaacgatcgaattacagtacaacatggactaaagcctggtctttttgagaacaaacgtgaacctaggaaaggaccagttcccgatcttgcattttcagaaatggaaattcgcaaggaagaactacaagaagcacaacgggcaaagcccttatccaagtctcaacgtcgtgaccgccaacaagaggagcgacagcgtgaacaaatctcatcattctttatgccgtccaacaactctcctaaagcaatggcatcggacgcacacgactaccacgatgatgaaaaattaattcctgatgggcatgataggatagcattagttcatgagaggcggcatatagcatcacctctaaacggtcacagggacggccactgtgatcgatctcaagaaatggagacctcgccatctatatattctacccagttccatgactaccgtccacattcaagtaggactacatcctattacacgtggtcgtccagcaacgccagtgtcccccatgatattcagacttgcgtcaacaaatcgccagacctttttgttccaggaagatcagagactcctgaaacagttcgcagagctgtgcttaacacgggaatctatagagacacacgtattagaccgtatgacgactggacaaacgagcgaagtctggcctcagcaacagacaacgaatctacatcttcgtataagaaatcgcgtgacattcaggatccgccatcgccttcaacaactatcctactaaaagaaaagtgggacgagatccggccccccgaatggaaattagggaactccgcgaatgatgcgcagtctgactccaacaatctaaatcgcaatgcatgctcaacttcactgccaagtaccattgccttggaacatcaaacacaagttcaagaaaatgatgctagacacgcccaggggctgccatatttaccggactcatactgtcataatgagtcgagggaagcttatacgttcgaaggacatgcaccattgactcaaattggcaaagtcgccacgatgtacgatgatttagaagtggatcgtcactctattgcgtccaaagaagcaatgccgccaccacccattccggagcgaaggcgaccctctttagagtgtacgaaccatcagccaagagaccgcaacagaccccaattcgcaacagagtcattgccgcccattgaattcgcggaatacgatacaaagttttcactatatgatcgcaaagaggacatgactattcctttggggccagcagtgggagcagacgtaacgattccaacattatattcggattcgcgggcaaggaacctgcctaccttttcaaagctgaaccacgacaaaaggagaaatttcggcaaattggtttctccggtcattcaacccgaaagcatgatcgaattcattgcgagaatcgaaaacgagattgataatcagaaagcttttatacaaaatgatgtggaatccgttgcgtcgagttcaggatccatgatgaacctggcacagagtgcttatgaagaccaatccgagttgctacttacacctgacccattacatacttaccaagatggttatcaactgatgccgcccactactccggaacccgacactggtggttacaatgtactgtcaacagcacgtggtgggaaagacgattcaattcaggaagggatggaaacctctacagatgatcttcctgaaatgtcgagcttttggcgcccaaatcaatttgcattattgtaa

SEQ ID NO: 10491 - protein, 852 aa, Muscodor strobelii
  misc_feature: SGI Peptide ID NO. 563332
  misc_feature (195)..(335): NCBI GI: 46106938 Blast Desc: FG00441.1 [Gibberella zeae PH-1]
  misc_feature (178)..(443): NCBI GI: 119177417 Blast Desc: CIMG_07651 [Coccidioides immitis RS]
  misc_feature (201)..(309): NCBI GI: 240107676 Blast Desc: CPC735_042990 [Coccidioides posadasii C735 delta SOWgp]
MGRQESSPPHQGHRMPHQRRRHHYHQKHAKRAHPEPQLSLGKLNREFQEPRGKARVESWLGQVTGLPSNAGLTSEKPRRQEIYSAEQPLSQHGDTSLTNQTPGRVDPLWRPKHMLPANGATPALFSTSTGQGFGLNRYKRNSSGNSSLISDSGSPSQSRNHGHSQPPVEYKSQPHCGPWDEAEVGYARVSSSTSDEASQPQTFEKRPRRKTKADKYDIKKQDDRKRKKLTNEKTTVQDEKRTAEFRARGKKQRKRSAILGKNVMNKFTSEAVLNDRITVQHGLKPGLFENKREPRKGPVPDLAFSEMEIRKEELQEAQRAKPLSKSQRRDRQQEERQREQISSFFMPSNNSPKAMASDAHDYHDDEKLIPDGHDRIALVHERRHIASPLNGHRDGHCDRSQEMETSPSIYSTQFHDYRPHSSRTTSYYTWSSSNASVPHDIQTCVNKSPDLFVPGRSETPETVRRAVLNTGIYRDTRIRPYDDWTNERSLASATDNESTSSYKKSRDIQDPPSPSTTILLKEKWDEIRPPEWKLGNSANDAQSDSNNLNRNACSTSLPSTIALEHQTQVQENDARHAQGLPYLPDSYCHNESREAYTFEGHAPLTQIGKVATMYDDLEVDRHSIASKEAMPPPPIPERRRPSLECTNHQPRDRNRPQFATESLPPIEFAEYDTKFSLYDRKEDMTIPLGPAVGADVTIPTLYSDSRARNLPTFSKLNHDKRRNFGKLVSPVIQPESMIEFIARIENEIDNQKAFIQNDVESVASSSGSMMNLAQSAYEDQSELLLTPDPLHTYQDGYQLMPPTTPEPDTGGYNVLSTARGGKDDSIQEGMETSTDDLPEMSSFWRPNQFALL

SEQ ID NO: 10492 - DNA, 2882 bp, Muscodor strobelii
  misc_feature: SGI EST ID NO. CUFF.24757.0
  misc_feature: Variant of the nucleotide sequence at SEQ ID NO 10490
aacattcagtgctatttactgatgggtcatgttccagttcccgatcttgcattttcagaaatggaaattcgcaaggaagaactacaagaagcacaacgggcaaagcccttatccaagtctcaacgtcgtgaccgccaacaagaggagcgacagcgtgaacaaatctcatcattctttatgccgtccaacaactctcctaaagcaatggcatcggacgcacacgactaccacgatgatgaaaaattaattcctgatgggcatgataggatagcattagttcatgagaggcggcatatagcatcacctctaaacggtcacagggacggccactgtgatcgatctcaagaaatggagacctcgccatctatatattctacccagttccatgactaccgtccacattcaagtaggactacatcctattacacgtggtcgtccagcaacgccagtgtcccccatgatattcagacttgcgtcaacaaatcgccagacctttttgttccaggaagatcagagactcctgaaacagttcgcagagctgtgcttaacacgggaatctatagagacacacgtattagaccgtatgacgactggacaaacgagcgaagtctggcctcagcaacagacaacgaatctacatcttcgtataagaaatcgcgtgacattcaggatccgccatcgccttcaacaactatcctactaaaagaaaagtgggacgagatccggccccccgaatggaaattagggaactccgcgaatgatgcgcagtctgactccaacaatctaaatcgcaatgcatgctcaacttcactgccaagtaccattgccttggaacatcaaacacaagttcaagaaaatgatgctagacacgcccaggggctgccatatttaccggactcatactgtcataatgagtcgagggaagcttatacgttcgaaggacatgcaccattgactcaaattggcaaagtcgccacgatgtacgatgatttagaagtggatcgtcactctattgcgtccaaagaagcaatgccgccaccacccattccggagcgaaggcgaccctctttagagtgtacgaaccatcagccaagagaccgcaacagaccccaattcgcaacagagtcattgccgcccattgaattcgcggaatacgatacaaagttttcactatatgatcgcaaagaggacatgactattcctttggggccagcagtgggagcagacgtaacgattccaacattatattcggattcgcgggcaaggaacctgcctaccttttcaaagctgaaccacgacaaaaggagaaatttcggcaaattggtttctccggtcattcaacccgaaagcatgatcgaattcattgcgagaatcgaaaacgagattgataatcagaaagcttttatacaaaatgatgtggaatccgttgcgtcgagttcaggatccatgatgaacctggcacagagtgcttatgaagaccaatccgagttgctacttacacctgacccattacatacttaccaagatggttatcaactgatgccgcccactactccggaacccgacactggtggttacaatgtactgtcaacagcacgtggtgggaaagacgattcaattcaggaagggatggaaacctctacagatgatcttcctgaaatgtcgagcttttggcgcccaaatcaatttgcattattgtaacaatacctgaatgtagatatcttataatttcatcatcgccctttaaattggagaattgacggcattattctggctcctggtctttccacttctgccgtaggtttacaacatccatgtcacaattttcggctttcgaaacaatggtcttggccttcccgacaacaggtgcatcgatcatggcgccatcaagtgtccaagcacctctaccggcgttcgctgccttctcatccgctataacgatccggacggcccattcgacttctttttcactaggggcgaacaggcgatgtacagtctcaacctgagatgggtggatgcattgtttaccgttaaagcccattgctctgccaccttggcactcctcttccagacgagccaagccttcgtcacctttataggctgtgcaaaccaagtcaatagtgcttggaagtgaggctgcacgggctgcagttgcgatcgccgaccgagcgtacagaaactccgacagtgatggggttcgtgtgaggctcatatccaacgcgaagtcctctgctgcaaaaatgagaccagagaggtagggcgaggcagcacatatggattggagatctgtaactgctcgagcggactcgattagggctatcagtttgattggattcgttgtagatgaagagtgtcgatcaggtgccagatgacgtagtgcgtcggtgacaaaggtcaagtcactcgcactgttgacctttggaatgacgatggcatcgacttggggtaccactgccaaagatgtcaaatcatcgagtgcatatggcgttgatacagcgttaatgcgaactgctaactccttgattgtggatggacgcgactggagggttgtgagatgctcacggagtgccgagcgggctcgaggcttcgctcctggcgtcaccgagtcctcgagatcataggtcacgttgtcgctggtgagtcgcagggacttggccaacatgcggtcagaagaagcgggaactataatgttcattagctctggaactaagtatcataagatgaacgtccagtgagattctcatgaatagcgagactcaccataaagcaaagcccgccttagtatggcattcgatttagctgcgagcgccatggtgactgacagaggaaggctcggtgtttgttcacggtatcgagtgtttccatttcttgtttgaattgta

SEQ ID NO: 10493 - DNA, 969 bp, Muscodor strobelii
  misc_feature: SGI cDNA ID NO. 563333
  misc_feature: Encodes the peptide sequence at SEQ ID NO 10494
atggcgctcgcagctaaatcgaatgccatactaaggcgggctttgctttatgttcccgcttcttctgaccgcatgttggccaagtccctgcgactcaccagcgacaacgtgacctatgatctcgaggactcggtgacgccaggagcgaagcctcgagcccgctcggcactccgtgagcatctcacaaccctccagtcgcgtccatccacaatcaaggagttagcagttcgcattaacgctgtatcaacgccatatgcactcgatgatttgacatctttggcagtggtaccccaagtcgatgccatcgtcattccaaaggtcaacagtgcgagtgacttgacctttgtcaccgacgcactacgtcatctggcacctgatcgacactcttcatctacaacgaatccaatcaaactgatagccctaatcgagtccgctcgagcagttacagatctccaatccatatgtgctgcctcgccctacctctctggtctcatttttgcagcagaggacttcgcgttggatatgagcctcacacgaaccccatcactgtcggagtttctgtacgctcggtcggcgatcgcaactgcagcccgtgcagcctcacttccaagcactattgacttggtttgcacagcctataaaggtgacgaaggcttggctcgtctggaagaggagtgccaaggtggcagagcaatgggctttaacggtaaacaatgcatccacccatctcaggttgagactgtacatcgcctgttcgcccctagtgaaaaagaagtcgaatgggccgtccggatcgttatagcggatgagaaggcagcgaacgccggtagaggtgcttggacacttgatggcgccatgatcgatgcacctgttgtcgggaaggccaagaccattgtttcgaaagccgaaaattgtgacatggatgttgtaaacctacggcagaagtggaaagaccaggagccagaataa

SEQ ID NO: 10494 - protein, 322 aa, Muscodor strobelii
  misc_feature: SGI Peptide ID NO. 563333
  misc_feature (13)..(242): Pfam Id: PF03328 Pfam Desc: HpcH/HpaI aldolase/citrate lyase family
  misc_feature (3)..(322): NCBI GI: 46106885 Blast Desc: FG00440.1 [Gibberella zeae PH-1]
  misc_feature (3)..(322): NCBI GI: 256735277 Blast Desc: [Nectria haematococca mpVI 77-13-4]
  misc_feature (7)..(322): NCBI GI: 85116787 Blast Desc: NCU02734 [Neurospora crassa OR74A] gi|28926922|gb|EAA35883.1| NCU02734 [Neurospora crassa OR74A]
  misc_feature (10)..(322): NCBI GI: 189203935 Blast Desc: citrate lyase subunit beta (Citrate (pro-3S)-lyase subunit beta) [Pyrenophora tritici-repentis Pt-1C-BFP] gi|187985402|gb|EDU50890.1| citrate lyase subunit beta (Citrate
  misc_feature (9)..(322): NCBI GI: 154291079 Blast Desc: BC1G_15427 [Botryotinia fuckeliana B05.10] gi|150847117|gb|EDN22310.1| BC1G_15427 [Botryotinia fuckeliana B05.10]
  misc_feature (7)..(322): NCBI GI: 119499968 Blast Desc: citrate lyase beta subunit, [Neosartorya fischeri NRRL 181] gi|119414906|gb|EAW24844.1| citrate lyase beta subunit, [Neosartorya fischeri NRRL 181]
  misc_feature (7)..(322): NCBI GI: 121708520 Blast Desc: citrate lyase beta subunit, [Aspergillus clavatus NRRL 1] gi|119400305|gb|EAW10731.1| citrate lyase beta subunit, [Aspergillus clavatus NRRL 1]
  misc_feature (11)..(322): NCBI GI: 169764589 Blast Desc: [Aspergillus oryzae RIB40] gi|83764620|dbj|BAE54764.1| protein product [Aspergillus oryzae]
  misc_feature (1)..(322): NCBI GI: 242791580 Blast Desc: citrate lyase beta subunit, [Talaromyces stipitatus ATCC 10500] gi|242791585|ref|XP_002481787.1| citrate lyase beta subunit, [Talaromyces stipitatus ATCC 10500] citrate lyase beta
  misc_feature (11)..(322): NCBI GI: 238504150 Blast Desc: citrate lyase beta subunit, [Aspergillus flavus NRRL3357] gi|220690778|gb|EED47127.1| citrate lyase beta subunit, [Aspergillus flavus NRRL3357]
  misc_feature (7)..(302): SWISSPROT Homolog: EC 4.1.3.6 Citrate (pro-3S)-lyase
  misc_feature (7)..(302): SWISSPROT Homolog: EC 4.1.3.34 Citryl-CoA lyase
MALAAKSNAILRRALLYVPASSDRMLAKSLRLTSDNVTYDLEDSVTPGAKPRARSALREHLTTLQSRPSTIKELAVRINAVSTPYALDDLTSLAVVPQVDAIVIPKVNSASDLTFVTDALRHLAPDRHSSSTTNPIKLIALIESARAVTDLQSICAASPYLSGLIFAAEDFALDMSLTRTPSLSEFLYARSAIATAARAASLPSTIDLVCTAYKGDEGLARLEEECQGGRAMGFNGKQCIHPSQVETVHRLFAPSEKEVEWAVRIVIADEKAANAGRGAWTLDGAMIDAPVVGKAKTIVSKAENCDMDVVNLRQKWKDQEPE

SEQ ID NO: 10495 - DNA, 2922 bp, Muscodor strobelii
  misc_feature: SGI EST ID NO. CUFF.24758.1
  misc_feature: Variant of the nucleotide sequence at SEQ ID NO 10493
gggaaacgtacaattcaaacaagaaatggaaacactcgataccgtgaacaaacaccgagccttcctctgtcagtcaccatggcgctcgcagctaaatcgaatgccatactaaggcgggctttgctttatgttcccgcttcttctgaccgcatgttggccaagtccctgcgactcaccagcgacaacgtgacctatgatctcgaggactcggtgacgccaggagcgaagcctcgagcccgctcggcactccgtgagcatctcacaaccctccagtcgcgtccatccacaatcaaggagttagcagttcgcattaacgctgtatcaacgccatatgcactcgatgatttgacatctttggcagtggtaccccaagtcgatgccatcgtcattccaaaggtcaacagtgcgagtgacttgacctttgtcaccgacgcactacgtcatctggcacctgatcgacactcttcatctacaacgaatccaatcaaactgatagccctaatcgagtccgctcgagcagttacagatctccaatccatatgtgctgcctcgccctacctctctggtctcatttttgcagcagaggacttcgcgttggatatgagcctcacacgaaccccatcactgtcggagtttctgtacgctcggtcggcgatcgcaactgcagcccgtgcagcctcacttccaagcactattgacttggtttgcacagcctataaaggtgacgaaggcttggctcgtctggaagaggagtgccaaggtggcagagcaatgggctttaacggtaaacaatgcatccacccatctcaggttgagactgtacatcgcctgttcgcccctagtgaaaaagaagtcgaatgggccgtccggatcgttatagcggatgagaaggcagcgaacgccggtagaggtgcttggacacttgatggcgccatgatcgatgcacctgttgtcgggaaggccaagaccattgtttcgaaagccgaaaattgtgacatggatgttgtaaacctacggcagaagtggaaagaccaggagccagaataatgccgtcaattctccaatttaaagggcgatgatgaaattataagatatctacattcaggtattgttacaataatgcaaattgatttgggcgccaaaagctcgacatttcaggaagatcatctgtagaggtttccatcccttcctgaattgaatcgtctttcccaccacgtgctgttgacagtacattgtaaccaccagtgtcgggttccggagtagtgggcggcatcagttgataaccatcttggtaagtatgtaatgggtcaggtgtaagtagcaactcggattggtcttcataagcactctgtgccaggttcatcatggatcctgaactcgacgcaacggattccacatcattttgtataaaagctttctgattatcaatctcgttttcgattctcgcaatgaattcgatcatgctttcgggttgaatgaccggagaaaccaatttgccgaaatttctccttttgtcttgagagtaacatatcagcgacctcctgattgtacatgaaacgatgttgtacataccgtggttcagctttgaaaaggtaggcaggttccttgcccgcgaatccgaatataatgttggaatcgttacgtctgctcccactgctggccccaaaggaatagtcatgtcctctttgcgatcatatagtgaaaactttgtatcgtattccgcgaattcaatgggcggcaatgactctgttgcgaattggggtctgttgcggtctcttggctgatggttcgtacactctaaagagggtcgccttcgctccggaatgggtggtggcggcattgcttctttggacgcaatagagtgacgatccacttctaaatcatcgtacatcgtggcgactttgccaatttgagtcaatggtgcatgtccttcgaacgtataagcttccctcgactcattatgacagtatgagtccggtaaatatggcagcccctgggcgtgtctagcatcattttcttgaacttgtgtttgatgttccaaggcaatggtacttggcagtgaagttgagcatgcattgcgatttagattgttggagtcagactgcgcatcattcgcggagttccctaatttccattcggggggccggatctcgtcccacttttcttttagtaggatagttgttgaaggcgatggcggatcctgaatgtcacgcgatttcttatctgaagttttctgttagcttttcaagtagttaaaaggatgatctgatcctcacacgaagatgtagattcgttgtctgttgctgaggccagacttcgctcgtttgtccagtcgtcatacggtctaatacgtgtgtctctatagattcccgtgttaagcacagctctgcgaactgtttcaggagtctctgatcttcctggaacaaaaaggtctggcgatttgttgacgcaagtctgaatatcatgggggacactggcgttgctggacgaccacgtgtaataggatgtagtcctacttgaatgtggacggtagtcatggaactgggtagaatatatagatggcgaggtctccatttcttgagatcgatcacagtggccgtccctgtgaccgtttagaggtgatgctatatgccgcctctcatgaactaatgctatcctatcatgcccatcaggaattaatttttcatcatcgtggtagtcgtgtgcgtccgatgccattgctttaggagagttgttggacggcataaagaatgatgagatttgttcacgctgtcgctcctcttgttggcggtcacgacgttgagacttggataagggctttgcccgttgtgcttcttgtagttcttccttgcgaatttccatttctgaaaatgcaagatcgggaactggaacatgacccatcagtaaatagcactgaatgtt

SEQ ID NO: 10496 - DNA, 654 bp, Muscodor strobelii
  misc_feature: SGI cDNA ID NO. 563334
  misc_feature: Encodes the peptide sequence at SEQ ID NO 10497
atgcgtccagtcggtctagtagctcttgtccttgcggccgtggctcaagcagcccccatcgatggcccaacgaagacggttaaggagagacaggtcttcgtcggcagcccggcagggcccggaattcctgacccaacattcattctccttccacctgtcactggcggtatgaacccgtcggacaagcgagacacgaaagtggtagaagaacgccagttcacgatcggtgatccttcaaccggaacagtcaccccgccaatcattcttcccccgattacaggcccgataaatccttcgactaagaagcgccaagttctcggaggcagctcgccggacccaacgaaggccaagattgaagctttagagcttcagctggagactttatggcataccttgtgcgtaaatctccgtctcggaacttcaacccaagaactggatggtccagacccacccaagcccgtagcaaaacaaatcaaggctattgaggcagagcttttgaaatacggcattacggtaattaaatctccagacggcaccacaactatcatcacaccaggcaagcgagatgagattgtgccggacaagacagtaccaggtggtcccttcgtcccggccgtcccgatccccggcggtccgatagttcccagcacttaa

SEQ ID NO: 10497 - protein, 217 aa, Muscodor strobelii
  misc_feature: SGI Peptide ID NO. 563334
  misc_feature (18)..(193): NCBI GI: 116196674 Blast Desc: CHGG_04935 [Chaetomium globosum CBS 148.51] gi|88180848|gb|EAQ88316.1| CHGG_04935 [Chaetomium globosum CBS 148.51]
  misc_feature (7)..(105): NCBI GI: 116196674 Blast Desc: CHGG_04935 [Chaetomium globosum CBS 148.51] gi|88180848|gb|EAQ88316.1| CHGG_04935 [Chaetomium globosum CBS 148.51]
MRPVGLVALVLAAVAQAAPIDGPTKTVKERQVFVGSPAGPGIPDPTFILLPPVTGGMNPSDKRDTKVVEERQFTIGDPSTGTVTPPIILPPITGPINPSTKKRQVLGGSSPDPTKAKIEALELQLETLWHTLCVNLRLGTSTQELDGPDPPKPVAKQIKAIEAELLKYGITVIKSPDGTTTIITPGKRDEIVPDKTVPGGPFVPAVPIPGGPIVPST

SEQ ID NO: 10498 - DNA, 4363 bp, Muscodor strobelii
  misc_feature: SGI EST ID NO. CUFF.24769.0
  misc_feature: Variant of the nucleotide sequence at SEQ ID NO 10496
ccgagtctttctgcatgatctcatttggttgcttatctttcatcctaggtgaagcgatgtgagtcagtgaggtttataaatatggaagggattggcgatgacgatgcctcaacttcatggcttcataagcagtagcatccttaagtcatcatcgacatcatcggagcaagcctgtacaatgcgtccagtcggtctagtagctcttgtccttgcggccgtggctcaagcagcccccatcgatggcccaacgaagacggttaaggagagacaggtcttcgtcggcagcccggcagggcccggaattcctgacccaacattcattctccttccacctgtcactggcggtatgaacccgtcggacaagcgagacacgaaagtggtagaagaacgccagttcacgatcggtgatccttcaaccggaacagtcaccccgccaatcattcttcccccgattacaggcccgataaatccttcgactaagaagcgccaagttctcggaggcagctcgccggacccaacgaaggccaagattgaagctttagagcttcagctggagactttatggcataccttggtatgtatctactccatcgtcccaacttgacagacagtttccttcggagacacttgatgcatttgagagctgacttcaatttagtgcgtaaatctccgtctcggaacttcaacccaagaactggagtcattcccaaagtgagcctaagaagctaatccaacgtgtgttgcagtggtccagacccacccaagcccgtagcaaaacaaatcaaggctattgaggcagagcttttgaaatacggcattacggtaattaaatctccagacggcaccacaactatcatcacaccaggcaagcgagatgagattgtgccggacaagacagtaccaggtggtcccttcgtcccggccgtcccgatccccggcggtccgatagttcccagcacttaaaggattctcaatcttgcttctctgtatcctctaagcaagcgtggaaacggcctaggaggttagagcagctgaagtagagatgtttggtgctttcgtgaaaatgcttgttatatgttagtttcgactgtagtagtcagtcatgtgatagagttgattctcaaaatgaagcgtcatgttcgcgagctttttccagccacattttacgcacttgtctctatatcgaatctcgaattgtaatgtcttggaagtgtcgaaattcatgaaccacgtcagctgcattagcaccattgtcgtacgagtcaatgtagcagttccattaatcggatagtaattcacagacaaaggatcttttcgggcgagtcgggtgcatctgatgacacgcaacgaagatagagttcgtgaaatggttgtgagcggtagagaccatgatttctagaatcactatgaacctaattaaggacggcactgggtgtctggcttccgcggcatgacgcaatgctgtggaaaggcaaccgaggactatgaatatgggggtgggatgccttcgatacgatctctatgtcgtgagtttcactaccccttttcggttatataatgacatatctgaaaagaatatatggtataaactagtttcggcatcgtatgttaccttgggagccaaccgtcaaactatatcatgttatatacatacattcctataatgatagactaagacactagcggaatagctttagtcttgcaaaactgaattcacgactaacagtattccgtttgtactatcataaaatcgatctatcgctcttaagtttcacggactggtctgtctagactagctgttggagaaacaaatgggtccctgcataaggccactcgctggtggatgtcctggccgtgctgcaaccaaagacgtcgcctgaaaattggaaaacttaagagcatcgacagtgtcttctagcatttctggtactgctgtctgtgaaccgtgccatatccgaaacttgatctaatgaacaactggcgagttacctaggaattaggttctcttagccggcggagacattcgaaaaatcggacgacaacgccgtcatagcgagtgatcgatcgggcggccccatttgttatgcccgtgagggcttaggaacagaaccttcgttggtgcgcataagaaaacacatcactgcacgggaacaaattagaggctggggccacaacgtctgaggcgttgacatgcaaccaaagtgttgtggctgagactcgaaacgtctaccgggtcactcggtagtggagtgccctatcaagtgcagactaacgagtcaagatgacatgttttctaatcccttgcgaaatgcatagatctacgcaaatttgaattcagcgaccgaagctaatggaggtcagatcatgccatcagtttgaatgacctgtcatatgaagaggcgttgctaaacatctatgcaaggattcgggcactgtcaatgtgatctggtattagtggttacaattatgcctcgtgtaccctttgccatgtggagagaatatgggaagaggtacgggatcaataggcgcagcagtcctgcatgaactgtcgaagcctatatcacctgtactagcgacgaggttcgtaggcccaggtaggtcttgacgacgatcaataatgagcgggcttgtctggtgctttttttaatgcctaaccattataattcccaccagaacacatcgtacgaggcacttccggaacaaacaaactgcaacgaacggaggcacggcgaggatgatcggactcaagtgggtaagtggacgacgcaatcggcccagacccgccctgcagcaaagcctattgccctcccatggacgtagaaggacatgcaggaggatcggctcgactttggcggtggtcaactccgagatgggaatagcgtcttcactttgagatcacacagatcgagtcatcagagcgagtgatgtgcacactacgaagacgaggccccctcgttctctaccacgtcagagcccacggctccgcccaaccactgcgacgatgcactgagcgcaccaatcgtcgtagtggtgatgccctcacatcaaaactggcaatgtcaccttctgaatagatcaagactcacttagatccacatcactttttccatgcgtactgaacggtttcacccggtggtgttgacgctggcgctctacttgtctcactcaacaacattacttctggctggtaatagtttagtggccagcaaggattatagaatgttctgtttcttgaacggctaagaatggcatggctttgataggatgaatccttcaccgccatgtgccaataaactgcaatcaatccaatcatcagtcaaagacggcccgttatttgagttccagtatgaaatactgtagctatttgattcttgcccgagagactcctgagaactgctatagtgctctagagacattgaatcttacttgatactgtagtcctctcgattcaaaagtcgcctaactacttacgcaaggtcattagatctcgtttatttatttgaagtcacatagttcttaatctcgatgcgagcctatgtgtggctgctcacgttcaaacggtccgcttagctgaataacgcgtaacgtccaaaagcgtcgagacgcatgtagaaaaaaacccacccccattatcatcaaggatgtgatttgtcgctccggcaggcgtctgacgaagaaagcagggaagtcggcagcatcagatgttttggaagttttggaacgcaacttgtggcgttgttagcaaggaggtttgaggtgcctagtcatgcatggtctatcattgcgcccaatctgagaagtaatcgtaatgttgcggcgatgccactatactctgatgataatgtaaataatctctaggaatctcgccgcgcctgacagtcgtgcacccggagcctgacatgtgagcgaccaaactatgcatgacgggactactcaatgaatgcacgttgtggatggtagactgcataatatccgagtatggaatacaatatgaagctcgaaaggcatacacgaccttgtggtcctgcatgcaatatcaattttacgacggtgcctacccatcaggcaatgcagccggcccagccgcgcgcaatgaaggtggtgatgtacagtagtggtcgacacttacacactagagtggtcaggaatgtcgaaactaaaacctgtgaatcatcttcgagcagtctataccttcacacacaaggtcgtcggccgtacacgtacaaaaggatactggggttcaattaagcaggttgtcacttgacatacccaagatggtaataatatttctcaacaggcaagacaggcggcagtaatcttacccataagtggctcatgagggtagtattatggaacacgcccg

SEQ ID NO: 10499 - DNA, 1491 bp, Muscodor strobelii
  misc_feature: SGI cDNA ID NO. 563335
  misc_feature: Encodes the peptide sequence at SEQ ID NO 10500
atgaataatgccccagtatacggttatccaacgcctccggcatcgccattatacgaggacagcaagcccaggtatcagcatcaacccttcgctattccaacagtatgtcctccacgatatacacccgtcgctccggaggataggctcggaaagttcttaggagaaaccttgcagctggttggcattattggtactggagcatatggtgtggtctacctcgctgtcgatgtcgtaaccaacattcaatatgccgtcaaaacgctctgcaaattcaacgccgatggatcgcctttggatcgacgccagcttgcttttcagcatagggaattacgactgcaccatttagcatccgcccatcccaatgttgtgtctatgcataagattgtggacgacccgagctgtatctacgtggtcctggaatattgtccggagggagatctcttcctcaatatcaccgaacgtggccagtacgtcggtaaggacgacgtggtcaagagtgttttccttcagatcttggatgccgttgaacattgccatactttgggtatctaccaccgggatctgaagccagagaatattctcgtatcgaaccatggagaaactgtcaagctagccgactttggtcttgctacttcaaatgacaggtcagaggactacggctgtggctcaacgttctacatgtcgccagaatgcctagatccttcgtctcggaggccctactacttctgtgctccaaatgatgtttggtcccttggggttatcctggttaatttaacttgtggtcgcaacccatggagacaggcgtctttcgaggactccacatatcgagctttcaccaggagccaggacttcctcaggaccattttacctttgtcggacgacttgaacgatatcctaggccgtatcttcacccgcaatcccgaccaaagaattacgttatcggagctaaggaacagaattttggcctgttctaaatttacgttgactgcaacgcctgaggcattgccaatccgatcgccatcgccagagacccacgaatacatggattgcgaagatgcgattgacgacatgagctatgacgcaccgctttcccctgccagttcagactcggatggagattccacctgctcgtctgatgagggatcgcttacatcgagttgctccaccattgatgatctggatgatgacgacattttcgaaattcaaaacgaagagattcctatgccggaacctcaaatgtacgatatagaagaaccacacctatttccacaggaatttatcccgcagtgtaatggcgtatccgcgccaggagcctatcaaccgtgccccggttcagtttgtgctcaggccattcctccaacaagcaagttccctttcccctatttctgggacgttgtgaacagatataccccggcgccccaggtacaccagccaaatatttttcatcatcaacaattccctttactggcaagtttccaaggattttactag

SEQ ID NO: 10500 - protein, 496 aa, Muscodor strobelii
  misc_feature: SGI Peptide ID NO. 563335
  misc_feature (57)..(320): Pfam Id: PF00069 Pfam Desc: Protein kinase domain
  misc_feature (57)..(147): Pfam Id: PF07714 Pfam Desc: Protein tyrosine kinase
  misc_feature (10)..(496): NCBI GI: 261357750 Blast Desc: Ran1-like protein kinase [Verticillium albo-atrum VaMs.102]
  misc_feature (1)..(496): NCBI GI: 171676942 Blast Desc: protein product [Podospora anserina] gi|170936538|emb|CAP61198.1| protein product [Podospora anserina]
  misc_feature (1)..(496): NCBI GI: 116196668 Blast Desc: CHGG_04932 [Chaetomium globosum CBS 148.51] gi|88180845|gb|EAQ88313.1| CHGG_04932 [Chaetomium globosum CBS 148.51]
  misc_feature (1)..(496): NCBI GI: 1256839 Blast Desc: Ran1-like protein kinase [Nectria haematococca mpVI] gi|256723096|gb|EEU36474.1| [Nectria haematococca mpVI 77-13-4]
  misc_feature (1)..(496): NCBI GI: 46116424 Blast Desc: FG04054.1 [Gibberella zeae PH-1]
  misc_feature (7)..(377): NCBI GI: 145602239 Blast Desc: MGG_05074 [Magnaporthe grisea 70-15] gi|145010673|gb|EDJ95329.1| MGG_05074 [Magnaporthe grisea 70-15]
  misc_feature (1)..(387): NCBI GI: 85089019 Blast Desc: NCU04990 [Neurospora crassa OR74A] gi|28919149|gb|EAA28650.1| NCU04990 [Neurospora crassa OR74A]
  misc_feature (9)..(365): NCBI GI: 189204782 Blast Desc: negative regulator of sexual conjugation and meiosis [Pyrenophora tritici-repentis Pt-1C-BFP] gi|187985825|gb|EDU51313.1| negative regulator of sexual and
  misc_feature (44)..(378): NCBI GI: 239606867 Blast Desc: protein serine/threonine kinase [Ajellomyces dermatitidis ER-3]
  misc_feature (44)..(347): NCBI GI: 261191244 Blast Desc: protein serine/threonine kinase [Ajellomyces dermatitidis SLH14081] gi|239589796|gb|EEQ72439.1| protein serine/threonine kinase [Ajellomyces dermatitidis SLH14081]
  misc_feature (45)..(335): SWISSPROT Homolog: EC 2.7.11.1 Non-specific serine/threonine protein kinase
MNNAPVYGYPTPPASPLYEDSKPRYQHQPFAIPTVCPPRYTPVAPEDRLGKFLGETLQLVGIIGTGAYGVVYLAVDVVTNIQYAVKTLCKFNADGSPLDRRQLAFQHRELRLHHLASAHPNVVSMHKIVDDPSCIYVVLEYCPEGDLFLNITERGQYVGKDDVVKSVFLQILDAVEHCHTLGIYHRDLKPENILVSNHGETVKLADFGLATSNDRSEDYGCGSTFYMSPECLDPSSRRPYYFCAPNDVWSLGVILVNLTCGRNPWRQASFEDSTYRAFTRSQDFLRTILPLSDDLNDILGRIFTRNPDQRITLSELRNRILACSKFTLTATPEALPIRSPSPETHEYMDCEDAIDDMSYDAPLSPASSDSDGDSTCSSDEGSLTSSCSTIDDLDDDDIFEIQNEEIPMPEPQMYDIEEPHLFPQEFIPQCNGVSAPGAYQPCPGSVCAQAIPPTSKFPFPYFWDVVNRYTPAPQVHQPNIFHHQQFPLLASFQGFY

SEQ ID NO: 10501 - DNA, 2994 bp, Muscodor strobelii
  misc_feature: SGI EST ID NO. CUFF.24777.0
  misc_feature: Variant of the nucleotide sequence at SEQ ID NO 10499
ttcgagttcccacctctacccacccatccacaggaacaaccaggccgccattacggctagcgccatcgaattttattaagaatagcaagagcatacgtgtgtgtcaagttgtagcgtgagacagggattgatgcggtggctactggatcctcactggctcactagaaggcacagcggcatccaaacgacacaaagccaagaggccctagtcgttccagtgttgatatctgaatatctacatcaagcctcccaccagccatctgtgtttgatctggcgatgcttagatttcacgaccttcacctcactctcttaacaaccttctcgcatcaccactatcagcacagctcgaggactttccaatgatagcttctcactgaatcaacctttcctctctcctccccatcttcttctcctcggcggtgcctgatcgttggatccaaccactcacggatactcgacccaaggaatttccattggacttcatctggcccctattttggttaatacgttctgttaccgtgaacagctctttctcttttgcccttgttacttacagcccaggccaacttctggaccaacagagaaactgtcctgtgccgtaggataccatgaataatgccccagtatacggttatccaacgcctccggcatcgccattatacgaggacagcaagcccaggtatcagcatcaacccttcgctattccaacagtatgtcctccacgatatacacccgtcgctccggaggataggctcggaaagttcttaggagaaaccttgcagctggttggcattattggtactggagcatatggtgtggtctacctcgctgtcgatgtcgtaaccaacattcaatatgccgtcaaaacgctctgcaaattcaacgccgatggatcgcctttggatcgacgccagcttgcttttcagcatagggaattacgactgcaccatttagcatccgcccatcccaatgttgtgtctatgcataagattgtggacgacccgagctgtatctacgtggtcctggaatattgtccggagggagatctcttcctcaatatcaccgaacgtggccagtacgtcggtaaggacgacgtggtcaagagtgttttccttcagatcttggatgccgttgaacattgccatactttgggtatctaccaccgggatctgaagccagagaatattctcgtatcgaaccatggagaaactgtcaagctagccgactttggtcttgctacttcaaatgacaggtcagaggactacggctgtggctcaacgttctacatgtcgccagaatgcctagatccttcgtctcggaggccctactacttctgtgctccaaatgatgtttggtcccttggggttatcctggttaatttaacttgtggtcgcaacccatggagacaggcgtctttcgaggactccacatatcgagctttcaccaggagccaggacttcctcaggaccattttacctttgtcggacgacttgaacgatatcctaggccgtatcttcacccgcaatcccgaccaaagaattacgttatcggagctaaggaacagaattttggcctgttctaaatttacgttgactgcaacgcctgaggcattgccaatccgatcgccatcgccagagacccacgaatacatggattgcgaagatgcgattgacgacatgagctatgacgcaccgctttcccctgccagttcagactcggatggagattccacctgctcgtctgatgagggatcgcttacatcgagttgctccaccattgatgatctggatgatgacgacattttcgaaattcaaaacgaagagattcctatgccggaacctcaaatgtacgatatagaagaaccacacctatttccacaggaatttatcccgcagtgtaatggcgtatccgcgccaggagcctatcaaccgtgccccggttcagtttgtgctcaggccattcctccaacaagcaagttccctttcccctatttctgggacgttgtgaacagatataccccggcgccccaggtacaccagccaaatatttttcatcatcaacaattccctttactggcaagtttccaaggattttactagactacgctattttacaccattggacccgttctgatattggccttttaatcaacactatacctggacgttaccagcgcacacgatggacaaaaaccaaaaagagtctctccatggccagagtctcaaccacttcattgtacctacttcatatcttttatgtttttttatctgcgttactttttttgctttctggaagcgcggagttggtggacaatttgctgccaaatcatgtttctgaaaatcaaagagctaaaatatgttcgacttggtgggaaagactggtggtgacgagaaatttctggagttcttcaaggcgaaagcgactcttgaattctctaatgggcagatgctccgagctccaattagactgctggactcgatactttcgctgatgataccacaatgtttttgaatatttttcgggtttgtgtacagggtttggaggatggcacatcggatacacgagcttgcgagacgtgagatgtcttgtgggccacgacattagaggaagacgggccaatagcccattcattatcaatacgtttaacggtggtgggcgctggctaatgaggccgagtgtcccctgggttggtggaaggatatcatcttggatagactctacacagtcccacaatcaatgttatagcgagtattcgcgaatacttggtcataaattcttacatgacagtgattcataaatatcatatgaggtgactgaactagatctttacttggaatataactgcaacgagtggattatgctttcgatcaaaatgagcattctgggttcggaattatgccacaactattatacggaagagtgaagttcatgcggagagttaagagtgtcatcagattacaagggcgatcttagggtgtatgtggcaagcgcac

SEQ ID NO: 10502 - DNA, 2454 bp, Muscodor strobelii
  misc_feature: SGI cDNA ID NO. 563336
  misc_feature: Reduced expression when VOC is produced
  misc_feature: Encodes the peptide sequence at SEQ ID NO 10503
atggcgtcttcgccagtcagctcggacgagggcgagattgtggagaacactgttgggcactccaaggcaaatgacttgcctcagactaatggatctggtgttgaccgtgtcgacagaacgcgagatgaatatgcacgcgccaccacaaattcgccagagtactccgcctcctcgagacatgacctcgccacctcacgccgcagccgctcgcctcgcggcatgaagcgccctcgcgacgaccgtgatgtccgccatgactctcatcgcaacggccgcgctgatcctgatcctcgacgattccgtgtccactacgaagaccaccgcgacagccgcagctctcgtctttcctacgacgaccaagaccgcccggcaccgagatccagtcacgcagacttgcactacgacgacagggaccgagactacggccgcgaccgatacagagaccgcagcccagatcgcgatcgtgaccgctatccccagaagagtgccagaaatcgcacgcgctccccctacgcttcatctcgcagggatagaggtcgaggtgatgacttgaggcgcgacaatgacagaacgcgtcgagggccggaccgtgataaaactgagaatgtgaggtcaattcattatcagaacgggcaacggtcttcacagcgctcccccaatgcttctaaacaaacatctacagtaaacaagagtacagataaccccctggctcggtcgggagacaagtctacgaagcactcggaggatactgcgaacggcaacacccacgaagaggagaagcccgttgatgtggaggcggagctagcacgccgtcgccgtcgacgcgaggaactccttgcgaaatctcgaggcgccacaccactactcgtgaaagctctacagtcgtctgaaaatgccagtggctcttccgcttttccaacaaaggagaacacgccagctgctacaggaccaaacacaccgcaatctgctgtttcgtctccccgctcacccgccttgcaagagggaatgtcacctgcctcgatcgaaatcgctaatgatcaggacctgattaatactcgcacgtcagggggagataatgacgaagatgggccatctgcagctgactatgaccccactgctgatatgagggaggatgagttgagggacgagcgtcgtaatggccacatcgggcctcacggtgaggtgttgcaacctgatgagaaagccgaaattgcaccaactggtgaagacaagaatgttcacgcagcgaaagccaatgatgatgacgaatttgacatgtttgcagaggatttcgatgaagacaaatttgtcgcaccgaagcaagatcatcttgatcctgtggctgatgatcgcaaagtccctgctgcgttgttgcaaccccaggccggtggtattctcgagggcgatgataaagacgggtattacaaaattcgtactggagaaattatgaatggccggtatcaagttcagtccaccttaggaaagggtatgttctctggcgtggctcgggctgtcgacatcacgaacaagaggctagttgctatcaagatgatgcgtaacaacgatgcattgaggaagggtgggttcacggagattgccatcttacagaagctgaacaatgccgaccccgagaaccgcaaacacatcgtcaagttcgagcgtcatttcgaacacaaaggtcacctgtgtctggcgttcgaaaacctgagcctgaatttgcgtgaggttctccggaaattcggcaacaacatcggcatcaatatcagcgcgactcgtacctatgctcaccaaatttttgttgcacttgctcatttgcgcaagtgtagcattatccacgcggatctgaaaccagacaatatcctagtcaacgagactcgcagtacactcaagatctgtgatttaggtactgctattgaccgatctgatgcggccacggcacacactgagatcacaccctatctcatcagtcgcttctatcgtgcacccgagatcattttgggaataccctatgactacgccgtagatatgtggtcgattggatgcacactgtacgaattgtatacaggaaagatcctgtttgcaggcgacagcaataaccagatgctgaaagccatcatggaaattcgtggtaaaatcacctccaaactatacaaacgcggcgagctatctcacatgcactttgatgacctgggcaattttgtcagcgccgagcgcgacaagacacttggaaagataacaatgcgcacgatggctattgtcaaacccactcgcgatctacgcacacgtctcctgggtgcatcggggggaatgagcgatgctgagtcaagagatcttaaccacttcgttgatctactagagcgctgcctcgcgctgaatcctgataagagaatcactccctcggaggctctaagacacccgttcttcacaagcaggtcgaatgggtccgtcagataa

SEQ ID NO: 10503 - protein, 817 aa, Muscodor strobelii
  misc_feature: SGI Peptide ID NO. 563336
  misc_feature (487)..(808): Pfam Id: PF00069 Pfam Desc: Protein kinase domain
  misc_feature (487)..(714): Pfam Id: PF00069 Pfam Desc: Protein kinase domain
  misc_feature (783)..(808): Pfam Id: PF00069 Pfam Desc: Protein kinase domain
  misc_feature (619)..(707): Pfam Id: PF07714 Pfam Desc: Protein tyrosine kinase
  misc_feature (1)..(817): NCBI GI: 256723095 Blast Desc: NECHADRAFT_104634 [Nectria haematococca mpVI 77-13-4]
  misc_feature (6)..(817): NCBI GI: 46116422 Blast Desc: FG04053.1 [Gibberella zeae PH-1]
  misc_feature (1)..(811): NCBI GI: 116196666 Blast Desc: CHGG_04931 [Chaetomium globosum CBS 148.51] gi|88180844|gb|EAQ88312.1| CHGG_04931 [Chaetomium globosum CBS 148.51]
  misc_feature (100)..(808): NCBI GI: 164423728 Blast Desc: NCU10853 [Neurospora crassa OR74A] gi|157070211|gb|EDO64987.1| conserved [Neurospora crassa OR74A]
  misc_feature (3)..(757): NCBI GI: 145602241 Blast Desc: MGG_12944 [Magnaporthe grisea 70-15] gi|145010674|gb|EDJ95330.1| MGG_12944 [Magnaporthe grisea 70-15]
  misc_feature (1)..(808): NCBI GI: 154314947 Blast Desc: BC1G_04815 [Botryotinia fuckeliana B05.10] gi|150848353|gb|EDN23546.1| BC1G_04815 [Botryotinia fuckeliana B05.10]
  misc_feature (7)..(811): NCBI GI: 261357752 Blast Desc: serine/threonine-protein kinase prp4 [Verticillium albo-atrum VaMs.102]
  misc_feature (1)..(746): NCBI GI: 171676948 Blast Desc: protein product [Podospora anserina] gi|170936541|emb|CAP61201.1| protein product [Podospora anserina]
  misc_feature (1)..(808): NCBI GI: 156052723 Blast Desc: SS1G_06528 [Sclerotinia sclerotiorum 1980] gi|154704307|gb|EDO04046.1| SS1G_06528 [Sclerotinia sclerotiorum 1980]
  misc_feature (4)..(808): NCBI GI: 258563726 Blast Desc: serine/threonine-protein kinase prp4 [Uncinocarpus reesii 1704] gi|237908115|gb|EEP82516.1| serine/threonine-protein kinase prp4 [Uncinocarpus reesii 1704]
  misc_feature: Useful for introducing or modulating the production of volatile compounds
MASSPVSSDEGEIVENTVGHSKANDLPQTNGSGVDRVDRTRDEYARATTNSPEYSASSRHDLATSRRSRSPRGMKRPRDDRDVRHDSHRNGRADPDPRRFRVHYEDHRDSRSSRLSYDDQDRPAPRSSHADLHYDDRDRDYGRDRYRDRSPDRDRDRYPQKSARNRTRSPYASSRRDRGRGDDLRRDNDRTRRGPDRDKTENVRSIHYQNGQRSSQRSPNASKQTSTVNKSTDNPLARSGDKSTKHSEDTANGNTHEEEKPVDVEAELARRRRRREELLAKSRGATPLLVKALQSSENASGSSAFPTKENTPAATGPNTPQSAVSSPRSPALQEGMSPASIEIANDQDLINTRTSGGDNDEDGPSAADYDPTADMREDELRDERRNGHIGPHGEVLQPDEKAEIAPTGEDKNVHAAKANDDDEFDMFAEDFDEDKFVAPKQDHLDPVADDRKVPAALLQPQAGGILEGDDKDGYYKIRTGEIMNGRYQVQSTLGKGMFSGVARAVDITNKRLVAIKMMRNNDALRKGGFTEIAILQKLNNADPENRKHIVKFERHFEHKGHLCLAFENLSLNLREVLRKFGNNIGINISATRTYAHQIFVALAHLRKCSIIHADLKPDNILVNETRSTLKICDLGTAIDRSDAATAHTEITPYLISRFYRAPEIILGIPYDYAVDMWSIGCTLYELYTGKILFAGDSNNQMLKAIMEIRGKITSKLYKRGELSHMHFDDLGNFVSAERDKTLGKITMRTMAIVKPTRDLRTRLLGASGGMSDAESRDLNHFVDLLERCLALNPDKRITPSEALRHPFFTSRSNGSVR

SEQ ID NO: 10504 - DNA, 3681 bp, Muscodor strobelii
  misc_feature: SGI EST ID NO. CUFF.24875.1
  misc_feature: Variant of the nucleotide sequence at SEQ ID NO 10502
cagaggcacgtccttgtctgtcaggtagaaactcgaccaaacggccgcctgtttgatcaccatcatcccatttcatcccattcccgctctgtcgtccacgcgtcgcgcccctatcgacctctatcgacgcatctcgaccagacgtcaatagcattctctttttctttctcacacttcgttttcccgccccctcctgccacacgcattgcagctgccaaagaaaagtggaagactagatttcgtcatgcgaccgagttgaatagaacacacctcccggttcgactcaattctctgcctttttgaagtcttggagtcctcaagctaaccttgcatcttgacattgcaaaagatcgggagccgctgtataatcctttcgctgtgaggcaacgcgaacaggaggcaggcaagatggcgtcttcgccagtcagctcggacgagggcgagattgtggagaacactgttgggcactccaaggcaaatgacttgcctcagactaatggatctggtgttgaccgtgtcgacagaacgcgagatgaatatgcacgcgccaccacaaattcgccagagtactccgcctcctcgagacatgacctcgccacctcacgccgcagccgctcgcctcgcggcatgaagcgccctcgcgacgaccgtgatgtccgccatgactctcatcgcaacggccgcgctgatcctgatcctcgacgattccgtgtccactacgaagaccaccgcgacagccgcagctctcgtctttcctacgacgaccaagaccgcccggcaccgagatccagtcacgcagacttgcactacgacgacagggaccgagactacggccgcgaccgatacagagaccgcagcccagatcgcgatcgtgaccgctatccccagaagagtgccagaaatcgcacgcgctccccctacgcttcatctcgcagggatagaggtcgaggtgatgacttgaggcgcgacaatgacagaacgcgtcgagggccggaccgtgataaaactgagaatgtgaggtcaattcattatcagaacgggcaacggtcttcacagcgctcccccaatgcttctaaacaaacatctacagtaaacaagagtacagataaccccctggctcggtcgggagacaagtctacgaagcactcggaggatactgcgaacggcaacacccacgaagaggagaagcccgttgatgtggaggcggagctagcacgccgtcgccgtcgacgcgaggaactccttgcgaaatctcgaggcgccacaccactactcgtgaaagctctacagtcgtctgaaaatgccagtggctcttccgcttttccaacaaaggagaacacgccagctgctacaggaccaaacacaccgcaatctgctgtttcgtctccccgctcacccgccttgcaagagggaatgtcacctgcctcgatcgaaatcgctaatgatcaggacctgattaatactcgcacgtcagggggagataatgacgaagatgggccatctgcagctgactatgaccccactgctgatatgagggaggatgagttgagggacgagcgtcgtaatggccacatcgggcctcacggtgaggtgttgcaacctgatgagaaagccgaaattgcaccaactggtgaagacaagaatgttcacgcagcgaaagccaatgatgatgacgaatttgacatgtttgcagaggatttcgatgaagacaaatttgtcgcaccgaagcaagatcatcttgatcctgtggctgatgatcgcaaagtccctgctgcgttgttgcaaccccaggccggtggtattctcgagggcgatgataaagacgggtattacaaaattcgtactggagaaattatgaatggccggtatcaagttcagtccaccttaggaaagggtatgttctctggcgtggctcgggctgtcgacatcacgaacaagaggctagttgctatcaagatgatgcgtaacaacgatgcattgaggaagggtgggttcacggagattgccatcttacagaagctgaacaatgccgaccccgagaaccgcaaacacatcgtcaagttcgagcgtcatttcgaacacaaaggtcacctgtgtctggcgttcgaaaacctgagcctgaatttgcgtgaggttctccggaaattcggcaacaacatcggcatcaatatcagcgcgactcgtacctatgctcaccaaatttttgttgcacttgctcatttgcgcaagtgtagcattatccacgcggatctgaaaccagacaatatcctagtcaacgagactcgcagtacactcaagatctgtgatttaggtactgctattgaccgatctgatgcggccacggcacacactgagatcacaccctatctcatcagtcgcttctatcgtgcacccgagatcattttgggaataccctatgactacgccgtagatatgtggtcgattggatgcacactgtacgaattgtatacaggaaagatcctgtttgcaggcgacagcaataaccagatgctgaaagccatcatggaaattcgtggtaaaatcacctccaaactatacaaacgcggcgagctatctcacatgcactttgatgacctgggcaattttgtcagcgccgagcgcgacaagacacttggaaagataacaatgcgcacgatggctattgtcaaacccactcgcgatctacgcacacgtctcctgggtgcatcggggggaatgagcgatgctgagtcaagagatcttaaccacttcgttgatctactagagcgctgcctcgcgctgaatcctgataagagaatcactccctcggaggctctaagacacccgttcttcacaagcaggtcgaatgggtccgtcagataagattattgcaagttagtcggtgaagttcattaatctagtgattggaaagtggaacttaaaaggtcgtgaactagacgtctggtcatcgtgatggttgggtgtggaaagaggctcgaagttgatcaatggatcaagccgagaatgattagcgaaactagttgatttgcaaatcatataactgacaatacaaattaaccgttatcacgcattgcattggcgaggcggaatgggaaatagatgggactccaaaacccggctatcagtgattacccctatcgctaccacataaaagcatacatctaattgaattaattatacaaattcaccgcaagaattcttttgttaagactttcaacaaatattttaaacgtagcatataaataatattctggtatcagaatcaatcattttggtggccagccttagatgtggtgatttaatagcaatgtggttcttttggagtcccatctatttcccatcccgcctcgatttgtgagctgggacctgattattcgctacggtttcataccatgtgagcactaggatcatgccgcttgacatcacattacgagatcttgaatcgcagtggaatcggctatcgatgtcgatcaccttcctcttcaataatagcaggtaactaaggtagtaattatgcgttcgtagttgattagctgccgccgaagtagttggcgtaagttggctttctcggctctacttgcgtggccacgctatcgagggtctagatcataacggtggagtcgctctgcgtactcgggcgttggcgcggcgcttccgctccgctgccagtcctactgggcg

SEQ ID NO: 10505 - DNA, 1590 bp, Muscodor strobelii
  misc_feature: SGI cDNA ID NO. 563337
  misc_feature: Encodes the peptide sequence at SEQ ID NO 10506
atgagtagcccaaagcactcgagcgcgcccttaggggcgcacaacgacgactattccgatgagtctgatttcagggatatcgaccccagctccggcgtcaaacggggcttgaagacgaggcatctgagcatgatggcgctcgccggtatcatcggccccggcttactcgtcggcagtggtggcgctctttccgaaggcgggcccgcagcgctgcttatcggcttcggcctcattggcatcgtcgcatttagcatcatgcaaagtctaggagagcttacgacactctacccctccggtggtgcctttacgaagctcgccgatcggatggtcgatcccgcatttgctgctgcggtcggctggaattacttcatcatatggttcgctgtgcttgccaacgagtacaatgccgtcacgtcaatcttatcgttttggagcgaaaaggttcccatttggggctactttctcctgctttggtctgcgttccttggatttcagctgcttggagtcgaaaccttcggagaagcggaattttggcttgccttgctgaaacttgccggtctcgttgcttattacatatttgctatcgtatacgctgctggaggagtcattggtgcacccgctattggcgtaacgtactggcatgatccgggaccatttgtgtccggattcgctggtgttgcaaaagtatttgtcttctgcagtaccttctatgcgggagttgaatctgtcgccgtggcggcgacagaaaccaagaatccgggtacagcggtgccactggcgatccgtcaagtgttctggcgcattatcttcgtctacctcggcgccgcgtttttcttcggcattacatgcccgtcgaatgccgacggcctaattaacggcggcagcagggcgctgcagtccccgatgacaatcgcgatacaaaatgccggatgggaaggaggtgttcacctcatcaatgcattcattctcgtcacttgtatctccgcaatcaacagttctatatatatcgcgtcgcgcacagtcttattcatggcacaggacggtaaagcgccaaagttccttgggtggacagatcgacgaggtgttccgacgcctgccatcgttttctccaatgctttcggagcactttcattgctgaatctctcttctggagcatcggaagcctacacctatatagtgaatctctccggtgtttcaaccttccttgtttggggttcgatctcgttcatccatatcagatttcggcaagcttggcaagcgcagggctatctcgttgacgaactccccttcgtctcgctatggtatccctggaatgcatggtttggcctcggggccaacctattcttggctctcgtccaaggatggacaacgtttgcgcctttcaacgccgggaaatttgtagacgcttatattctgctgccgctctttggcatcatctacattgtctataagctgtggttcaagacacgattttggcgtttgagcgagattgatttgcaatctggacgccgtcgagatctcgaggaagagaaagaactaccagttggggcacatatcccttggtggcgaaagctttggaacaatttctga

SEQ ID NO: 10506 - protein, 529 aa, Muscodor strobelii
  misc_feature: SGI Peptide ID NO. 563337
  misc_feature (41)..(496): Pfam Id: PF00324 Pfam Desc: Amino acid permease
  misc_feature (5)..(528): NCBI GI: 116194902 Blast Desc: CHGG_04049 [Chaetomium globosum CBS 148.51] gi|88179962|gb|EAQ87430.1| CHGG_04049 [Chaetomium globosum CBS 148.51]
  misc_feature (3)..(529): NCBI GI: 85085451 Blast Desc: general amino acid permease AGP3 [Neurospora crassa OR74A] gi|28918604|gb|EAA28276.1| general amino acid permease AGP3 [Neurospora crassa OR74A] gi|40882186|emb|CAF06012.1| amino
  misc_feature (23)..(529): NCBI GI: 39940266 Blast Desc: MGG_05107 [Magnaporthe grisea 70-15] gi|145010638|gb|EDJ95294.1| MGG_05107 [Magnaporthe grisea 70-15]
  misc_feature (3)..(528): NCBI GI: 170940324 Blast Desc: protein product [Podospora anserina]
  misc_feature (19)..(524): NCBI GI: 46111771 Blast Desc: FG02767.1 [Gibberella zeae PH-1]
  misc_feature (2)..(513): NCBI GI: 169597645 Blast Desc: SNOG_01610 [Phaeosphaeria nodorum SN15] gi|160707564|gb|EAT91259.2| SNOG_01610 [Phaeosphaeria nodorum SN15]
  misc_feature (1)..(528): NCBI GI: 156061871 Blast Desc: SS1G_03081 [Sclerotinia sclerotiorum 1980] gi|154700482|gb|EDO00221.1| SS1G_03081 [Sclerotinia sclerotiorum 1980]
  misc_feature (1)..(529): NCBI GI: 154311704 Blast Desc: BC1G_06311 [Botryotinia fuckeliana B05.10] gi|150850822|gb|EDN26015.1| BC1G_06311 [Botryotinia fuckeliana B05.10]
  misc_feature (2)..(525): NCBI GI: 189195482 Blast Desc: histidine permease [Pyrenophora tritici-repentis Pt-1C-BFP] gi|187979958|gb|EDU46584.1| histidine permease [Pyrenophora tritici-repentis Pt-1C-BFP]
  misc_feature (3)..(467): NCBI GI: 261352830 Blast Desc: general amino acid permease AGP3 [Verticillium albo-atrum VaMs.102]
MSSPKHSSAPLGAHNDDYSDESDFRDIDPSSGVKRGLKTRHLSMMALAGIIGPGLLVGSGGALSEGGPAALLIGFGLIGIVAFSIMQSLGELTTLYPSGGAFTKLADRMVDPAFAAAVGWNYFIIWFAVLANEYNAVTSILSFWSEKVPIWGYFLLLWSAFLGFQLLGVETFGEAEFWLALLKLAGLVAYYIFAIVYAAGGVIGAPAIGVTYWHDPGPFVSGFAGVAKVFVFCSTFYAGVESVAVAATETKNPGTAVPLAIRQVFWRIIFVYLGAAFFFGITCPSNADGLINGGSRALQSPMTIAIQNAGWEGGVHLINAFILVTCISAINSSIYIASRTVLFMAQDGKAPKFLGWTDRRGVPTPAIVFSNAFGALSLLNLSSGASEAYTYIVNLSGVSTFLVWGSISFIHIRFRQAWQAQGYLVDELPFVSLWYPWNAWFGLGANLFLALVQGWTTFAPFNAGKFVDAYILLPLFGIIYIVYKLWFKTRFWRLSEIDLQSGRRRDLEEEKELPVGAHIPWWRKLWNNF

SEQ ID NO: 10507 - DNA, 897 bp, Muscodor strobelii
  misc_feature: SGI cDNA ID NO. 563338
  misc_feature: Encodes the peptide sequence at SEQ ID NO 10508
atgaagtggcttgtattagcggtgggcttgctggcccagctttcctttgcaccggcagtattcgcctccgttgaggctacgtcaaacattcggagtttatatctgttcaaggatgtgatggtatcgaacacaacggcaatcaagacatctgggttcaacagtgtcgttatgtttggcgtaggcattcttgcagatggtggcataatgtattactcaaacacgcccggtagtagtgatgttctcgttgcgtcaaacggagcctatgtcgggggcgatgcactagcagctaaagtcctctcattcaagcaaggaactacaggaatcaacagagtcgagatatcaatgaactcgcagcatgtcaaagatctgatggccagtccaggaccagggtcaaacacgccattatacaagaattttgctgctctgaagacagcatggggccttgatgccgtcaacaatgatgacgaatcactttatgatgtctctagtacagtcacttttgccaagatgcttgggcaaattggctacaagtatacgatcgcgccatacacaaactcaggtttctggagctcgctcatcaaacagacgaatagtggtctctcagaaccaaatcttttgattgatagagtttatctccaatgctacgacggaggcgctgggaataatccagcaagttggtcaagcacgcttggattgaaagtcgtgcctctcgtttgggtcactaatgactcgaagccgtcgcaaggtacgacagctgctcaggctaagacgaagttcacgagttggaactcccaggggggtattgttggtggtgggtattggaatgattatgatatcgagaagaacgggctatcgtatacatcatatggcgctgtattgacgagtctctttccttga

SEQ ID NO: 10508 - protein, 298 aa, Muscodor strobelii
  misc_feature: SGI Peptide ID NO. 563338
  misc_feature (28)..(298): NCBI GI: 170940397 Blast Desc: protein product [Podospora anserina]
  misc_feature (28)..(297): NCBI GI: 116198627 Blast Desc: CHGG_07469 [Chaetomium globosum CBS 148.51] gi|88178748|gb|EAQ86216.1| CHGG_07469 [Chaetomium globosum CBS 148.51]
  misc_feature (15)..(298): NCBI GI: 39946806 Blast Desc: [Magnaporthe grisea 70-15] gi|145012337|gb|EDJ96993.1| [Magnaporthe grisea 70-15]
  misc_feature (21)..(297): NCBI GI: 39972177 Blast Desc: [Magnaporthe grisea 70-15] gi|145016567|gb|EDK00997.1| [Magnaporthe grisea 70-15]
  misc_feature (47)..(281): NCBI GI: 108758494 Blast Desc: lysyl endopeptidase domain-containing protein [Myxococcus xanthus DK 1622] gi|108462374|gb|ABF87559.1| S1D (lysyl endopeptidase) subfamily C-terminal domain protein xanthus
  misc_feature (47)..(269): NCBI GI: 160879856 Blast Desc: coagulation factor 5/8 type domain-containing protein [Clostridium phytofermentans ISDg] gi|160428522|gb|ABX42085.1| coagulation factor 5/8 type domain protein [Clostridium ISDg]
  misc_feature (47)..(283): NCBI GI: 115376498 Blast Desc: endo-beta-N-acetylglucosaminidase [Stigmatella aurantiaca DW4/3-1] gi|115366501|gb|EAU65502.1| endo-beta-N-acetylglucosaminidase [Stigmatella aurantiaca
  misc_feature (39)..(239): NCBI GI: 223940641 Blast Desc: Immunoglobulin subtype [bacterium Ellin514] gi|223890687|gb|EEF57206.1| Immunoglobulin subtype [bacterium Ellin514]
  misc_feature (36)..(279): NCBI GI: 256423328 Blast Desc: Ricin B lectin [Chitinophaga pinensis DSM 2588] gi|256038236|gb|ACU61780.1| Ricin B lectin [Chitinophaga pinensis DSM 2588]
  misc_feature (47)..(297): NCBI GI: 256421225 Blast Desc: beta and gamma crystallin [Chitinophaga pinensis DSM 2588] gi|256036133|gb|ACU59677.1| beta and gamma crystallin [Chitinophaga pinensis DSM 2588]
MKWLVLAVGLLAQLSFAPAVFASVEATSNIRSLYLFKDVMVSNTTAIKTSGFNSVVMFGVGILADGGIMYYSNTPGSSDVLVASNGAYVGGDALAAKVLSFKQGTTGINRVEISMNSQHVKDLMASPGPGSNTPLYKNFAALKTAWGLDAVNNDDESLYDVSSTVTFAKMLGQIGYKYTIAPYTNSGFWSSLIKQTNSGLSEPNLLIDRVYLQCYDGGAGNNPASWSSTLGLKVVPLVWVTNDSKPSQGTTAAQAKTKFTSWNSQGGIVGGGYWNDYDIEKNGLSYTSYGAVLTSLFP

SEQ ID NO: 10509 - DNA, 1200 bp, Muscodor strobelii
  misc_feature: SGI EST ID NO. CUFF.24794.0
  misc_feature: Variant of the nucleotide sequence at SEQ ID NO 10507
ctgaactatatcattcctctcgcggttgaaaatccgcacttcatattttgtagatcgtgaaatttgtgttgaaataatcaaggtgaagtcgatcgaattcaacaagatgaagtggcttgtattagcggtgggcttgctggcccagctttcctttgcaccggcagtattcgcctccgttgaggctacgtcaaacattcggagtttatatctgttcaaggatgtgatggtatcgaacacaacggcaatcaagacatctgggttcaacagtgtcgttatgtttggcgtaggcattcttgcagatggtggcataatgtattactcaaacacgcccggtagtagtgatgttctcgttgcgtcaaacggagcctatgtcgggggcgatgcactagcagctaaagtcctctcattcaagcaaggaactacaggaatcaacagagtcgagatatcaatgaactcgcagcatgtcaaagatctgatggccagtccaggaccagggtcaaacacgccattatacaagaattttgctgctctgaagacagcatggggccttgatgccgtcaacaatgatgacgaatcactttatgatgtctctagtacagtcacttttgccaagatgcttgggcaaattggctacaagtatacgatcgcgccatacacaaactcaggtttctggagctcgctcatcaaacagacgaatagtggtctctcagaaccaaatcttttgattgatagagtttatctccaatgctacgacggaggcgctgggaataatccagcaagttggtcaagcacgcttggattgaaagtcgtgcctctcgtttgggtcactaatgactcgaagccgtcgcaaggtacgacagctgctcaggctaagacgaagttcacgagttggaactcccaggggggtattgttggtggtgggtattggaatgattatgatatcgagaagaacgggctatcgtatacatcatatggcgctgtattgacgagtctctttccttgattcactcggaaaaacaacgctcaagtgcgagacacgtggaggtaaagacacattgtattacgagagtcagttttcgaatatactgaagcactacacatttatgctactggtatatcagcgcgagacagcttaaatgattgctttatgctcttagcttgatggcgatatacgaataatccgagcatatattatcttcg

SEQ ID NO: 10510 - DNA, 897 bp, Muscodor strobelii
  misc_feature: SGI cDNA ID NO. 563339
  misc_feature: Encodes the peptide sequence at SEQ ID NO 10511
atggcacaactcaaaacgatcagaacagatattctcgaaatcgcatactacgaacacggatcaccaggtggatggcccgtcgttctcgtacacggctttccctacgatatccacgcgtacgacggcgtagtccctcacctcgtttcacaaggcgcgcgggtgattgttccatacgtacgtggtttcgggccaacacgctttctatcaccagacacgatgcgcagcggacagcaagctgccttaggcaaggatctgatatccctactcgacgccttacaaataccaaaagcagtgctcgggggctttgattggggcggcgtagcaacatgtgttgtgtccgccctctggccagaacgagtcacgggactagtgagctacgcaggctacgatattgtagatgtggccgggcacgcaaaaccctgtccgccgagcttggagtctgtgatttggtaccagcatctcttccagagcgaacgagggcgtgaatgccttgccaaggatcgaaaggagctttctaaattactctggaagcagtggtcgccaacttggaacttcagcgatgaatctttcgatcgtacggcgcaatcattcgaaaaccctgatttcgttgatgttgtgattcacgcgtatcgtttttgtttcgggaatgaggcaggcgatccggtacttgagccattagaaaagcagctagctgcgaagcccaagataactattccgtgtatcactctcgacggctctcaagatcctctaaagcccggcgggacggctgctcatgctgtgcacttcacagggcgtcatgagttaaggaccatggaggttgggcatgcttttccgtttgaagcacctcatgagttcgcgaacgctgtacttgatgtgtatgattggtcgaattcgtag

SEQ ID NO: 10511 - protein, 298 aa, Muscodor strobelii
  misc_feature: SGI Peptide ID NO. 563339
  misc_feature (52)..(291): Pfam Id: PF00561 Pfam Desc: alpha/beta hydrolase fold
  misc_feature (9)..(297): NCBI GI: 46122731 Blast Desc: FG05743.1 [Gibberella zeae PH-1]
  misc_feature (4)..(296): NCBI GI: 91777448 Blast Desc: epoxide hydrolase [Burkholderia xenovorans LB400] gi|91690108|gb|ABE33306.1| epoxide hydrolase [Burkholderia xenovorans LB400]
  misc_feature (1)..(292): NCBI GI: 148258362 Blast Desc: alpha/beta family hydrolase [Bradyrhizobium sp. BTAi1] gi|146410535|gb|ABQ39041.1| Hydrolase, alpha/beta fold family [Bradyrhizobium sp. BTAi1]
  misc_feature (4)..(290): NCBI GI: 186472752 Blast Desc: alpha/beta hydrolase fold protein [Burkholderia phymatum STM815] gi|184195084|gb|ACC73048.1| alpha/beta hydrolase fold protein [Burkholderia phymatum STM815]
  misc_feature (4)..(292): NCBI GI: 222086182 Blast Desc: epoxide hydrolase protein [Agrobacterium radiobacter K84] gi|221723630|gb|ACM26786.1| epoxide hydrolase protein [Agrobacterium radiobacter K84]
  misc_feature (1)..(292): NCBI GI: 146337989 Blast Desc: alpha/beta family hydrolase [Bradyrhizobium sp. ORS278] gi|146190795|emb|CAL74800.1| Hydrolase, alpha/beta fold family [Bradyrhizobium sp. ORS278]
  misc_feature (1)..(292): NCBI GI: 27378093 Blast Desc: epoxide hydrolase protein [Bradyrhizobium japonicum USDA 110] gi|27351239|dbj|BAC48247.1| blr2982 [Bradyrhizobium japonicum USDA 110]
  misc_feature (4)..(292): NCBI GI: 27884649 Blast Desc: epoxide hydrolase-related protein [Pseudomonas chlororaphis subsp. aurantiaca]
  misc_feature (4)..(297): NCBI GI: 88854975 Blast Desc: ephB, [marine actinobacterium PHSC20C1] gi|88815503|gb|EAR25360.1| ephB, [marine actinobacterium PHSC20C1]
  misc_feature (1)..(292): NCBI GI: 239814708 Blast Desc: alpha/beta hydrolase fold protein [Variovorax paradoxus S110] gi|239801285|gb|ACS18352.1| alpha/beta hydrolase fold protein [Variovorax paradoxus S110]
MAQLKTIRTDILEIAYYEHGSPGGWPVVLVHGFPYDIHAYDGVVPHLVSQGARVIVPYVRGFGPTRFLSPDTMRSGQQAALGKDLISLLDALQIPKAVLGGFDWGGVATCVVSALWPERVTGLVSYAGYDIVDVAGHAKPCPPSLESVIWYQHLFQSERGRECLAKDRKELSKLLWKQWSPTWNFSDESFDRTAQSFENPDFVDVVIHAYRFCFGNEAGDPVLEPLEKQLAAKPKITIPCITLDGSQDPLKPGGTAAHAVHFTGRHELRTMEVGHAFPFEAPHEFANAVLDVYDWSNS

SEQ ID NO: 10512 - DNA, 1668 bp, Muscodor strobelii
  misc_feature: SGI cDNA ID NO. 563340
  misc_feature: Encodes the peptide sequence at SEQ ID NO 10513
atgaccgaaccagtggcagaggccaccacaacaactcttgcgactcggccacgcaatagagtctctaagccggccgcgagaaacgtcgacaatgactccaccgagtcagacacacaatcctctacggagtctgggacgccatcggattcagatgtcactgagaaagctgcgaatcaacccaagaagcggaaagctgaaagaagtttgagtcgcgaatccaaatcaaggacacgctttagccagaaggtggtgtctcaatctactataccgcggtcagcgtcaatgcagctaccgatggagttcccgaatggtgctcttcgcatcacacggacggcaggtcgcgcagacgccaaaaattgtatcaacttgcctgatatcatacatgcaaagcacctgaaatctgctggcatttattctttcttcattgcagaaagcgaactgtaccctcatcttccgttctcgaaactctccaatgaggtacccatctatataggaagagatgccaatatggaccctatgactaagattgcctgccaggaggctggcatcccgtttaaagagaaggtcacccgaaaggatctcgatgctattcgcggtgatctacaacgcttacatggtgacgcacctgataggaagaacttgcatacattttatgcgtggtgctctggctcggctcatacgaaaatcctgctgcttgtatacccaaattttctccgaattgtcataacgtcatgtaacatgatggacattgataccaagtttggcgataatcattggtatatccacgatgtcccaaatcttcggaggcccctgaaatcatctccaacaggatttgaagcaagcttactctcccacatggaagcgctaggtgcgccagaagaatttttgagctccgttagaggacactatgactattccagcgtgaaggtgcatctgattacctctgtgccgggcactcactcgggcacgaaagcagagcaacatggtttgctacgtctaagacgtgtgatgcgcaacttaaatctggacgtgggaaggaaagataaatcgaaggaccttgccttagaagtatgtgctgccagcatcggcaatctaactccaaagtggctgaacaacttttatgactgtttgagaggcagtgagagcctggatccaattggtgcttcagcagttcccgatatgaagatattctttccaacgactcaagatgtcaagaacgcaagcatatcagcacaggagggggcttcgaatatcggatgtcacatgcatccatggaaggatgcccctgtggcaatcaaacgcctcttccgacggtatcagtccaaagacgaaggctgtttattccaccaaaaattcatcttagcatacgattctcgtgcccgagaccataatccatattttgtctatatcggctcagccaacttgtctcagtcagcgtggggagccttggaatacgataagagaggcaacgaggccacttcggatacgaagctgatcaaaatgaccaattttgagtgcggcgtattaataccaggtgacatgatccacagtttacttgaagttggtacgaagacatggcaagaagggattgtacctcacgtacagactactgcaccctacaacctatccaaggacaaagcgtggaatgaccctggatgggtaaaatag

SEQ ID NO: 10513 - protein, 555 aa, Muscodor strobelii
  misc_feature: SGI Peptide ID NO. 563340
  misc_feature (99)..(541): Pfam Id: PF06087 Pfam Desc: Tyrosyl-DNA phosphodiesterase
  misc_feature (223)..(336): Pfam Id: PF06087 Pfam Desc: Tyrosyl-DNA phosphodiesterase
  misc_feature (62)..(511): NCBI GI: 145614288 Blast Desc: MGG_08847 [Magnaporthe grisea 70-15] gi|145021217|gb|EDK05346.1| MGG_08847 [Magnaporthe grisea 70-15]
  misc_feature (40)..(511): NCBI GI: 116192211 Blast Desc: CHGG_05823 [Chaetomium globosum CBS 148.51] gi|88181736|gb|EAQ89204.1| CHGG_05823 [Chaetomium globosum CBS 148.51]
  misc_feature (223)..(511): NCBI GI: 169854445 Blast Desc: [Coprinopsis cinerea okayama7#130] gi|116505032|gb|EAU87927.1| [Coprinopsis cinerea okayama7#130]
  misc_feature (30)..(479): NCBI GI: 85109758 Blast Desc: NCU06222 [Neurospora crassa OR74A] gi|28924724|gb|EAA33837.1| [Neurospora crassa OR74A]
  misc_feature (226)..(511): NCBI GI: 225678545 Blast Desc: conserved [Paracoccidioides brasiliensis Pb03]
  misc_feature (226)..(511): NCBI GI: 261190935 Blast Desc: tyrosyl-DNA phosphodiesterase domain-containing protein [Ajellomyces dermatitidis SLH14081] gi|239590920|gb|EEQ73501.1| tyrosyl-DNA phosphodiesterase protein
  misc_feature (223)..(510): NCBI GI: 46111419 Blast Desc: FG02591.1 [Gibberella zeae PH-1]
  misc_feature (223)..(518): NCBI GI: 224028313 Blast Desc: [Zea mays]
  misc_feature (223)..(511): NCBI GI: 145533358 Blast Desc: [Paramecium tetraurelia strain d4-2] gi|124420117|emb|CAK85032.1| protein product [Paramecium tetraurelia]
  misc_feature (223)..(510): NCBI GI: 255554997 Blast Desc: tyrosyl-DNA phosphodiesterase, [Ricinus communis] gi|223542381|gb|EEF43923.1| tyrosyl-DNA phosphodiesterase, [Ricinus communis]
MTEPVAEATTTTLATRPRNRVSKPAARNVDNDSTESDTQSSTESGTPSDSDVTEKAANQPKKRKAERSLSRESKSRTRFSQKVVSQSTIPRSASMQLPMEFPNGALRITRTAGRADAKNCINLPDIIHAKHLKSAGIYSFFIAESELYPHLPFSKLSNEVPIYIGRDANMDPMTKIACQEAGIPFKEKVTRKDLDAIRGDLQRLHGDAPDRKNLHTFYAWCSGSAHTKILLLVYPNFLRIVITSCNMMDIDTKFGDNHWYIHDVPNLRRPLKSSPTGFEASLLSHMEALGAPEEFLSSVRGHYDYSSVKVHLITSVPGTHSGTKAEQHGLLRLRRVMRNLNLDVGRKDKSKDLALEVCAASIGNLTPKWLNNFYDCLRGSESLDPIGASAVPDMKIFFPTTQDVKNASISAQEGASNIGCHMHPWKDAPVAIKRLFRRYQSKDEGCLFHQKFILAYDSRARDHNPYFVYIGSANLSQSAWGALEYDKRGNEATSDTKLIKMTNFECGVLIPGDMIHSLLEVGTKTWQEGIVPHVQTTAPYNLSKDKAWNDPGWVK

SEQ ID NO: 10514 - DNA, 2866 bp, Muscodor strobelii
  misc_feature: SGI EST ID NO. CUFF.24804.0
  misc_feature: Variant of the nucleotide sequence at SEQ ID NO 10512
ccaatatggaccctatgactaagattgcctgccaggaggctggcatcccgtttaaagagaaggtcacccgaaaggatctcgatgctattcgcggtgatctacaacgcttacatggtgacgcacctgataggaagaacttgcatacattttatgcgtggtgctctggctcggctcatacgaaaatcctgctgcttgtatacccaaattttctccgaattgtcataacgtcatgtaacatgatggacattgataccaagtttggcgataatcattggtatatccacgatgtcccaaatcttcggaggcccctgaaatcatctccaacaggatttgaagcaagcttactctcccacatggaagcgctaggtgcgccagaagaatttttgagctccgttagaggacactatgactattccagcgtgaaggtgcatctgattacctctgtgccgggcactcactcgggcacgaaagcagagcaacatggtttgctacgtctaagacgtgtgatgcgcaacttaaatctggacgtgggaaggaaagataaatcgaaggaccttgccttagaagtatgtgctgccagcatcggcaatctaactccaaagtggctgaacaacttttatgactgtttgagaggcagtgagagcctggatccaattggtgcttcagcagttcccgatatgaagatattctttccaacgactcaagatgtcaagaacgcaagcatatcagcacaggagggggcttcgaatatcggatgtcacatgcatccatggaaggatgcccctgtggcaatcaaacgcctcttccgacggtatcagtccaaagacgaaggctgtttattccaccaaaaattcatcttagcatacgattctcgtgcccgagaccataatccatattttgtctatatcggctcagccaacttgtctcagtcagcgtggggagccttggaatacgataagagaggcaacgaggccacttcggatacgaagctgatcaaaatgaccaattttgagtgcggcgtattaataccaggtgacatgatccacagtttacttgaagttggtacgaagacatggcaagaagggattgtacctcacgtacagactactgcaccctacaacctatccaaggacaaagcgtggaatgaccctggatgggtaaaatagggtaacgccttaagtttgatgatcgctaaagcttcgatgctaggtctcgcactatgggacttaagcctgagacacacgaacagcgatttggttaagtcttctcgcatgacgatggcctagtcgtgttagagtcgcacgatgtcaccgcctttctctggtctacgactgtaaatagacacataggcttagcgaccaaggggtggttctagatctggccagaagacaggatattgttacttcaccggtgcgtccagtgaagttgcagtacgccatgttgaataaaaatgaatggtatagatacatgtcatgttgattcagtcgtaagatacgtctagcagccctttttattcttcccaaatgcgtactcaattgtaaaatgccttttatgtgagccttggaatactgaagcctgtatggaaagtgcaaatgggaagattatttggcttaggaatcatagcttatggtacctcaagcattgctcacatagtgatcagaaaaggggtcatttggggtctatcgtataaagcaggggatcatggggatcctcgtttgattgtgaacatctcgtaggacgacggacaataccatagtcatgtcctccccagtgtttattgagttctttcaaagcctaagctgactagagtagtgagcggcattgactgcactattgcaatctagtcctctacgaattcgaccaatcatacacatcaagtacagcgttcgcgaactcatgaggtgcttcaaacggaaaagcatgcccaacctccatggtccttaactcatgacgccctgtgaagtgcacagcatgagcagccgtcccgccgggctttagaggatcttgagagccgtcgagagtgatacacggaatagttatcttgggcttcgcagctagctgcttttctaatggctcaagtaccggatcgcctgcctcattcccgaaacaaaaacgatacgcgtgaatcacaacatcaacgaaatcagggttttcgaatgattgcgccgtacgatcgaaagattcatcgctgaagttccaagttggcgaccactgcttccagagtaatttagaaagctcctttcgatccttggcaaggcattcacgccctcgttcgctctggaagagatgctggtaccaaatcacagactccaagctcggcggacagggttttgcgtgcccggccacatctacaatatcgtagcctgcgtagctcactagtcccgtgactcgttctggccagagggcggacacaacacatgttgctacgccgccccaatcaaagcccccgagcactgcttttggtatttgtaaggcgtcgagtagggatatcagatccttgcctaaggcagcttgctgtccgctgcgcatcgtgtctggtgatagaaagcgtgttggcccgaaaccacgtacgtatggaacaatcacccgcgcgccttgtgaaacgaggtgagggactacgccgtcgtacgcgtggatatcgtagggaaagccgtgtacgagaacgacgggccatccacctggtgatccgtgttcgtagtatgcgatttcgagaatatctgttctgatcgttttgagttgtgccatgatgggcgtgtactgttattggcgagttttctgtcacgtgaatgatcaagtttgagagtagatggccgagatgtctactttgcactcatatttcaagaattacaagaaatctcgttcgaac

SEQ ID NO: 10515 - DNA, 813 bp, Muscodor strobelii
  misc_feature: SGI cDNA ID NO. 563341
  misc_feature: Encodes the peptide sequence at SEQ ID NO 10516
atgcttcactcggagtcagcatttgcgaatgcgggcgtccttgtactccgagagatggtcaagtcttggtggaccgaagcgtgcaaagacagtcccatggccgaccttctggttcaacatcttgtgcgctgggtcgagtcgccagactcattcatgtatgaccgcgccttgcattactacgtacagatgatgagccgcaaggcattgctccaattaatggcagacttcagacgcgttgggtcacaagtcgtctttgctaactccaaccgactacttctccaaacgacaaaatctgaggttggcaatgcttatgcctacagtcaatacatcctaaagagcatcaagagcaaaccactattccacttcatcgacctcgaaatcaaagaatactgggattacctagtctggtatgacgaatacaactacggtggcaagggatgtcaagaagtagtggaagcagagcaacagagcctcgaaacaatcatgtgctggcagatgaagacgtttctccccatccgccttcaagacacattccagcactgggtcgtcgaattcattcagctcatgcacagcatcaaacggccgcataacggggaccctgactcgacgcgtcgaaccacacaactaccattccgcagcctcacgccaagtcaggatgtggacgacaaagacaaacctgaaataatcctaaccaagagctttgaacgcccactaaagaaggaaaatccaaaatctcatatccacacaagcgcgggagatgctacaccccgaactcgcttccgactggtctttcccgcttctcccggggaatag

SEQ ID NO: 10516 - protein, 270 aa, Muscodor strobelii
  misc_feature: SGI Peptide ID NO. 563341
  misc_feature (4)..(145): Pfam Id: PF08490 Pfam Desc: Domain of function (DUF1744)
  misc_feature (2)..(269): NCBI GI: 46123375 Blast Desc: FG06065.1 [Gibberella zeae PH-1]
  misc_feature (2)..(241): NCBI GI: 256732576 Blast Desc: [Nectria haematococca mpVI 77-13-4]
  misc_feature (2)..(241): NCBI GI: 171679864 Blast Desc: protein product [Podospora anserina] gi|170939558|emb|CAP64785.1| protein product [Podospora anserina]
  misc_feature (1)..(241): NCBI GI: 145606913 Blast Desc: MGG_03850 [Magnaporthe grisea 70-15] gi|145014538|gb|EDJ99106.1| MGG_03850 [Magnaporthe grisea 70-15]
  misc_feature (2)..(269): NCBI GI: 116204163 Blast Desc: conserved [Chaetomium globosum CBS 148.51] gi|88176093|gb|EAQ83561.1| conserved [Chaetomium globosum CBS 148.51]
  misc_feature (2)..(241): NCBI GI: 164425735 Blast Desc: DNA polymerase epsilon [Neurospora crassa OR74A] gi|157071041|gb|EAA26703.2| DNA polymerase epsilon [Neurospora crassa OR74A]
  misc_feature (1)..(241): NCBI GI: 154301328 Blast Desc: BC1G_10334 [Botryotinia fuckeliana B05.10] gi|150856235|gb|EDN31427.1| BC1G_10334 [Botryotinia fuckeliana B05.10]
  misc_feature (1)..(241): NCBI GI: 156039593 Blast Desc: SS1G_11933 [Sclerotinia sclerotiorum 1980] gi|154697670|gb|EDN97408.1| SS1G_11933 [Sclerotinia sclerotiorum 1980]
  misc_feature (1)..(269): NCBI GI: 261204045 Blast Desc: DNA polymerase epsilon catalytic subunit A [Ajellomyces dermatitidis SLH14081] gi|239587021|gb|EEQ69664.1| DNA polymerase epsilon catalytic subunit A [Ajellomyces SLH14081]
  misc_feature (1)..(269): NCBI GI: 225560717 Blast Desc: DNA polymerase epsilon catalytic subunit A [Ajellomyces capsulatus G186AR]
  misc_feature (1)..(241): SWISSPROT Homolog: EC 2.7.7.7 DNA-directed DNA polymerase
MLHSESAFANAGVLVLREMVKSWWTEACKDSPMADLLVQHLVRWVESPDSFMYDRALHYYVQMMSRKALLQLMADFRRVGSQVVFANSNRLLLQTTKSEVGNAYAYSQYILKSIKSKPLFHFIDLEIKEYWDYLVWYDEYNYGGKGCQEVVEAEQQSLETIMCWQMKTFLPIRLQDTFQHWVVEFIQLMHSIKRPHNGDPDSTRRTTQLPFRSLTPSQDVDDKDKPEIILTKSFERPLKKENPKSHIHTSAGDATPRTRFRLVFPASPGE
